United States Patent Application Publication US 2018/0126003 A1 - sequence listing, part 57

SEQ ID NO: 100818 - DNA, 2082 bp, Artificial Sequence
  derived and/or modified sequence
atgctggtgcacctgtttcgcgttggcattaggggagggcccttccctggccgcctgttaccacccctccgattccaaaccttctctgctgtccggtattctgacggctacaggtctagctctcttttaagggctgttgcacacctcagatcccagctctgggctcacctgccacgggctccactggcccctcggtggtctccttccgcttggtgctgggtcggaggcgcattgttaggtcctatggtgctgtctaaacatccccacctttgtttggttgcgctctgtgaggctgaagaggcccctccggcgagtagcactccgcacgtcgtggggagccgcttcaattggaaattgttctggcagtttcttcacccacacctgctagtgctgggggtggcagtggtgctggccctgggtgccgccctggttaatgttcagatcccactgttacttggccaattggtggaagtggtggcgaagtacacacgggaccacgtggggtcctttatgaccgagtcgcaaaatttgagcacacatctgctcatcctgtacggggtgcagggactcctaacatttgggtatctggttctgctaagtcatgtgggcgaaagaatggccgttgatatgcgtagggcactgttcagcagcctgttacgccaggacataaccttttttgatgctaataagaccggacagctggtgtcgcgcctcacaacggacgtgcaggaattcaaatcctctttcaaactggtgatcagccagggtttgcgtagttgtacacaggtcgctggctgtttggtgagtctctccatgctgtcaacccgcctgactcttctgttgatggtcgctaccccggcgctcatgggcgttggaacgctgatgggcagtggattacgaaagttgtctcggcagtgtcaggagcagatcgcccgtgctatgggcgtagccgatgaagcactggggaacgtccgtaccgtaagggctttcgccatggagcagcgggaggaagaacgctatggagccgagctggaggcttgtcggtgcagggccgaagagcttggacgcggaatcgctctcttccagggcctgtccaatatcgccttcaattgcatggttctgggaactctgttcattggaggtagcctggttgccggccagcagctcacaggaggcgatcttatgtcgtttctcgtcgccagccagaccgtacaaagatccatggcaaatttgtccgtgctattcggtcaggtggttagaggcctgtcagctggcgccagagtcttcgagtatatggcactgaatccttgtattcccttgtcagggggatgttgtgtgcctaaggagcaactccgcggaagcgtcacttttcagaatgtatgcttttcatatccctgccgacctggattcgaagtattaaaagactttacccttactctgccacctggcaagattgtggccctggtgggccaaagtggggggggcaagaccacagtggcgtctctcctagagcgcttttatgatcctactgcaggggtcgtgatgctcgacggacgagacctacggaccctggatccgagctggctgagagggcaggttgtgggcttcatcagccaggaacctgttctgtttggcactacgatcatggagaacattcggttcggaaagctagaggcaagtgacgaggaggtctataccgccgcacgagaagctaacgcccacgagttcatcacctccttcccagaaggatacaacactgtagtgggcgaacggggcaccactctctctgggggccagaagcagcgccttgccatcgcaagggctctgattaaacagcccaccgtactgatcctggacgaggccacttccgccctcgatgccgagtcagaaagggtggtgcaagaggcgttagacagagcatctgctggacgcaccgtgttggctggaacgcacgaagagcttttgaagaaggggggactttacgcggagctgataaggaggcaggccttggacgcccctcgcacagctgctccccctcctaaaaagcctgagggaccacgttcccatcagcataaatcgtag

SEQ ID NO: 100819 - DNA, 1296 bp, Artificial Sequence
  derived and/or modified sequence
atgctggtgcacctgttccgggtgggcatccggggcggccccttccctggccgcctgctgccccccctgcgcttccagaccttctctgctgtgcgctacagtgatggctaccgcagcagcagcctgctgcgggctgtggcccacctgcggagccagctgtgggcccacctgccccgggcccccctggccccccgctggagccccagcgcctggtgctgggtgggcggggccctgctgggccccatggtgctgagcaagcacccccacctgtgcctggtggccctgtgtgaggccgaggaggcccccccagccagcagcacccctcatgtggtgggcagccgcttcaactggaagctgttctggcagttcctgcacccccacctgctggtgctgggcgtggccgtggtgctggccctgggcgccgccctggtgaatgtgcagatccccctgctgctgggccagctggtggaggtggtggccaagtacacccgggaccacgtgggcagcttcatgacagagagccagaacctgagcacccacctgctgatcctgtatggagtgcagggcctgctgaccttcggctacctggtgctgctgagccacgtgggggagaggatggctgtggacatgagaagagccctcttcagcagcctgctgcggcaggacatcaccttctttgatgccaacaagacaggccagctggtgtcccggctgaccacagatgtgcaggagttcaagagcagcttcaagctggtgatcagccagggcctgcggagctgcacccaggtggccggctgcctggtgtccctgtccatgctgagcacccggctgaccctgctgctgatggtggccaccccagccctgatgggcgtgggcaccctgatgggcagcggcctgaggaagctgagccggcagtgccaggagcagatcgcccgggccatgggcgtggctgatgaggccctgggcaatgtgaggacagtgcgggcctttgccatggagcagcgggaggaggagcgctacggggctgagctggaggcctgccgctgcagagctgaggagctgggccggggcatcgccctcttccagggcctgagcaacatcgccttcaactgcatggtgctgggcaccctcttcatcggcggcagcctggtggccggccagcagctgaccggcggggacctgatgtccttcctggtggccagccagacagtgcagagcttcctgcgggtggccccctgccccaacagcctgcccctgcaggccgtgaccttccacgcctggaaggaccacccctag

SEQ ID NO: 100820 - DNA, 2082 bp, Artificial Sequence
  derived and/or modified sequence
atgctggtgcacctgttccgggtgggcatccggggcggccccttccctggccgcctgctgccccccctgcgcttccagaccttctctgctgtgcgctacagtgatggctaccgcagcagcagcctgctgcgggctgtggcccacctgcggagccagctgtgggcccacctgccccgggcccccctggccccccgctggagccccagcgcctggtgctgggtgggcggggccctgctgggccccatggtgctgagcaagcacccccacctgtgcctggtggccctgtgtgaggccgaggaggcccccccagccagcagcacccctcatgtggtgggcagccgcttcaactggaagctgttctggcagttcctgcacccccacctgctggtgctgggcgtggccgtggtgctggccctgggcgccgccctggtgaatgtgcagatccccctgctgctgggccagctggtggaggtggtggccaagtacacccgggaccacgtgggcagcttcatgacagagagccagaacctgagcacccacctgctgatcctgtatggagtgcagggcctgctgaccttcggctacctggtgctgctgagccacgtgggggagaggatggctgtggacatgagaagagccctcttcagcagcctgctgcggcaggacatcaccttctttgatgccaacaagacaggccagctggtgtcccggctgaccacagatgtgcaggagttcaagagcagcttcaagctggtgatcagccagggcctgcggagctgcacccaggtggccggctgcctggtgtccctgtccatgctgagcacccggctgaccctgctgctgatggtggccaccccagccctgatgggcgtgggcaccctgatgggcagcggcctgaggaagctgagccggcagtgccaggagcagatcgcccgggccatgggcgtggctgatgaggccctgggcaatgtgaggacagtgcgggcctttgccatggagcagcgggaggaggagcgctacggggctgagctggaggcctgccgctgcagagctgaggagctgggccggggcatcgccctcttccagggcctgagcaacatcgccttcaactgcatggtgctgggcaccctcttcatcggcggcagcctggtggccggccagcagctgaccggcggggacctgatgtccttcctggtggccagccagacagtgcagaggtccatggccaacctgtctgtgctgtttggccaggtggtgcggggcctgtctgctggggcccgggtgtttgagtacatggccctgaacccctgcatccccctgagcggcggctgctgcgtgcccaaggagcagctgcggggctctgtgaccttccagaatgtgtgcttctcctacccctgccggcccggctttgaggtgctgaaggacttcaccctgaccctgcccccaggcaagatcgtggccctggtgggccagagcggcggcggcaagaccaccgtggccagcctgctggagcgcttctatgaccccacagctggggtggtgatgctggatggccgggacctgcggaccctggaccccagctggctgcggggccaggtggtgggcttcatcagccaggagcctgtgctgtttggcaccaccatcatggagaacatccgctttgggaagctggaggccagtgatgaggaggtgtacacagctgcccgggaggccaatgcccacgagttcatcaccagcttccctgagggctacaacacagtggtgggggagcggggcaccaccctgagcggcggccagaagcagaggctggccatcgcccgggccctgatcaagcagcccaccgtgctgatcctggatgaggccaccagcgccctggatgctgagagcgagcgggtggtgcaggaggccctggaccgggccagcgctggccgcacagtgctggccggcacccatgaggagctgctgaagaagggcggcctgtatgcagagctgatccggcggcaggccctggatgcccccaggacagctgcccccccacccaagaagccagagggccccaggagccaccagcacaagagctag

SEQ ID NO: 100821 - DNA, 1296 bp, Artificial Sequence
  derived and/or modified sequence
atgctggtgcacctgttccgggtgggcatccggggcggccccttccccggacggctgcttcctcccttgagattccagaccttctccgccgtgagatacagcgacggctataggtcaagctcgttgctgagagcggtggctcaccttcgctctcagctctgggctcatctgcctcgagcccccctcgctcccagatggtctccctctgcctggtgctgggtgggtggcgccctgctggggcccatggttctcagcaagcatccacacttatgtcttgtggccctttgcgaggctgaggaagcaccccccgcttcctccactccacatgtggtcggcagcaggttcaattggaagcttttctggcagttcttacatcctcacctgcttgtcctcggagtcgccgtcgtgcttgctcttggagcagctctcgtgaacgtgcagattcccctccttctcggccaactcgtagaggtcgtggccaagtacacccgggatcacgtcgggtcattcatgaccgagagtcagaacttatcgacacacttactcattttgtacggagtgcaaggcctgcttaccttcgggtatctcgtcttgctgtcccacgttggcgaacgtatggctgtcgatatgagacgggctctttttagcagtctccttaggcaggatataacatttttcgacgccaacaaaactggacagctcgttagtagactgacaactgacgtgcaggagtttaagagctccttcaaattggtgatatcccaaggactgaggtcttgtacacaggtcgccggctgcctagtcagcctctctatgttgtctactagattgacactgttattgatggtggccacacccgccctcatgggagttggaacactgatgggatctggactacggaaactgagccgtcagtgtcaggagcagattgcaagggcaatgggcgtggcagatgaggcgctgggaaatgtgagaaccgttcgtgcctttgccatggagcagagagaggaagagcgctacggcgctgagttagaagcgtgtcgttgtcgggctgaagagctgggccgaggcatcgctttgtttcaaggcctgagcaacatagcgtttaactgcatggtcctgggaacactcttcattggcgggagcctggttgcaggtcagcagttgaccggcggcgatctgatgagttttttggtggcctcgcagacggtccaatcttttctacgggtcgccccttgtccgaacagtttgcctctgcaagccgtgacctttcatgcatggaaggatcacccctag

SEQ ID NO: 100822 - DNA, 2082 bp, Artificial Sequence
  derived and/or modified sequence
atgctggtgcacctgttccgggtgggcatccggggcggccccttccccggaagactcctgccaccactgagattccaaaccttcagtgccgtacggtacagtgatggttataggtcaagctctcttctcagggcagtggctcatctcaggtctcagctttgggcccatctgcctagggcacctctcgcgcctcggtggtcgccaagcgcttggtgttgggtgggcggggcacttctcggtcccatggtactatcaaagcatccacatctgtgtctcgtggcactgtgtgaagctgaggaggctcctcccgcatcatctaccccccatgtcgtcggatccaggtttaattggaaactgttttggcagttcctgcacccccacttgttagtgctcggcgttgctgtggttctggctctgggtgccgctcttgtgaatgtccagataccactactgttgggccagcttgttgaagtggtggctaagtacactcgggaccacgtgggttccttcatgaccgagtctcagaacctttccacccatttactcatcctctacggcgtgcagggacttctgactttcggctacctggtgttattaagccatgtgggcgagcgcatggctgtagatatgcggcgggctctcttttcctcacttcttaggcaggacataaccttttttgatgccaataagaccggtcagctggtgtccaggcttaccactgatgtgcaggagttcaaaagttctttcaagttagtgatttcgcagggattacgatcatgtacacaggtggcaggttgtctcgtgagtctcagtatgctgtcaacacgcctgacactccttctcatggtggcaactcccgctctgatgggggtgggaacactgatggggtcaggtctgcgaaagctgtccagacagtgtcaggagcagattgctcgcgcaatgggcgttgccgacgaggccctagggaatgttcggactgtgagagcctttgccatggagcaacgggaagaggaaaggtacggcgcggaattggaagcatgccgctgcagggcagaggagctgggccgaggcatcgctttgtttcaaggcctcagtaatatcgcttttaactgcatggtgcttggaaccctattcatcggtgggagccttgtggctgggcagcaactgaccggtggcgatctgatgtcttttcttgttgccagtcagaccgttcagcgctccatggcgaacctatctgtgctgtttggccaagttgtgcgcggtctgtccgcaggagcccgcgtgttcgagtacatggccctgaatccttgcatccccttgtctggcggctgctgcgtcccaaaggagcagcttcgaggatcggtcacctttcagaacgtgtgtttttcttatccctgccgcccggggtttgaggttcttaaagattttactttgacactgccgcccggaaagatcgtggctctggtgggccagagtggaggggggaagacaacggttgcttcattgctcgagagattctatgatcctacagcaggcgtcgttatgttagacggtcgtgaccttcgaaccctggatcctagctggctacgcggtcaagtggtcggcttcataagccaggaacctgtactctttggtaccacgattatggagaatatcagattcggtaagttagaagcctcagacgaggaagtatacacggccgctcgcgaagctaacgctcacgaattcatcacgtctttccctgagggttataacaccgtggtcggggagcgcggcacgaccctgtctgggggccagaaacagcgtctggctattgcaagagcgctgattaagcagcctactgttctcatcctggatgaggcaacaagtgctctggacgcagaaagcgaaagagtagtgcaggaagcactagatcgggcctctgccggccgaactgtcctggcgggcacccatgaggaactgctgaagaaagggggcctttatgctgaactgattcgaaggcaggccttggacgccccacgaaccgcagctccaccaccgaaaaaaccagaaggtccacgctcccatcagcataagtcgtag

SEQ ID NO: 100823 - DNA, 1296 bp, Artificial Sequence
  derived and/or modified sequence
atgctcgttcatttattcagggtggggattcgcggagggccattccccggacgactgctcccccctctccgctttcagactttttccgctgtgcggtacagcgacggctataggagcagcagtcttctgagagctgtcgcccacctgcggtcacaactttgggcccacctgcccagagcgcctcttgctcctagatggtcccccagcgcttggtgttgggtcggcggagccctgctgggacccatggtgttgagtaaacacccacacctatgtcttgtcgctctgtgcgaagcagaagaagcccctcctgcaagtagcacgccccacgttgtgggatcacggttcaattggaagctcttctggcagtttctccacccacaccttctggtcctaggcgtggccgtggtcctcgctcttggagccgcactggtgaacgtacaaatacctctcttgctgggacagttggtggaggtcgtcgcgaagtataccagggatcacgtcggctcgttcatgacggagtcccagaacctatcaacccacctgctgatactgtacggagtgcagggactgctgacattcggttatttagtgttactatcccacgtgggcgaacgaatggccgtagacatgaggcgcgctctcttctcatcactgctcaggcaggacattacatttttcgacgccaataaaacgggccaactggtttcacggctgactaccgacgtgcaggagttcaaaagtagcttcaaattggtgatcagccagggccttcgctcatgtactcaggtcgccggatgtctcgtttccttatccatgcttagcactcggctgaccctgttgctgatggtggcaactcccgcactgatgggggtgggaactctgatgggttccggcctgcggaagcttagcaggcagtgccaagaacagattgctcgggcaatgggggtggctgatgaagcgttgggcaacgtgagaaccgtgcgcgctttcgccatggaacagcgggaggaggagagatacggtgccgaactggaggcttgccgatgtagagcagaggagttggggcgaggcatcgccctctttcaggggctcagcaacattgctttcaattgtatggtcctgggcacgctttttattgggggatccctcgtcgccggtcagcagctcaccgggggagacctcatgtctttcctagtggctagccagacagtgcagtcattcctgcgggtcgccccatgcccgaactctctcccattgcaggccgtgacctttcacgcatggaaagatcacccttag

SEQ ID NO: 100824 - DNA, 2082 bp, Artificial Sequence
  derived and/or modified sequence
atgctggtgcatttattccgcgtggggatccgcggaggccctttccccggtaggctgcttccacctttgcggttccagacattttcggctgtgcgatattccgatggctataggtccagctccctgctacgggctgttgcccacttgcggtcacagctatgggcccaccttcctcgggcacccctggcacctcggtggtccccgagtgcgtggtgttgggtgggaggggctctgctgggccctatggtcctctccaagcacccacatttgtgtctggtagctctctgtgaggcggaggaggcccctccggcatcgtccaccccgcacgtggtgggttcaagatttaattggaagctgttctggcaattccttcatccccatctgcttgtgcttggcgtcgccgtggtcctcgctttaggggctgccctggtcaatgtgcagattccactgctgctcggccagttagtggaggttgtggctaagtatactagagatcatgtgggcagcttcatgaccgagtcgcagaatttgagcacgcacctgctgattttatacggcgtgcagggtctcctcacattcggctaccttgtcctgctgtcacacgtgggagagaggatggccgttgatatgagacgtgcactcttctcttccctgctgagacaggacatcactttcttcgatgccaacaagaccggccagctcgtgtctcgcctgacgacggatgtgcaggaatttaaatcaagcttcaagctagtcatttcccagggcctgcgttcttgtacccaagtcgctggttgcttggtgagcctaagtatgctgagcacacgcctcacgctgctgctgatggtggctactcctgccctgatgggtgttggaactctaatggggtctgggcttcggaagctgtcaaggcagtgccaagagcagatcgcacgggctatgggggttgcagacgaagccctaggcaatgtccgaaccgtaagagccttcgctatggagcagcgggaagaagaaaggtatggtgctgagctggaagcctgtaggtgtagggcagaagagttgggccgaggcatagcattatttcagggactcagcaacatcgccttcaattgcatggtgctcggcacactctttatcggcggaagcttggtggctggtcaacagctcacagggggagacttgatgtccttcctcgtagcatctcaaaccgttcagagaagcatggccaacttaagtgttctgtttggacaggttgtaagggggctgagcgccggtgcgagggtgttcgaatacatggccctaaacccgtgcattcccctctctggtggctgttgtgttccgaaagagcaactccgtggcagcgtgacattccaaaacgtgtgtttcagctacccttgccggccaggcttcgaggtactgaaagatttcacattgaccttgccccctgggaagatagtagcactcgtgggccagtctggcggagggaagacaactgttgcctcgttgttggaacgcttttacgaccctacagcaggggtggtcatgttggacggaagggacctgcggacgctcgatcctagctggctgcgaggacaggtggtggggtttatcagccaggagcccgtgctcttcgggacaacaataatggaaaacatccgtttcggcaagctcgaggcctccgatgaggaggtctatacagccgcaagagaggccaacgcccatgagttcataacaagtttcccagaaggatacaacactgtcgtcggagaaaggggcaccactctgagtggaggtcagaaacaaaggctggcaattgcaagggccctaatcaaacagccaaccgtcctgattctggacgaagccacgtccgccctcgatgccgagagtgagagagtagttcaggaggccctggacagagcctctgctggaaggactgtgctggctggcacccatgaagagctccttaaaaagggaggactctatgctgagcttatccgtagacaggccctcgacgctccaagaactgctgccccacctcccaagaagcctgaaggcccaaggagccaccaacacaagtcatag

SEQ ID NO: 100825 - DNA, 1596 bp, Artificial Sequence
  derived and/or modified sequence
atgagggtgaaactgctattgccggcggctcctgttttaccgcgtcagcatgctggtgcatttatttcgggtcgggattcggggtggcccattcccaggcaggctgctaccgcccctccgcttccagacattctcagctgtcaggtactctgatggctaccgcagctcctccctcctccgggccgtggcccacctgcggtcccagctctgggcccacctccctcgagcccccctagctcccagatggagcccctctgcctggtgctgggttgggggagccctgctaggccccatggtactgagtaagcatccccacctctgccttgtggccctgtgtgaggcagaagaggcccctcctgccagctccacaccccatgtcgtggggtctcgctttaactggaagctcttctggcagtttctgcacccccacctgctggtcctgggggtagccgtcgtgctggccttgggtgcggcactcgtgaatgtacagatccccctgctcctgggccagctggtagaggtcgtggccaagtacacaagggaccacgtagggagtttcatgactgagtcccagaatctcagcacccacctgcttatcctctatggtgtccagggactgctgaccttcgggtacctggtgctgctgtcccacgttggcgagcgcatggctgtggacatgcggagggccctcttcagctccctgctccgacaagacatcaccttctttgacgccaataagacagggcagctggtgagccgcttgacaactgacgtgcaggagtttaagtcatccttcaagcttgtcatctcccaggggctgcgaagctgcacccaggtggcaggctgcctggtgtccctgtccatgctgtcgacacgcctcacgctgctgctgatggtggccacaccagccctgatgggagtgggcaccctgatgggctcaggcctccgaaaattgtctcgccagtgtcaggagcagatcgccagggcaatgggcgtagcagacgaggccctgggcaatgtgcggactgtgcgtgccttcgccatggagcaacgggaagaggagcgctatggggcagagctggaagcctgccgctgccgggcagaggagctgggccgcggcatcgccttgttccaagggctttccaacatcgccttcaactgcatggtcttgggtaccctatttattgggggctcccttgtggccggacagcagctgacagggggagacctcatgtccttcctggtggcctcccagacagtgcaaagcttcctccgtgttgcaccctgtccgaattcccttccgctgcaggctgtgacattccatgcatggaaggaccatccttgacaggctgtgtgagctgcccttccccatgcctgccacttccagggatgacaagctgacccctgtccccacacaccccacccttatagcttattgctttgcgttggtccaaaaccacccgctcagctgagcctctgggatgaccagagctgatcaccagacagctcaaggcgggcctcccccctcctatctctttccaagctaaacacaagcagttctacataaatatgttatggtaaataatgagatagtaa

SEQ ID NO: 100826 - DNA, 2350 bp, Artificial Sequence
  derived and/or modified sequence
gtgggatgagggtgaaactgctattgccggcggctcctgttttaccgcgtcagcatgctggtgcatttatttcgggtcgggattcggggtggcccattcccaggcaggctgctaccgcccctccgcttccagacattctcagctgtcaggtactctgatggctaccgcagctcctccctcctccgggccgtggcccacctgcggtcccagctctgggcccacctccctcgagcccccctagctcccagatggagcccctctgcctggtgctgggttgggggagccctgctaggccccatggtactgagtaagcatccccacctctgccttgtggccctgtgtgaggcagaagaggcccctcctgccagctccacaccccatgtcgtggggtctcgctttaactggaagctcttctggcagtttctgcacccccacctgctggtcctgggggtagccgtcgtgctggccttgggtgcggcactcgtgaatgtacagatccccctgctcctgggccagctggtagaggtcgtggccaagtacacaagggaccacgtagggagtttcatgactgagtcccagaatctcagcacccacctgcttatcctctatggtgtccagggactgctgaccttcgggtacctggtgctgctgtcccacgttggcgagcgcatggctgtggacatgcggagggccctcttcagctccctgctccgacaagacatcaccttctttgacgccaataagacagggcagctggtgagccgcttgacaactgacgtgcaggagtttaagtcatccttcaagcttgtcatctcccaggggctgcgaagctgcacccaggtggcaggctgcctggtgtccctgtccatgctgtcgacacgcctcacgctgctgctgatggtggccacaccagccctgatgggagtgggcaccctgatgggctcaggcctccgaaaattgtctcgccagtgtcaggagcagatcgccagggcaatgggcgtagcagacgaggccctgggcaatgtgcggactgtgcgtgccttcgccatggagcaacgggaagaggagcgctatggggcagagctggaagcctgccgctgccgggcagaggagctgggccgcggcatcgccttgttccaagggctttccaacatcgccttcaactgcatggtcttgggtaccctatttattgggggctcccttgtggccggacagcagctgacagggggagacctcatgtccttcctggtggcctcccagacagtgcaaaggtccatggccaacctctctgtcctgtttgggcaggtggtccgggggctgagtgcaggtgcccgggtctttgagtacatggccctgaacccctgcatcccactgtctgggggctgctgcgtccccaaagagcagctgcgtggctccgttacatttcagaacgtctgcttcagctacccctgccgccccggcttcgaggtgctgaaagacttcaccctgacgctgccccctggcaagatcgtggccctcgtgggccagtctggcggaggaaagaccaccgtggcttccctgctggagcgcttctacgaccccacggcaggcgtggtgatgctggatgggcgggacctgcgcacccttgacccctcctggctccggggccaggttgtcggcttcatcagccaggagcccgtcctgtttgggacgaccatcatggaaaacatccgctttgggaagctggaagcttccgatgaagaggtgtacacagccgcccgggaagcgaatgctcacgagttcatcaccagcttccccgagggctacaacacggtcgtcggtgaacggggcactaccctgtctgggggccagaagcagcgcctggccatcgcccgagcccttatcaagcagcccacggtgctgatactggatgaagctaccagcgcgctggatgcagagtccgagcgggttgtacaggaggccctggaccgggccagtgcaggccgcacggtgctggctgggacacatgaagagctcctgaagaaaggcgggctatacgccgagctcatccggaggcaggccctggatgccccgaggacagcggccccaccgcccaaaaagccagaaggccccaggagccaccagcacaagtcctgagaagggccccctgaggtgtggtcgctgccaagcatcagtgttagggctggggctcagcctgggggagcctactggggactgagcccccaggagggccagcatgtggagagtcgctgcggctgctcctgctcacaataaagccggggccgagcagctggcaggggaggccaatccctccctcccctccccagtcctgccggctgcctccctccca

SEQ ID NO: 100827 - DNA, 1296 bp, Artificial Sequence
  derived and/or modified sequence
atgctggtgcacctgttcagagtgggcatcagaggcggccccttccccggcagactgctgccccccctgagattccagaccttcagcgccgtgagatacagcgacggctacagaagcagcagcctgctgagagccgtggcccacctgagaagccagctgtgggcccacctgcccagagcccccctggcccccagatggagccccagcgcctggtgctgggtgggcggcgccctgctgggccccatggtgctgagcaagcacccccacctgtgcctggtggccctgtgcgaggccgaggaggccccccccgccagcagcaccccccacgtggtgggcagcagattcaactggaagctgttctggcagttcctgcacccccacctgctggtgctgggcgtggccgtggtgctggccctgggcgccgccctggtgaacgtgcagatccccctgctgctgggccagctggtggaggtggtggccaagtacaccagagaccacgtgggcagcttcatgaccgagagccagaacctgagcacccacctgctgatcctgtacggcgtgcagggcctgctgaccttcggctacctggtgctgctgagccacgtgggcgagagaatggccgtggacatgagaagagccctgttcagcagcctgctgagacaggacatcaccttcttcgacgccaacaagaccggccagctggtgagcagactgaccaccgacgtgcaggagttcaagagcagcttcaagctggtgatcagccagggcctgagaagctgcacccaggtggccggctgcctggtgagcctgagcatgctgagcaccagactgaccctgctgctgatggtggccacccccgccctgatgggcgtgggcaccctgatgggcagcggcctgagaaagctgagcagacagtgccaggagcagatcgccagagccatgggcgtggccgacgaggccctgggcaacgtgagaaccgtgagagccttcgccatggagcagagagaggaggagagatacggcgccgagctggaggcctgcagatgcagagccgaggagctgggcagaggcatcgccctgttccagggcctgagcaacatcgccttcaactgcatggtgctgggcaccctgttcatcggcggcagcctggtggccggccagcagctgaccggcggcgacctgatgagcttcctggtggccagccagaccgtgcagagcttcctgagagtggccccctgccccaacagcctgcccctgcaggccgtgaccttccacgcctggaaggaccacccctag

SEQ ID NO: 100828 - DNA, 2082 bp, Artificial Sequence
  derived and/or modified sequence
atgctggtgcacctgttcagagtgggcatcagaggcggccccttccccggcagactgctgccccccctgagattccagaccttcagcgccgtgagatacagcgacggctacagaagcagcagcctgctgagagccgtggcccacctgagaagccagctgtgggcccacctgcccagagcccccctggcccccagatggagccccagcgcctggtgctgggtgggcggcgccctgctgggccccatggtgctgagcaagcacccccacctgtgcctggtggccctgtgcgaggccgaggaggccccccccgccagcagcaccccccacgtggtgggcagcagattcaactggaagctgttctggcagttcctgcacccccacctgctggtgctgggcgtggccgtggtgctggccctgggcgccgccctggtgaacgtgcagatccccctgctgctgggccagctggtggaggtggtggccaagtacaccagagaccacgtgggcagcttcatgaccgagagccagaacctgagcacccacctgctgatcctgtacggcgtgcagggcctgctgaccttcggctacctggtgctgctgagccacgtgggcgagagaatggccgtggacatgagaagagccctgttcagcagcctgctgagacaggacatcaccttcttcgacgccaacaagaccggccagctggtgagcagactgaccaccgacgtgcaggagttcaagagcagcttcaagctggtgatcagccagggcctgagaagctgcacccaggtggccggctgcctggtgagcctgagcatgctgagcaccagactgaccctgctgctgatggtggccacccccgccctgatgggcgtgggcaccctgatgggcagcggcctgagaaagctgagcagacagtgccaggagcagatcgccagagccatgggcgtggccgacgaggccctgggcaacgtgagaaccgtgagagccttcgccatggagcagagagaggaggagagatacggcgccgagctggaggcctgcagatgcagagccgaggagctgggcagaggcatcgccctgttccagggcctgagcaacatcgccttcaactgcatggtgctgggcaccctgttcatcggcggcagcctggtggccggccagcagctgaccggcggcgacctgatgagcttcctggtggccagccagaccgtgcagagaagcatggccaacctgagcgtgctgttcggccaggtggtgagaggcctgagcgccggcgccagagtgttcgagtacatggccctgaacccctgcatccccctgagcggcggctgctgcgtgcccaaggagcagctgagaggcagcgtgaccttccagaacgtgtgcttcagctacccctgcagacccggcttcgaggtgctgaaggacttcaccctgaccctgccccccggcaagatcgtggccctggtgggccagagcggcggcggcaagaccaccgtggccagcctgctggagagattctacgaccccaccgccggcgtggtgatgctggacggcagagacctgagaaccctggaccccagctggctgagaggccaggtggtgggcttcatcagccaggagcccgtgctgttcggcaccaccatcatggagaacatcagattcggcaagctggaggccagcgacgaggaggtgtacaccgccgccagagaggccaacgcccacgagttcatcaccagcttccccgagggctacaacaccgtggtgggcgagagaggcaccaccctgagcggcggccagaagcagagactggccatcgccagagccctgatcaagcagcccaccgtgctgatcctggacgaggccaccagcgccctggacgccgagagcgagagagtggtgcaggaggccctggacagagccagcgccggcagaaccgtgctggccggcacccacgaggagctgctgaagaagggcggcctgtacgccgagctgatcagaagacaggccctggacgcccccagaaccgccgcccccccccccaagaagcccgagggccccagaagccaccagcacaagagctag

SEQ ID NO: 100829 - protein, 630 aa, Artificial Sequence
  derived and/or modified sequence
MRVKLLLPAAPVLPRQHAGAFISGRDSGWPIPRQAATAPPLPDILSCQLALGAALVNVQIPLLLGQLVEVVAKYTRDHVGSFMTESQNLSTHLLILYGVQGLLTFGYLVLLSHVGERMAVDMRRALFSSLLRQDITFFDANKTGQLVSRLTTDVQEFKSSFKLVISQGLRSCTQVAGCLVSLSMLSTRLTLLLMVATPALMGVGTLMGSGLRKLSRQCQEQIARAMGVADEALGNVRTVRAFAMEQREEERYGAELEACRCRAEELGRGIALFQGLSNIAFNCMVLGTLFIGGSLVAGQQLTGGDLMSFLVASQTVQRSMANLSVLFGQVVRGLSAGARVFEYMALNPCIPLSGGCCVPKEQLRGSVTFQNVCFSYPCRPGFEVLKDFTLTLPPGKIVALVGQSGGGKTTVASLLERFYDPTAGVVMLDGRDLRTLDPSWLRGQVVGFISQEPVLFGTTIMENIRFGKLEASDEEVYTAAREANAHEFITSFPEGYNTVVGERGTTLSGGQKQRLAIARALIKQPTVLILDEATSALDAESERVVQEALDRASAGRTVLVIAHRLSTVRGAHCIVVMADGRVWEAGTHEELLKKGGLYAELIRRQALDAPRTAAPPPKKPEGPRSHQHKS

SEQ ID NO: 100830 - DNA, 1893 bp, Artificial Sequence
  derived and/or modified sequence
atgagggtgaagcttctcctccctgccgcgcccgtgctgcctcggcagcatgcaggcgctttcatctccggacgggactcgggctggccaatccctcgccaagcggctaccgcacctccccttccagacatcctgtcctgccagctcgcattaggcgccgctttggtgaatgtacagatacccctactgcttgggcagctagtcgaggtggtagcgaagtacactcgggaccacgtggggagtttcatgacagagtcccagaacctgtctacgcacctgttaatcctgtacggtgtgcagggcctgctgactttcggctacctggttctgctgtcccacgtgggagaaagaatggccgtcgacatgcgacgcgccctgtttagctctctgctgagacaggatatcactttctttgacgcaaataaaacaggccagctggtttcacgcctcaccaccgacgtacaggagttcaaatccagctttaagttagtgatcagccaaggacttaggtcttgtactcaggtggcggggtgcctggtgagtctatccatgctgagcacaagactgacactgctgttaatggtggcgacgcctgctctcatgggagtgggaacactgatgggcagcggcctgcgaaaattatctagacaatgtcaggagcagatcgcgcgagccatgggcgtagcagacgaggcactgggcaatgtgcgcacagtcagagctttcgctatggagcagagggaagaggagagatatggcgcggagctagaagcctgtcggtgcagggcagaagagctcggccggggaatcgccctctttcagggcctgagtaacatcgcctttaattgcatggtgctcggaacattgtttataggcgggtccttggtggccgggcaacagttgaccggcggggatctgatgagctttctggtggcctcccagactgtacagcgatccatggcaaatctatctgtgttatttggacaagtcgtaagaggattgagcgctggtgctagggtcttcgaatacatggctcttaatccttgcattcctcttagcgggggctgttgtgttccgaaagaacaactccgcgggtccgtgacgttccagaatgtctgtttctcatatccttgccgtccaggttttgaggtcctcaaggactttacactgaccctccctccaggaaagattgtggccttggtaggccagagcggcggaggcaaaaccacagttgctagtctcttagagcgtttctatgaccctaccgctggggtcgttatgctagacggacgggaccttcggaccctggacccttcctggctgaggggacaagttgtgggcttcatttctcaggaaccagtgctgttcggcaccaccattatggaaaatatacgtttcggaaaactcgaggccagtgacgaggaagtgtacacagcagcgcgagaagccaatgcgcacgagttcatcacttcattccccgaaggttacaatacggtggtcggcgaacgagggactactctcagtggcggccagaagcagcgtctcgccatagctagagcactgataaagcagccaaccgtcttaatcctggacgaagctacttcagctttggatgcagagtctgagcgtgtcgtgcaggaggcgctggatagagcctctgctggtaggaccgtgctcgtgatcgcacaccgcctgagtaccgttcggggtgctcactgtatcgtggttatggctgacggccgtgtttgggaggcgggcacccatgaagagctgttgaaaaagggcggattatacgccgagctcattcgtcggcaggcccttgatgcccccaggacagctgctccgccaccaaaaaagcctgagggaccacggtcccatcaacataagagctag

SEQ ID NO: 100831 - DNA, 1893 bp, Artificial Sequence
  derived and/or modified sequence
atgagggtgaagctgctgctgcctgctgcccctgtgctgccccggcagcacgccggggccttcatcagcggccgggacagcggctggcccatcccccggcaggccgccacagccccacccctgcctgacatcctgagctgccagctggccctgggcgccgccctggtgaatgtgcagatccccctgctgctgggccagctggtggaggtggtggccaagtacacccgggaccacgtgggcagcttcatgacagagagccagaacctgagcacccacctgctgatcctgtatggagtgcagggcctgctgaccttcggctacctggtgctgctgagccacgtgggggagaggatggctgtggacatgagaagagccctcttcagcagcctgctgcggcaggacatcaccttctttgatgccaacaagacaggccagctggtgtcccggctgaccacagatgtgcaggagttcaagagcagcttcaagctggtgatcagccagggcctgcggagctgcacccaggtggccggctgcctggtgtccctgtccatgctgagcacccggctgaccctgctgctgatggtggccaccccagccctgatgggcgtgggcaccctgatgggcagcggcctgaggaagctgagccggcagtgccaggagcagatcgcccgggccatgggcgtggctgatgaggccctgggcaatgtgaggacagtgcgggcctttgccatggagcagcgggaggaggagcgctacggggctgagctggaggcctgccgctgcagagctgaggagctgggccggggcatcgccctcttccagggcctgagcaacatcgccttcaactgcatggtgctgggcaccctcttcatcggcggcagcctggtggccggccagcagctgaccggcggggacctgatgtccttcctggtggccagccagacagtgcagaggtccatggccaacctgtctgtgctgtttggccaggtggtgcggggcctgtctgctggggcccgggtgtttgagtacatggccctgaacccctgcatccccctgagcggcggctgctgcgtgcccaaggagcagctgcggggctctgtgaccttccagaatgtgtgcttctcctacccctgccggcccggctttgaggtgctgaaggacttcaccctgaccctgcccccaggcaagatcgtggccctggtgggccagagcggcggcggcaagaccaccgtggccagcctgctggagcgcttctatgaccccacagctggggtggtgatgctggatggccgggacctgcggaccctggaccccagctggctgcggggccaggtggtgggcttcatcagccaggagcctgtgctgtttggcaccaccatcatggagaacatccgctttgggaagctggaggccagtgatgaggaggtgtacacagctgcccgggaggccaatgcccacgagttcatcaccagcttccctgagggctacaacacagtggtgggggagcggggcaccaccctgagcggcggccagaagcagaggctggccatcgcccgggccctgatcaagcagcccaccgtgctgatcctggatgaggccaccagcgccctggatgctgagagcgagcgggtggtgcaggaggccctggaccgggccagcgctggccgcacagtgctggtgattgcccaccggctgagcacagtgcggggggcccactgcatcgtggtgatggctgatggccgggtgtgggaggccggcacccatgaggagctgctgaagaagggcggcctgtatgcagagctgatccggcggcaggccctggatgcccccaggacagctgcccccccacccaagaagccagagggccccaggagccaccagcacaagagctag

SEQ ID NO: 100832 - DNA, 1893 bp, Artificial Sequence
  derived and/or modified sequence
atgcgggtgaagctgctgctgcccgccgcccccgtgctgccccggcagcatgctggagctttcattagtggacgcgattctggctggccaattcccaggcaggccgccacagctccaccattaccggatattctgtcttgtcaactggcccttggtgcagcactagtgaatgtccaaattccattgctcttgggccagctcgtggaagtggtggcaaagtatacaagagatcatgttgggagctttatgactgagtcgcaaaatctttccactcatcttttgattctgtacggggttcagggattgctcacttttggctatctggtgctgctgtctcatgtgggggaaagaatggctgtggacatgagacgcgcactatttagcagcctgctgagacaggatataaccttctttgacgctaataagacagggcagctggtttccagactgaccacggatgtacaggagttcaagtctagctttaaattggtaataagtcagggactgagatcatgcacacaggttgccggatgtcttgtgtctctctctatgctgtctacccggctgacactgctcctgatggtggccacgcctgcacttatgggtgtcggcactctaatgggcagcggcctgagaaaacttagcaggcagtgtcaggaacaaatcgcccgggctatgggtgttgccgatgaggccttgggaaatgtccggactgtgagggctttcgccatggaacagcgtgaggaggaacgctacggagcagaactagaggcatgtagatgtcgggccgaagagttaggtaggggaattgcacttttccagggactgagcaacatcgcattcaactgcatggttctggggacgctctttatcggggggagcttggttgcaggccaacagctgactgggggggacctgatgtcattcttagtggcatcacaaactgtgcagaggagtatggctaatctgagcgttttgttcggccaggtggtgcgcggactctccgccggggctagggtgttcgagtacatggcgttaaatccatgcatacctctatcgggcggatgctgcgtgcctaaggagcagcttcgagggagcgtcactttccagaacgtgtgtttttcttatccttgtcggcctggctttgaagtgttgaaggacttcacccttactctgcctccaggcaaaatcgtggctttagtgggacaaagcgggggtggaaaaaccacagttgcatctttgctcgaaagattttatgacccaaccgctggtgtggttatgctggacggtcgggacctaaggaccctggatccatcctggctcaggggccaggtcgtgggatttatctcacaggaaccagttctcttcgggacgaccattatggaaaacatcagattcggcaaacttgaagcgtccgacgaagaagtttacaccgctgctcgtgaagctaacgcacatgaatttatcacctcattcccagaaggatataacacagtggtgggagaacgggggactaccctgagcggcgggcagaagcagagactcgccatcgcccgggccctgatcaaacagccaactgttctgattctagacgaagccaccagtgcattggatgccgaatccgagcgcgttgttcaggaggcactggatagggctagcgcaggaaggaccgtactggtgattgcccaccgtctgagtactgtgaggggcgcccactgtattgtcgtcatggcagacgggagagtttgggaagcggggacacacgaggagctgttgaagaaaggtggactttacgccgagcttattagaaggcaggccttggatgctccaagaacagccgccccacctccaaaaaagccagaagggcctcgcagtcatcagcacaaaagctag

SEQ ID NO: 100833 - DNA, 1893 bp, Artificial Sequence
  derived and/or modified sequence
atgcgcgtgaagcttctgctgcctgccgctcctgttctgcccagacaacacgccggtgccttcatttctggacgcgatagtggctggccgattcccaggcaggccgctacggcgcctccgctccccgatatcctgagttgtcaattagccctcggagcagcactggtcaatgttcagatccctctgctgctgggacaactcgtggaagtcgtggccaaatacacccgcgatcatgttgggtccttcatgacagagtcccagaatctcagcacacacctccttattctgtacggagtacaggggttgttgactttcgggtatctggtactgttaagccatgtgggcgaaagaatggccgtggacatgcggagggccctgttcagttctctactgcgtcaagacataaccttctttgacgctaacaaaactggacagctagtctccagactgacaactgatgtccaagaattcaaaagtagcttcaagctcgtcatcagtcaaggactgcggagctgcacacaggtagcaggatgtttggtgtccttgtcgatgctttccacacgcctgaccctgctgctaatggtagccacacccgcactaatgggggtcggaaccttgatgggctcgggcctgcgaaaactttcgcgccagtgccaggaacagatcgctagggctatgggagttgccgatgaggccctcgggaacgtccgcaccgtgcgtgcatttgctatggaacagcgggaggaggagcgctacggcgcagaactagaagcgtgccgatgtagagctgaggaattgggtagagggattgccctttttcagggtttatctaacattgctttcaactgtatggtgctgggcaccctgttcattgggggaagtttggtggcgggtcagcagttgactgggggagacctcatgagttttttggtcgctagtcagacagtgcagcggagcatggcgaatctttcagtgttgtttgggcaagtggttaggggactttcagctggtgctcgagttttcgagtatatggccctgaacccctgcattccactgtctggtggttgttgtgtgccgaaggaacaactgcggggttccgtgacgtttcagaatgtatgtttctcttatccatgccggcctggcttcgaagtgctgaaggactttacactaacactcccacccggtaaaatcgtggctctggtggggcagagtgggggaggtaaaaccacagtggcctcattactcgagaggttttatgaccccacagctggcgtcgtgatgttagacgggcgagacttgcgaacccttgatccatcctggctccggggacaggtggtagggttcattagccaagagcccgtcttgttcgggacaacaatcatggaaaatattcgcttcggcaaattggaagcatccgatgaagaggtttatacagctgctcgggaggccaatgcacatgagttcattaccagcttccccgaagggtataacacagtggtgggagagaggggaaccactctgtcaggtggacagaagcagcgactggccatcgcccgtgccctgattaagcagccaaccgtgctcattctggatgaggccacttcagcgctggacgccgaaagcgagcgtgtggttcaagaggcgctggatcgtgctagcgctggcaggaccgtccttgtgattgctcacagattgagcactgtgcggggagcccattgtattgtggtgatggccgatggccgtgtctgggaggccggaacgcacgaggagctgctcaaaaaggggggattgtatgccgaactcatccggagacaggctctggatgctccccgtaccgcagcccctcccccaaagaaacccgaggggcctaggtcccaccagcacaagagttag

SEQ ID NO: 100834 - DNA, 1970 bp, Artificial Sequence
  derived and/or modified sequence
atagagccctcagtgggatgagggtgaaactgctattgccggcggctcctgttttaccgcgtcagcatgctggtgcatttatttcgggtcgggattcggggtggcccattcccaggcaggctgctaccgcccctccgcttccagacattctcagctgtcagctggccttgggtgcggcactcgtgaatgtacagatccccctgctcctgggccagctggtagaggtcgtggccaagtacacaagggaccacgtagggagtttcatgactgagtcccagaatctcagcacccacctgcttatcctctatggtgtccagggactgctgaccttcgggtacctggtgctgctgtcccacgttggcgagcgcatggctgtggacatgcggagggccctcttcagctccctgctccgacaagacatcaccttctttgacgccaataagacagggcagctggtgagccgcttgacaactgacgtgcaggagtttaagtcatccttcaagcttgtcatctcccaggggctgcgaagctgcacccaggtggcaggctgcctggtgtccctgtccatgctgtcgacacgcctcacgctgctgctgatggtggccacaccagccctgatgggagtgggcaccctgatgggctcaggcctccgaaaattgtctcgccagtgtcaggagcagatcgccagggcaatgggcgtagcagacgaggccctgggcaatgtgcggactgtgcgtgccttcgccatggagcaacgggaagaggagcgctatggggcagagctggaagcctgccgctgccgggcagaggagctgggccgcggcatcgccttgttccaagggctttccaacatcgccttcaactgcatggtcttgggtaccctatttattgggggctcccttgtggccggacagcagctgacagggggagacctcatgtccttcctggtggcctcccagacagtgcaaaggtccatggccaacctctctgtcctgtttgggcaggtggtccgggggctgagtgcaggtgcccgggtctttgagtacatggccctgaacccctgcatcccactgtctgggggctgctgcgtccccaaagagcagctgcgtggctccgttacatttcagaacgtctgcttcagctacccctgccgccccggcttcgaggtgctgaaagacttcaccctgacgctgccccctggcaagatcgtggccctcgtgggccagtctggcggaggaaagaccaccgtggcttccctgctggagcgcttctacgaccccacggcaggcgtggtgatgctggatgggcgggacctgcgcacccttgacccctcctggctccggggccaggttgtcggcttcatcagccaggagcccgtcctgtttgggacgaccatcatggaaaacatccgctttgggaagctggaagcttccgatgaagaggtgtacacagccgcccgggaagcgaatgctcacgagttcatcaccagcttccccgagggctacaacacggtcgtcggtgaacggggcactaccctgtctgggggccagaagcagcgcctggccatcgcccgagcccttatcaagcagcccacggtgctgatactggatgaagctaccagcgcgctggatgcagagtccgagcgggttgtacaggaggccctggaccgggccagtgcaggccgcacggtgctggtaattgcccaccggctcagcactgtccgtggggcccactgcattgtcgtcatggccgatggccgtgtctgggaggctgggacacatgaagagctcctgaagaaaggcgggctatacgccgagctcatccggaggcaggccctggatgccccgaggacagcggccccaccgcccaaaaagccagaaggccccaggagccaccagcacaagtcctgagaagggccccctgaggtgtggtcgctgccaagcatcagtgttagggctggggctcagcct

SEQ ID NO: 100835 - DNA, 1893 bp, Artificial Sequence
  derived and/or modified sequence
atgagagtgaagctgctgctgcccgccgcccccgtgctgcccagacagcacgccggcgccttcatcagcggcagagacagcggctggcccatccccagacaggccgccaccgccccccccctgcccgacatcctgagctgccagctggccctgggcgccgccctggtgaacgtgcagatccccctgctgctgggccagctggtggaggtggtggccaagtacaccagagaccacgtgggcagcttcatgaccgagagccagaacctgagcacccacctgctgatcctgtacggcgtgcagggcctgctgaccttcggctacctggtgctgctgagccacgtgggcgagagaatggccgtggacatgagaagagccctgttcagcagcctgctgagacaggacatcaccttcttcgacgccaacaagaccggccagctggtgagcagactgaccaccgacgtgcaggagttcaagagcagcttcaagctggtgatcagccagggcctgagaagctgcacccaggtggccggctgcctggtgagcctgagcatgctgagcaccagactgaccctgctgctgatggtggccacccccgccctgatgggcgtgggcaccctgatgggcagcggcctgagaaagctgagcagacagtgccaggagcagatcgccagagccatgggcgtggccgacgaggccctgggcaacgtgagaaccgtgagagccttcgccatggagcagagagaggaggagagatacggcgccgagctggaggcctgcagatgcagagccgaggagctgggcagaggcatcgccctgttccagggcctgagcaacatcgccttcaactgcatggtgctgggcaccctgttcatcggcggcagcctggtggccggccagcagctgaccggcggcgacctgatgagcttcctggtggccagccagaccgtgcagagaagcatggccaacctgagcgtgctgttcggccaggtggtgagaggcctgagcgccggcgccagagtgttcgagtacatggccctgaacccctgcatccccctgagcggcggctgctgcgtgcccaaggagcagctgagaggcagcgtgaccttccagaacgtgtgcttcagctacccctgcagacccggcttcgaggtgctgaaggacttcaccctgaccctgccccccggcaagatcgtggccctggtgggccagagcggcggcggcaagaccaccgtggccagcctgctggagagattctacgaccccaccgccggcgtggtgatgctggacggcagagacctgagaaccctggaccccagctggctgagaggccaggtggtgggcttcatcagccaggagcccgtgctgttcggcaccaccatcatggagaacatcagattcggcaagctggaggccagcgacgaggaggtgtacaccgccgccagagaggccaacgcccacgagttcatcaccagcttccccgagggctacaacaccgtggtgggcgagagaggcaccaccctgagcggcggccagaagcagagactggccatcgccagagccctgatcaagcagcccaccgtgctgatcctggacgaggccaccagcgccctggacgccgagagcgagagagtggtgcaggaggccctggacagagccagcgccggcagaaccgtgctggtgatcgcccacagactgagcaccgtgagaggcgcccactgcatcgtggtgatggccgacggcagagtgtgggaggccggcacccacgaggagctgctgaagaagggcggcctgtacgccgagctgatcagaagacaggccctggacgcccccagaaccgccgcccccccccccaagaagcccgagggccccagaagccaccagcacaagagctag

SEQ ID NO: 100836 - DNA, 999 bp, Artificial Sequence
  derived and/or modified sequence
atggagtacctgggcggcggcagcgccctggacctgctgaagcccggccccctggaggagacctacatcgccaccatcctgagagagatcctgaagggcctggactacctgcacagcgagagaaagatccacagagacatcaaggccgccaacgtgctgctgagcgagcagggcgacgtgaagctggccgacttcggcgtggccggccagctgaccgacacccagatcaagagaaacaccttcgtgggcacccccttctggatggcccccgaggtgatcaagcagagcgcctacgacttcaaggccgacatctggagcctgggcatcaccgccatcgagctggccaagggcgagccccccaacagcgacctgcaccccatgagagtgctgttcctgatccccaagaacagcccccccaccctggagggccagcacagcaagcccttcaaggagttcgtggaggcctgcctgaacaaggaccccagattcagacccaccgccaaggagctgctgaagcacaagttcatcaccagatacaccaagaagaccagcttcctgaccgagctgatcgacagatacaagagatggaagagcgagggccacggcgaggagagcagcagcgaggacagcgacatcgacggcgaggccgaggacggcgagcagggccccatctggaccttcccccccaccatcagacccagcccccacagcaagctgcacaagggcaccgccctgcacagcagccagaagcccgccgagcccgtgaagagacagcccagaagccagtgcctgagcaccctggtgagacccgtgttcggcgagctgaaggagaagcacaagcagagcggcggcagcgtgggcgccctggaggagctggagaacgccttcagcctggccgaggagagctgccccggcatcagcgacaagctgatggtgcacctggtggagagagtgcagagattcagccacaacagaaaccacctgaccagcaccagatag

SEQ ID NO: 100837 - DNA, 1011 bp, Artificial Sequence
  derived and/or modified sequence
atggagtacctgggcggcggcagcgccctggacctgctgaagcccggccccctggaggagacctacatcgccaccatcctgagagagatcctgaagggcctggactacctgcacagcgagagaaagatccacagagacatcaaggccgccaacgtgctgctgagcgagcagggcgacgtgaagctggccgacttcggcgtggccggccagctgaccgacacccagatcaagagaaacaccttcgtgggcacccccttctggatggcccccgaggtgatcaagcagagcgcctacgacttcaaggccgacatctggagcctgggcatcaccgccatcgagctggccaagggcgagccccccaacagcgacctgcaccccatgagagtgctgttcctgatccccaagaacagcccccccaccctggagggccagcacagcaagcccttcaaggagttcgtggaggcctgcctgaacaaggaccccagattcagacccaccgccaaggagctgctgaagcacaagttcatcaccagatacaccaagaagaccagcttcctgaccgagctgatcgacagatacaagagatggaagagcgagggccacggcgaggagagcagcagcgaggacagcgacatcgacggcgaggccgaggacggcgagcagggccccatctggaccttcccccccaccatcagacccagcccccacagcaagctgcacaagggcaccgccctgcacagcagccagaagcccgccgagcccgtgaagagacagcccagaagccagtgcctgagcaccctggtgagacccgtgttcggcgaggtgttcagccagctgaaggagaagcacaagcagagcggcggcagcgtgggcgccctggaggagctggagaacgccttcagcctggccgaggagagctgccccggcatcagcgacaagctgatggtgcacctggtggagagagtgcagagattcagccacaacagaaaccacctgaccagcaccagatag

SEQ ID NO: 100838 - DNA, 999 bp, Artificial Sequence
  derived and/or modified sequence
atggaatatctggggggggggtcagctctggacctgctgaaaccagggccacttgaagagacctatatagccactatcctcagagagattttgaagggtttggactacttacattctgaacgcaaaatacatcgagatatcaaagccgccaatgtgctgctgagcgaacagggtgacgtcaagctcgccgattttggcgtggctgggcagctgaccgacacccagatcaagcgcaacaccttcgtgggaacacctttttggatggccccagaagtgatcaagcaatctgcctacgacttcaaagcagacatttggtcactaggtatcactgccattgagctggcgaagggagagccgccaaattcggacctccatcctatgcgcgtgttgttcctaataccaaagaactccccgcccaccttggaaggacagcattccaagccatttaaagaattcgtggaagcctgtctgaataaggatcctaggttcagacctacggccaaggagctgcttaagcataaattcatcacgagatacacaaaaaaaacatctttcctgactgagctgatcgaccggtacaaaaggtggaagtccgaaggccacggcgaagagagcagttcagaggacagcgacattgacggggaggctgaagacggtgagcaggggcccatctggacattccctccaacaatccgtccaagtccccacagtaaattacataagggcactgccctgcactctagccaaaagccagccgaacctgtcaaacgccagccaaggagccagtgtttaagcaccctggtgcgcccagtctttggcgagcttaaagagaaacataaacaatctggcggttcagtcggcgcgcttgaagagctcgaaaacgccttttccctggctgaggaatcctgcccaggcatttctgataagcttatggtgcacctggtcgaaagggtgcaaaggtttagtcataaccgcaatcacctcacaagtaccagatag

SEQ ID NO: 100839 - DNA, 999 bp, Artificial Sequence
  derived and/or modified sequence
atggagtacttaggaggcggaagtgcgctcgacttgctgaaaccgggtccactggaggagacatatattgccaccattctgcgtgaaatcctgaagggtctcgattacctacatagcgaacggaaaattcatcgtgatatcaaagctgccaacgtgttgttgagcgaacagggagacgtgaaactggccgatttcggcgtggcaggacaactaacggatactcagatcaaaaggaacacatttgtcggcacacccttttggatggcccctgaggtaattaagcagtctgcttacgactttaaggccgatatttggtcgttgggcatcacagcaatcgagctagccaaaggggaaccaccgaacagcgatttacacccaatgcgcgtactgtttctgattccgaagaactccccccccacgcttgaagggcaacacagcaaaccgtttaaagagtttgttgaggcctgcctgaataaggatccaaggttccgtcctacagccaaggaactgctgaagcacaaattcatcacccgatacaccaagaaaacaagctttctcacggagctgatcgataggtataaacggtggaagtcagaagggcatggggaggagagcagtagcgaggacagtgatattgacggggaggcagaagatggggagcagggtccaatatggaccttcccacccacaatccgcccctctccacattctaaactgcataagggaacagccctgcattcctctcaaaaaccggcggagccggtcaaacgccagccccggtcccagtgcctctccactctggtgcgaccagtatttggagagcttaaagaaaagcataagcagtcaggaggatcagtgggcgcattggaggagctggagaacgcattttccctggctgaagagtcctgtcctgggattagtgacaagctgatggtgcatctcgttgagcgtgtacaacgcttcagccacaaccgcaaccatctgactagcaccaggtag

SEQ ID NO: 100840 - DNA, 1011 bp, Artificial Sequence
  derived and/or modified sequence
atggagtaccttggcggtggatctgcacttgacctcttaaagcccggtcctcttgaagaaacatatatcgccacaattcttagagaaatcctgaaggggctagattatctgcatagcgaacgcaaaatccatcgagatatcaaggcagccaatgtgctgttatcagaacagggagacgtcaagctggcggattttggagttgccggccagctcactgatactcagatcaaacgcaacacatttgtcggaacgcccttttggatggctcctgaggtcatcaaacagagtgcttatgacttcaaggctgacatttggagcctgggcattaccgcaatcgaactggccaagggcgaaccccctaatagcgatttgcatcctatgcgagtgttatttctaattccgaaaaattccccaccaacactggaaggacagcactccaagccattcaaggaatttgtggaagcctgcctgaacaaggatccccggtttagacccaccgcgaaggaactactgaagcataagtttatcactcgctacacaaagaagacctcattcctcacggaacttatcgaccgctataaaagatggaagtccgagggtcacggagaggagtcaagtagcgaggactctgatatcgacggggaagctgaagatggggaacagggccctatctggacattcccacctacaatcagacctagcccccattcaaagctgcacaagggcactgccttgcactccagtcagaagcctgccgagcctgtaaagcgtcaaccaaggtctcagtgcctcagcaccctcgtgcggccagtgttcggcgaggtgttttcgcagctgaaggagaagcacaagcagtctggcggcagcgtaggggcactggaagagctggagaatgcattcagtctcgcggaggaatcctgtcctggcatcagcgacaaattgatggtgcacctagtagaacgtgtacagcgcttttcgcacaatagaaaccatcttacaagtacacgttag

SEQ ID NO: 100841 - DNA, 999 bp, Artificial Sequence
  derived and/or modified sequence
atggagtacctgggcggcggcagcgccctggacctgctgaagccaggccccctggaggagacctacatcgccaccatcctgcgggagatcctgaagggcctggactacctgcacagcgagaggaagatccaccgggacatcaaggccgccaacgtgctgctgtctgagcagggagatgtgaagctggccgactttggagtggccggccagctgacagacacccagatcaagaggaacacctttgtgggcacccccttctggatggcccctgaggtgatcaagcagagcgcctatgacttcaaggctgacatctggagcctgggcatcacagccatcgagctggccaagggggagccccccaacagcgacctgcaccccatgagggtgctcttcctgatccccaagaacagcccccccaccctggagggccagcacagcaagcccttcaaggagtttgtggaggcctgcctgaacaaggacccccgcttccggcccacagccaaggagctgctgaagcacaagttcatcacccgctacaccaagaagaccagcttcctgacagagctgattgaccgctacaagcgctggaagtctgagggccatggagaggagagcagcagcgaggacagcgacattgatggagaggctgaagatggagagcagggccccatctggaccttcccccccaccatccggcccagcccccacagcaagctgcacaagggcacagccctgcacagcagccagaagccagctgagcctgtgaagaggcagcccaggagccagtgcctgagcaccctggtgcggcctgtgtttggagagctgaaggagaagcacaagcagagcggcggctctgtgggcgccctggaggagctggagaatgccttcagcctggccgaggagagctgccccggcatcagtgacaagctgatggtgcacctggtggagcgggtgcagcgcttcagccacaacagaaaccacctgaccagcaccaggtag

SEQ ID NO: 100842 - DNA, 1011 bp, Artificial Sequence
  derived and/or modified sequence
atggagtacctgggcggcggcagcgccctggacctgctgaagccaggccccctggaggagacctacatcgccaccatcctgcgggagatcctgaagggcctggactacctgcacagcgagaggaagatccaccgggacatcaaggccgccaacgtgctgctgtctgagcagggagatgtgaagctggccgactttggagtggccggccagctgacagacacccagatcaagaggaacacctttgtgggcacccccttctggatggcccctgaggtgatcaagcagagcgcctatgacttcaaggctgacatctggagcctgggcatcacagccatcgagctggccaagggggagccccccaacagcgacctgcaccccatgagggtgctcttcctgatccccaagaacagcccccccaccctggagggccagcacagcaagcccttcaaggagtttgtggaggcctgcctgaacaaggacccccgcttccggcccacagccaaggagctgctgaagcacaagttcatcacccgctacaccaagaagaccagcttcctgacagagctgattgaccgctacaagcgctggaagtctgagggccatggagaggagagcagcagcgaggacagcgacattgatggagaggctgaagatggagagcagggccccatctggaccttcccccccaccatccggcccagcccccacagcaagctgcacaagggcacagccctgcacagcagccagaagccagctgagcctgtgaagaggcagcccaggagccagtgcctgagcaccctggtgcggcctgtgtttggagaggtgttcagccagctgaaggagaagcacaagcagagcggcggctctgtgggcgccctggaggagctggagaatgccttcagcctggccgaggagagctgccccggcatcagtgacaagctgatggtgcacctggtggagcgggtgcagcgcttcagccacaacagaaaccacctgaccagcaccaggtag

SEQ ID NO: 100843 - DNA, 999 bp, Artificial Sequence
  derived and/or modified sequence
atggagtacctgggcggcggcagcgccctggacctgctgaagcccggaccactggaggaaacgtatattgcaaccattctgagggaaattctgaaaggcctggattacctccattcggagcggaagatccatcgcgatataaaagcggctaacgttctgcttagcgaacaaggggacgtgaagctcgccgactttggggtggctggtcaattgactgacacacagatcaagcggaacacatttgtaggtactcccttttggatggccccagaagtgatcaaacagagcgcatatgatttcaaggcggacatctggagcttaggaatcacggccattgagctcgcaaagggagagcctccaaattcagacctgcacccgatgagagttctgtttctgatccctaagaactctcctccaacactggaggggcaacatagcaaacctttcaaagaattcgtggaggcttgcctcaataaggatcctcgcttccggcctacagccaaggagctgctcaaacataaattcatcactcggtacacaaagaaaacaagctttctgactgaattaatagatcgctataagagatggaagtccgaaggccatggggaggaatcaagttctgaagacagcgatatcgatggtgaggccgaagacggcgaacaaggacccatctggacctttcctcctaccattcgccccagtccccatagcaagttacataaggggacagcattgcactcaagccagaaaccagccgagcccgtgaagagacagcctaggtcgcagtgtctaagcacactcgtgagacctgtatttggcgagctcaaagaaaaacataaacaaagcggcggcagcgtcggagcactggaagaactagagaatgcatttagtttagctgaagagagctgccccggcatctctgacaagctgatggttcacctggttgagcgagtgcagcggttctctcataacaggaaccatctcacctccacgagatag

SEQ ID NO: 100844 - DNA, 999 bp, Artificial Sequence
  derived and/or modified sequence
atggagtacctgggcggcggcagcgccctggacctgctgaagcccggtccattagaagagacttacattgcgacgattctgcgcgagattctcaagggcctggactatttgcacagcgaaaggaaaatccaccgggacattaaggcagcaaatgtgctcctgagcgagcagggagacgtgaagctggccgattttggagtcgctggacagttgaccgacactcagattaagcggaataccttcgttggaacacctttttggatggcacctgaggtgatcaaacaatccgcttatgactttaaagccgatatctggtctcttggtatcaccgccatagagctggccaaaggcgagccacccaattccgatttgcatccgatgcgtgtacttttcctgatccccaaaaatagcccaccaacgctggaggggcagcactccaagccctttaaagagttcgtcgaggcctgtctgaacaaggatccccgattccggccgactgctaaagagctgctgaaacacaagtttattacgcggtatacaaaaaaaacctcattccttaccgaactgattgacaggtacaaacgttggaagagcgagggacacggagaggagtcaagcagcgaggattccgacatcgacggagaagctgaggacggtgagcaaggcccgatatggacctttcccccaacgatccgcccaagtcctcatagcaagctacacaagggtacggctctgcactctagtcagaaaccggcagagccagttaagaggcagccaagatcccaatgtctgagcacactcgtcaggccagttttcggggaactgaaggagaaacataaacagagcggcggaagcgtcggtgccctggaagagctggagaatgccttctccctagctgaggagtcttgtcccggcatttctgataagctaatggtgcacctggttgaacgcgttcagcggttctcacacaacagaaaccatcttacctctactcgttag

SEQ ID NO: 100845 - DNA, 1011 bp, Artificial Sequence
  derived and/or modified sequence
atggagtacctgggcggcggcagcgccctggacctgctgaagcccggccccttggaagagacctatatagcgacgatcttgcgggaaatcttaaagggcctggactatctgcacagtgagcgtaagatccatcgggacatcaaagccgcaaacgtactgctgagcgagcagggtgacgtgaagctggcagactttggagtagctgggcagttaactgacactcagattaaaagaaatacattcgtcggtactcctttttggatggctcctgaggtgatcaaacaaagcgcttacgactttaaggcggacatttggagtcttggaataactgccattgaactagctaagggggagcctccaaatagcgacctgcatcctatgagagtcttattcctgatccccaagaatagccccccgacattggagggacaacatagcaagccgtttaaggagtttgtcgaggcctgtttgaataaagatccacgttttcggcctaccgccaaagaactactcaaacataagttcatcacacggtatactaaaaagacttccttccttacggagctgatcgaccgctacaagcggtggaaatctgaaggacatggcgaggagagttcttcagaggatagtgatatcgacggagaagccgaggacggagagcagggccctatttggacttttcccccaacaatccggcccagcccacacagcaaactccacaagggaacggcactccattcttcgcagaagccagccgagcccgttaagcggcagcctcgtagtcaatgcctgtccacattggtccggcctgtatttggcgaggtcttttcacaactgaaggaaaaacacaagcagtccggcgggagcgtgggggcgctggaagagctagaaaacgcgttctcattggccgaggagtcctgtcctggaattagcgataagctcatggtccacctggttgaacgagtgcaacggttctcccacaacaggaaccacttgacaagcacccggtag

SEQ ID NO: 100846 - DNA, 999 bp, Artificial Sequence
  derived and/or modified sequence
atggaatatcttggcggtgggtcagcgcttgacctgctgaaaccgggaccgttggaagaaacttatattgctactatcttgagggagatcttaaaggggctcgattaccttcactccgagagaaaaatccacagagacataaaggccgcaaatgttctgctgtccgaacaaggggatgtcaagcttgcagactttggagtcgctgggcagttgacagacactcagataaaacgaaacacgtttgtgggaacccccttctggatggccccagaagtgatcaagcagtcagcctacgactttaaggccgatatctggagcctgggcatcaccgcgatcgaattggcaaaaggcgaacccccaaactctgacctacatccaatgcgggtgctatttttaattccgaagaatagcccccctactttagagggacaacatagtaaaccgttcaaagagttcgtagaggcgtgccttaacaaggatcctcgatttcgcccaacagccaaggaactgttgaaacacaagtttatcacccggtatactaagaaaacctcctttctgacggaactcatagaccgctacaaacggtggaagagcgaggggcacggtgaagaatctagttctgaggattcagacatcgatggggaggccgaggatggcgagcagggaccaatctggacctttcctccaaccatacgcccttctccacatagcaaattacacaagggaactgctctgcactcgagtcagaagcctgccgagcctgtcaagcgccagccaaggagtcagtgtttgagcactctggtcaggcctgtgttcggcgagctgaaagagaagcataagcagagcggcggaagcgttggtgcgcttgaagaactggagaacgcattttctctggccgaagagtcctgtcccggtatatccgataagcttatggtgcatttggtcgagagagttcaacgcttctcacataacagaaaccacctgaccagcacccggtag

SEQ ID NO: 100847 - DNA, 999 bp, Artificial Sequence
  derived and/or modified sequence
atggagtacctcggagggggtagtgctcttgacctgttaaagcccggtcccctcgaagagacatacatcgccaccattttacgcgagatcctgaaggggctggactatctgcactctgagagaaagattcatcgcgacataaaggccgcaaatgtgctcctgagtgagcagggcgatgtcaagcttgcagacttcggggtggctggtcagctgacagacactcaaatcaagcgcaacacctttgtcggcacgccattctggatggcccctgaggtgattaagcagagtgcctacgattttaaggccgacatctggtcccttggaataaccgcaatcgaattggcaaagggagaaccccctaattccgacttgcacccaatgagagtgctctttctgataccaaagaatagtcctccaaccctggagggacaacactctaagccattcaaggaattcgtggaagcatgtctaaataaggatcctagattcagaccaactgccaaggagttactgaagcataagttcatcacaaggtatactaagaagaccagttttctcactgaattgatcgacaggtataaacgatggaagtccgaaggccatggcgaggagtcatcctccgaagattccgacatagatggagaagcagaagacggagagcagggccctatctggacttttcctcctaccatccgcccaagtcctcatagcaagctgcataaagggaccgccctgcatagctctcaaaaacccgctgagccagtaaaacgacagcctaggagtcagtgcttgagtaccttggtgaggccagtttttggcgagcttaaagagaaacataaacagtccgggggatctgtcggggctctggaggagctagagaacgccttttcgctggcagaggaatcctgccctggtatttctgataagctgatggtgcacttggttgaacgggtccagcgtttttcacacaatagaaatcacctgacaagcaccaggtag

SEQ ID NO: 100848 - DNA, 1011 bp, Artificial Sequence
  derived and/or modified sequence
atggagtatcttggaggtggctccgctctggacctcctgaagccagggcctctggaggagacatacattgccacaattttgagagagatccttaaggggctcgattaccttcactctgagaggaagattcaccgtgatatcaaggcagccaatgtcctgctgagtgagcagggcgatgtgaaactggccgactttggagtcgctgggcaattgaccgacacgcagatcaagcgcaacaccttcgtaggcaccccgttctggatggcgccagaagtaataaagcagtccgcctacgatttcaaagccgatatttggagcttgggaatcaccgccattgagctggcaaagggagagccccctaactccgacctccaccccatgcgcgtgctgttcctgatcccaaagaacagtcctcctactctggaaggccagcattcaaaaccgtttaaagagttcgttgaagcttgtttgaataaggatccacgttttcgccctactgctaaggaactgctcaaacacaagttcatcacgagatacactaagaaaacaagttttcttaccgagctcattgatagatacaaacgatggaaaagcgagggccacggagaggaaagctcctcggaggattccgacattgacggggaggccgaagatggcgaacaggggcctatatggacttttcctccaacaatccgcccaagtccccatagcaagttacataaaggaaccgccttgcattccagtcaaaagcccgcagagccagtaaagcgccagccgagatctcaatgccttagcacgttagtgcggccagtcttcggggaggtgttctctcagttgaaggagaagcacaaacagtccggcggatccgttggagcccttgaggaactagagaatgctttcagtttagccgaggagtcttgtcccggaatttctgataaacttatggttcacctggtggaacgtgtccagcgctttagtcataaccggaatcacttgacttccacgcgttag

SEQ ID NO: 100849 - protein, 80 aa, Artificial Sequence
  derived and/or modified sequence
MAAYQQEEQMQLPRADAIRSRLIDTFSLIEHLQGLSQAVPRHTIRELLDPSRQKKLVLGDQHQLVRFSIKPQRIEQISHA

SEQ ID NO: 100850 - DNA, 1587 bp, Artificial Sequence
  derived and/or modified sequence
atggccgcctaccagcaggaggagcagatgcagctgcccagagccgacgccatcagaagcagactgatcgacaccttcagcctgatcgagcacctgcagggcctgagccaggccgtgcccagacacaccatcagagagctgctggaccccagcagacagaagaagctggtgctgggcgaccagcaccagctggtgagattcagcatcaagccccagagaatcgagcagatcagccacgcccagagactgctgagcagactgcacgtgagatgcagccagagaccccccctgagcctgtgggccggctgggtgctggagtgccccctgttcaagaacttcatcatcttcctggtgttcctgaacaccatcatcctgatggtggagatcgagctgctggagagcaccaacaccaagctgtggcccctgaagctgaccctggaggtggccgcctggttcatcctgctgatcttcatcctggagatcctgctgaagtggctgagcaacttcagcgtgttctggaagagcgcctggaacgtgttcgacttcgtggtgaccatgctgagcctgctgcccgaggtggtggtgctggtgggcgtgaccggccagagcgtgtggctgcagctgctgagaatctgcagagtgctgagaagcctgaagctgctggcccagttcagacagatccagatcatcatcctggtgctggtgagagccctgaagagcatgaccttcctgctgatgctgctgctgatcttcttctacatcttcgccgtgaccggcgtgtacgtgttcagcgagtacaccagaagccccagacaggacctggagtaccacgtgttcttcagcgacctgcccaacagcctggtgaccgtgttcatcctgttcaccctggaccactggtacgccctgctgcaggacgtgtggaaggtgcccgaggtgagcagaatcttcagcagcatctacttcatcctgtggctgctgctgggcagcatcatcttcagaagcatcatcgtggccatgatggtgaccaacttccagaacatcagaaaggagctgaacgaggagatggccagaagagaggtgcagctgaaggccgacatgttcaagagacagatcatccagagaagaaagaacatgagccacgaggccctgaccagcagccacagcaagatcgaggacagaggcgccagccagcagagagagagcctggacctgagcgaggtgagcgaggtggagagcaactacggcgccaccgaggaggacctgatcaccagcgccagcaagaccgaggagaccctgagcaagaagagagagtaccagagcagcagctgcgtgagcagcaccagcagcagctacagcagcagcagcgagagcagattcagcgagagcatcggcagactggactgggagaccctggtgcacgagaacctgcccggcctgatggagatggaccaggacgacagagtgtggcccagagacagcctgttcagatacttcgagctgctggagaagctgcagtacaacctggaggagagaaagaagctgcaggagttcgccgtgcaggccctgatgaacctggaggacaagtag

SEQ ID NO: 100851 - DNA, 195 bp, Artificial Sequence
  derived and/or modified sequence
atggccgcctaccagcaggaggagcagatgcagctgcccagagccgacgccatcagaagcagactgatcgacaccttcagcctgatcgagcacctgcagggcctgagccaggccgtgcccagacacaccatcagagagctgctggaccccagcagacagaagaagctggtgctgggcgaccagcaccagctgtag

SEQ ID NO: 100852 - DNA, 147 bp, Artificial Sequence
  derived and/or modified sequence
atggccgcctaccagcaggaggagcagatgcagctgcccagagccgacgccatcagaagcagactgatcgacaccttcagcctgatcgagcacctgcagggcctgagccaggccgtgcccagacacaccatcagagagctgctgtag

SEQ ID NO: 100853 - DNA, 243 bp, Artificial Sequence
  derived and/or modified sequence
atggccgcctaccagcaggaggagcagatgcagctgcccagagccgacgccatcagaagcagactgatcgacaccttcagcctgatcgagcacctgcagggcctgagccaggccgtgcccagacacaccatcagagagctgctggaccccagcagacagaagaagctggtgctgggcgaccagcaccagctggtgagattcagcatcaagccccagagaatcgagcagatcagccacgcctag

SEQ ID NO: 100854 - DNA, 1587 bp, Artificial Sequence
  derived and/or modified sequence
atggccgcttaccaacaggaagagcagatgcagttgccccgggcggacgctattcggtcgcgtcttattgatacatttagcctaatcgaacacttgcagggactgtcccaggcagtcccccgtcacaccataagagagctgctggatccctctcgccagaaaaagctggtgcttggcgatcaacatcagctggtgaggttttcgattaagccccagcgaatcgagcagatctctcacgctcagcgactgctgtctcggctgcacgtgagatgctcacagagacctcctcttagcctatgggcgggttgggtgctcgagtgccccctgtttaagaactttatcatattcctcgtgtttctgaacaccattattctaatggtggagattgaacttctggagagcacaaacacaaaactgtggccactgaagctcaccctagaggtagcagcctggttcattttactgatctttattctggaaatattgctgaaatggttgtcgaatttctctgttttttggaagagcgcttggaacgtgttcgacttcgtcgtcaccatgttgagtttgctgccggaggttgtggtcctggtaggggtgaccggacagtcagtgtggttgcagctgttacgcatttgcagagttttacgatccctgaagcttcttgcgcagtttcgtcagatacaaattattattttggtactagtcagagccctaaagtctatgactttcttgttgatgttgctactgatattcttttacatctttgccgttaccggcgtgtatgttttttcagagtacaccagaagcccacgccaggatctagagtatcacgtgtttttctctgatttacctaactctttagtgacagtgttcatcctctttaccctagatcattggtatgcacttctgcaagatgtctggaaggtgccagaggtctctaggattttttccagtatctacttcatactttggctgctgctcggctccattatctttcgaagcataatagtcgcaatgatggtgacaaactttcagaatattcgaaaggagctgaatgaggaaatggcaaggagagaagtgcagttgaaggcggacatgtttaaaaggcaaattatccagcggaggaagaatatgtctcatgaagcgctgaccagctcacattcaaaaattgaggatcggggtgcctcacagcagcgggaatccctagatctatcagaggtgtccgaagtggagagtaactacggtgcaacagaggaagacttaatcacaagtgcctcaaagaccgaggagaccctgtctaagaagcgggaataccagagttcctcctgcgtgtcttccaccagttcatcatattcaagttcctcagagagtcgtttttctgagagcatcggaaggctcgactgggagacacttgtccatgaaaatcttcccggtctcatggagatggaccaagatgatcgcgtctggccccgcgactccttgttcaggtacttcgagctgttggaaaagctgcagtataatctggaagaaaggaaaaaattgcaggaattcgccgtgcaggcactcatgaacttggaagacaagtag

SEQ ID NO: 100855 - DNA, 1587 bp, Artificial Sequence
  derived and/or modified sequence
atggccgcctatcagcaggaggagcaaatgcagttaccccgtgcagatgcaattaggagtagattgatcgatacgttctccttgatcgagcacttgcagggcctgtcccaagctgtcccccgccacaccattcgcgagcttctggacccatcacggcagaagaaattggtgctgggagatcagcaccagctcgtgcgctttagtatcaaacctcaaagaattgaacagatctcgcacgcccagagactactctctcggctccacgtacgttgttctcagcggcctcccctgagcctgtgggccggttgggttctggagtgtccactgtttaaaaacttcatcatcttccttgtatttctgaataccattatcctgatggtggagattgagctgttggagtccaccaatacaaagctatggccccttaaactgaccctcgaagtggctgcatggttcatccttctcatatttatattggagatccttctcaagtggttatctaacttcagcgtcttctggaaatctgcttggaatgtctttgatttcgttgttactatgctgagcctcctgcccgaagttgtggttttggtgggcgtcacgggccagagtgtgtggctgcagctcctccggatttgccgggtactgcgaagcctgaaactcctggcgcagtttcgtcagatccagattattatcttggtgctagtgcgtgcactgaaaagcatgacctttctgcttatgctgctgcttatctttttttatatctttgcagtcacaggagtctacgtgttcagcgagtacactagaagcccacggcaagatctagaatatcatgtgttctttagcgatttgcccaactccctcgtgactgtgtttatcctgtttaccctggaccattggtatgctttacttcaggacgtgtggaaggtgccagaagttagcaggatcttttcctccatttattttatcctctggctactccttggatccatcatcttccgaagcatcatagttgccatgatggtgacaaacttccagaatattcgtaaagagctgaacgaggagatggctcggagggaggtgcagctcaaggccgacatgtttaagcgccaaatcattcagcgtagaaagaacatgagtcacgaagccctgacatcctcacacagcaagattgaagatagaggcgcctcgcagcagagggagtcactggacctgagtgaagtttctgaggtggaatccaactacggggccacagaggaggatctgatcaccagcgcctccaagacagaggagaccctgtccaagaagagggaatatcagtcatcatcctgtgtatcctctactagttctagttactcttcctcatctgagtctcgattctcagaatccataggacgcctggattgggagactctggtccatgagaacttacccggccttatggagatggaccaggacgacagagtatggccgagggatagcctttttaggtactttgagttactggaaaaactccagtacaatctggaggaaaggaagaagctgcaggagttcgctgttcaggctctcatgaacctagaagacaaatag

SEQ ID NO: 100856 - DNA, 195 bp, Artificial Sequence
  derived and/or modified sequence
atggccgcttaccagcaggaagaacagatgcagctcccccgcgccgatgccattagatccagactgatcgacacattctccctgattgagcatctgcagggcctgtcacaggctgttccgcgccatacgatccgggaacttcttgacccatcacgccaaaagaaattggtgctcggcgaccagcaccagctgtag

SEQ ID NO: 100857 - DNA, 147 bp, Artificial Sequence
  derived and/or modified sequence
atggctgcatatcagcaggaggagcagatgcaactgccaagggccgatgctatccggtccagacttattgacacattctctctcatcgagcacctccagggtctcagccaggcagtcccacgacataccatccgggaactcctctag

SEQ ID NO: 100858 - DNA, 243 bp, Artificial Sequence
  derived and/or modified sequence
atggccgcttatcagcaggaagaacagatgcagctgccaagagcggatgccatccgctcgcgactgattgatacattttccctgattgaacacctgcaggggctgtctcaggccgttccaagacacaccatacgggagctgctagatccttcaagacaaaaaaaactggttctgggagatcaacatcagctggtgcgattcagtattaaaccccagagaatcgagcagatctcccacgcctag

SEQ ID NO: 100859 - DNA, 1587 bp, Artificial Sequence
  derived and/or modified sequence
atggccgcctaccagcaggaggagcagatgcagctgcccagggcagatgccatccgcagccggctgattgacaccttcagcctgattgagcacctgcagggcctgagccaggccgtgcccaggcacaccatccgggagctgctggaccccagccggcagaagaagctggtgctgggggaccagcaccagctggtgcgcttcagcatcaagccccagagaattgagcagatcagccacgcccagaggctgctgagccggctgcacgtgcgctgcagccagaggcctcccctgagcctgtgggccggctgggtgctggagtgccccctcttcaagaacttcatcatcttcctggtgttcctgaacaccatcatcctgatggtggagattgagctgctggagagcaccaacaccaagctgtggcccctgaagctgaccctggaggtggccgcctggttcatcctgctgatcttcatcctggagatcctgctgaagtggctgagcaacttcagcgtcttctggaagagcgcctggaatgtgtttgattttgtggtgaccatgctgagcctgctgcctgaggtggtggtgctggtgggcgtgacaggccagagcgtgtggctgcagctgctgcgcatctgccgggtgctgcggagcctgaagctgctggcccagttccggcagatccagatcatcatcctggtgctggtgcgggccctgaagtccatgaccttcctgctgatgctgctgctgatcttcttctacatctttgctgtgactggagtgtatgtgttcagcgagtacaccaggagcccccggcaggacctggagtaccacgtgttcttcagtgacctgcccaacagcctggtgacagtgttcatcctcttcaccctggaccactggtacgccctgctgcaggatgtgtggaaggtgcctgaggtgagccgcatcttcagcagcatctacttcatcctgtggctgctgctgggcagcatcatcttccgcagcatcatcgtggccatgatggtgaccaacttccagaacatcaggaaggagctgaatgaggagatggcccggcgggaggtgcagctgaaggctgacatgttcaagaggcagatcatccagaggaggaagaacatgagccatgaggccctgaccagcagccacagcaagattgaagatagaggagccagccagcagcgggagagcctggacctgtctgaggtgtctgaggtggagagcaactacggggccacagaagaagatctcatcaccagcgccagcaagacagaggagaccctgagcaagaagcgggagtaccagagcagcagctgtgtgagcagcaccagcagcagctacagcagcagcagcgagagccgcttcagcgagagcatcggccgcctggactgggagaccctggtgcatgagaacctgcccggcctgatggagatggaccaggatgacagagtgtggccccgggacagcctcttccgctactttgagctgctggagaagctgcagtacaacctggaggagaggaagaagctgcaggagtttgctgtgcaggccctgatgaacctggaggacaagtag

SEQ ID NO: 100860 - DNA, 195 bp, Artificial Sequence
  derived and/or modified sequence
atggccgcctaccagcaggaggagcagatgcagctgcccagggcagatgccatccgcagccggctgattgacaccttcagcctgattgagcacctgcagggcctgagccaggccgtgcccaggcacaccatccgggagctgctggaccccagccggcagaagaagctggtgctgggggaccagcaccagctgtag

SEQ ID NO: 100861 - DNA, 147 bp, Artificial Sequence
  derived and/or modified sequence
atggccgcctaccagcaggaggagcagatgcagctgcccagggcagatgccatccgcagccggctgattgacaccttcagcctgattgagcacctgcagggcctgagccaggccgtgcccaggcacaccatccgggagctgctgtag

SEQ ID NO: 100862 - DNA, 243 bp, Artificial Sequence
  derived and/or modified sequence
atggccgcctaccagcaggaggagcagatgcagctgcccagggcagatgccatccgcagccggctgattgacaccttcagcctgattgagcacctgcagggcctgagccaggccgtgcccaggcacaccatccgggagctgctggaccccagccggcagaagaagctggtgctgggggaccagcaccagctggtgcgcttcagcatcaagccccagagaattgagcagatcagccacgcctag

SEQ ID NO: 100863 - DNA, 1587 bp, Artificial Sequence
  derived and/or modified sequence
atggccgcctaccagcaggaggagcagatgcagctgccccgggccgatgcaatccgctccagactgatcgatacattttccctgattgagcacctccagggcctttctcaggctgtcccgcggcatacaatccgcgagctactggacccctctcgccaaaagaagctggttctgggcgatcagcaccagcttgtgaggttttcaattaaaccacaacgaatcgaacagatttcacacgcccagcgtctgctcagcaggctccacgtgaggtgcagtcagaggcctcccctgagcctttgggccggttgggtgctggagtgcccattatttaaaaattttataattttcttggtattcttaaatacaatcatcttaatggttgagattgagctcctggaaagcacaaacacaaagctatggcccttaaaactcactctggaagtggcagcctggtttattcttctgatttttatcctcgagatcctgctcaagtggctgtctaacttcagcgtgttctggaaaagcgcttggaacgtctttgacttcgtggttacaatgctctccctgcttccagaagtggtggtgctggttggagtgaccggccaatccgtgtggcttcagctgcttcgcatctgccgcgttttgaggtctctcaaattactggcccagtttcgccaaatccagattataatcttggtcttagtgagagctctgaagtcgatgacgtttctactaatgttgctccttatttttttctacatattcgcggtcaccggtgtatacgttttttcagagtacacacgctccccccgacaggacctggagtatcatgttttcttcagtgatttgcctaacagcctcgtgaccgtgttcatcctgtttactctggatcactggtatgcactccttcaggacgtctggaaagtgcctgaggtttcacggattttctcaagcatttacttcatcctctggctcctactagggtctatcattttccggagtatcattgtggcgatgatggtgaccaacttccaaaacattaggaaggagctgaacgaggagatggcacgtcgggaagtccagctgaaggccgatatgtttaagcgtcagattattcagcgacgaaagaatatgagccacgaagctctcacttcctcacatagtaagatagaagacaggggcgctagtcaacagagagaaagcctcgacctttctgaggtgtccgaggtggaatctaactatggtgcgacagaggaagacctgataactagtgcttcaaagaccgaagaaaccctgtccaaaaagagagagtaccaaagcagttcctgcgtcagctctacaagctcctcttattctagtagcagcgagtctaggttttccgaatccatcggtagactggactgggaaacactggtgcatgagaatcttccgggcttaatggagatggatcaggacgacagagtgtggccaagagactccctgtttaggtattttgagttgctggaaaagctacagtataatctggaggaacgaaagaaactgcaggagttcgcagtacaggctttgatgaatttggaggataagtag

SEQ ID NO: 100864 - DNA, 1587 bp, Artificial Sequence
  derived and/or modified sequence
atggccgcctaccagcaggaggagcagatgcagctgccccgggccgatgctatccggtctcgactgatcgacacattttcattaattgaacatctgcagggcctcagtcaagccgtcccccggcatacaattcgcgagttgttggatccttctagacagaaaaaactggttcttggggaccagcaccagttagtccggttctcaatcaaaccccaacggatcgaacagattagccacgcccagaggctgttatcacggttacatgtgcggtgcagccagaggccgcccctgtcactgtgggcggggtgggtcctcgagtgtcccctttttaaaaatttcattattttcctggtcttcctcaacactatcatcctcatggtggagattgagctcttagagagtacgaacacaaagctttggcccctcaaactcactttggaggtcgcggcctggttcatcctgttgattttcattttggaaatcttattaaaatggttgtccaatttctccgttttctggaagtcagcttggaatgtattcgattttgtggtcacaatgctgtcgctgctccccgaagtcgtggtactggtaggggtaaccggtcagtctgtatggttacaactgctgagaatttgcagggtgctgaggtctttgaagctgctggctcagtttagacagattcagatcatcatcctggttctcgtacgagcgctaaaatccatgaccttcctgctgatgttgttgctgattttcttctacatatttgctgtaacgggagtgtatgtcttttcagaatacacccgaagccctcgtcaggacttggaataccacgtctttttctcggatctcccgaattctctggtgacagtattcattctgttcacactggaccattggtatgcactgctccaagatgtctggaaggtccccgaggtatccagaatattctctagtatttatttcatactctggttgctcttgggcagcattatctttcggagcataatcgtggcaatgatggtgaccaattttcagaacatcagaaaagaactgaacgaggaaatggctaggcgtgaggtgcagctcaaagcagacatgttcaaacggcaaatcattcagcggagaaagaacatgagtcacgaggccttaacgagctctcattccaagattgaggaccggggagcctcccagcagagagagtcactggatctgtcagaagtatccgaggtggaaagcaactacggcgccactgaggaagacctgatcacaagtgcctccaagactgaggagaccttatcaaagaagcgtgaatatcagagcagttcttgcgtgtctagcaccagctctagctactcctcttcatccgaatcacgattttcagagtcaatcggaaggctggattgggaaacattggtccacgaaaacttgccaggcttgatggaaatggaccaggatgaccgagtgtggccccgggacagtctgtttcggtacttcgagctcttggagaagttgcagtacaacctggaggagaggaaaaagttgcaagagttcgcagttcaggcgcttatgaacctcgaggataaatag

SEQ ID NO: 100865 - DNA, 195 bp, Artificial Sequence
  derived and/or modified sequence
atggccgcctaccagcaggaggagcagatgcagctgccccgggccgacgccattagatcccgactcatcgacactttcagcctgattgagcatttgcaaggcttgagtcaggctgttccccggcacacaatacgagaactcctcgatccttccagacaaaaaaagctggtcctcggggatcagcatcagctctag

SEQ ID NO: 100866 - DNA, 147 bp, Artificial Sequence
  derived and/or modified sequence
atggccgcctaccagcaggaggagcagatgcagctgccccgggccgatgccatccgctcccggttgattgacacctttagcctgattgagcatctgcaaggactatcccaggctgtgccacgccacactatccgcgaactattgtag

SEQ ID NO: 100867 - DNA, 243 bp, Artificial Sequence
  derived and/or modified sequence
atggccgcctaccagcaggaggagcagatgcagctgccccgggccgacgcaattcgctcaagacttattgatacttttagcctaatcgaacacttgcaaggcttgtctcaagctgtgccccggcacaccatacgcgaactgctggatccttcccggcagaagaagttggttctcggggatcagcatcagcttgtgaggttcagtatcaaaccccaacggatcgaacagataagccatgcctag

SEQ ID NO: 100868 - DNA, 1587 bp, Artificial Sequence
  derived and/or modified sequence
atggcggcttatcagcaagaggaacagatgcagctccctagagcggatgccatacgatccagactcatcgacaccttctcattgatcgagcatttgcagggcctgagccaggcagtccccaggcatactatccgggaactgcttgatcccagcagacagaaaaagctcgtgctgggggaccagcaccaactcgtgaggttcagcattaagccgcagcgcatagagcaaatcagccatgcccaaaggcttctgagccggctgcacgtccgctgtagtcagaggccacccctgagcctctgggctggctgggtgctcgaatgcccactatttaagaatttcatcatcttcctagtgttcctcaataccatcattctgatggtggaaattgaattgctggaatcgaccaataccaagctgtggccacttaaactaactctggaagtcgccgcttggtttatcctgctgatcttcatcttggaaatccttctgaagtggctctcaaatttttccgtgttctggaaaagtgcttggaatgtctttgatttcgtggtgacaatgctttcattgctgcctgaagtcgtggtcctcgtcggtgttacagggcaatccgtctggctccaactgctcagaatttgccgcgtgctaaggtctctcaagcttctggctcagtttaggcagatccagatcatcatcctcgttctagtgcgggcactgaagtctatgacatttttgttgatgctgctgctcatcttcttttatatatttgccgtgaccggagtctacgttttttccgagtatacccggtcaccgaggcaggatctggaataccacgtcttctttagtgatctgcctaactctttggtgacagtctttattcttttcaccctcgatcactggtatgctcttctgcaggatgtgtggaaggtgcccgaggtgtcccgaattttctcctccatttacttcattctttggctcctcctgggatcaatcatttttagatcaatcatagtcgccatgatggtgactaactttcaaaatattcgaaaggagctgaacgaggagatggcacgtcgggaagtccagctaaaagctgatatgtttaaaaggcagatcatccagcgccgaaagaatatgagccacgaggccttaacgtcttcccactccaagattgaagatcggggagccagccagcagagggaaagcctggacctgagcgaagtgagtgaggtcgaatcgaattacggcgctacagaggaggacctcatcacctcagcttccaagacggaggagactttgtccaagaagcgggaataccagtcatcttcatgtgtgagtagcacttctagctcctatagttcaagctccgaatcccggttctctgaatctatcgggaggctcgactgggagacccttgtgcacgagaacctcccgggactcatggaaatggaccaggatgacagggtgtggcccagggatagtctctttagatatttcgaacttctcgaaaaactgcaatacaaccttgaggagcggaagaaacttcaggagttcgcagtgcaggcactgatgaatcttgaggacaaatag

SEQ ID NO: 100869 - DNA, 1587 bp, Artificial Sequence
  derived and/or modified sequence
atggcagcataccagcaggaagagcagatgcaactgcccagggccgacgcgatcaggtcgcgcctgatcgacacattctctctgatcgagcaccttcagggactgagccaggctgttccgagacatactataagggagcttttagatcctagtcgccaaaaaaaactggttctgggggaccagcaccagcttgtcaggttcagtatcaaacctcaacgaatcgaacagatctctcacgctcaacggctcctgagcaggcttcacgtccggtgtagccagaggccacccctgtccctgtgggccggatgggtcctggagtgccctctgtttaagaacttcataatctttctcgtgttcttaaacaccatcatactgatggtggagatcgagttactcgaaagtaccaacaccaaattatggccccttaagctaaccctggaagtagccgcttggttcatacttctgatttttatcttggaaattcttctgaaatggctgtctaatttcagtgttttctggaaatccgcctggaacgtctttgacttcgtggtaacaatgctgtccctgctcccggaagtggtggtgctggttggggtcaccggacaatcggtctggttgcagttgctcagaatttgtcgagtgttgagatccttgaagttgctcgcacagttccgacagatccaaatcatcatcctggtcttggttagggcgttgaagagtatgacttttctgttgatgctactgttgatcttcttttacatttttgccgtcactggcgtgtacgtctttagtgagtacactcgaagccccaggcaagacctggagtaccatgtctttttttccgatctgcccaattcgctggtgacagtttttatccttttcactctggatcactggtacgctcttttacaggatgtctggaaggtgcccgaagtctccaggatctttagttctatatacttcatcttatggctgctgctgggaagcataatttttagatctatcatcgtggccatgatggtaacaaacttccaaaacattcgtaaagaacttaacgaagaaatggcacgccgagaggtccagcttaaagcagacatgttcaaacgccagatcattcagcggcgtaaaaatatgagccatgaggctctgacctccagccatagcaagatagaagacagaggagcttcccagcaaagagagagtctcgacctgagcgaggtgtccgaggtcgaaagtaattacggggctaccgaggaggacctaattacgagcgccagcaaaaccgaagagacactttcgaagaaacgcgaatatcagagcagttcatgtgttagtagtacttctagcagttatagttcctccagcgagtctcgattcagcgaatctataggcaggctggattgggaaactctagtccatgagaacttgccgggtctgatggagatggatcaggacgatagagtatggcctcgggacagtctcttccgctattttgagctgctggagaaactgcaatacaacttggaagagaggaaaaagctccaagaattcgctgtgcaggcactaatgaatttggaggacaaatag

SEQ ID NO: 100870 - DNA, 195 bp, Artificial Sequence
  derived and/or modified sequence
atggctgcctaccaacaggaagaacagatgcaacttcccagggccgacgctattagaagtcgtctcatcgacacatttagcctcattgagcatctgcagggactgagccaagcagtgccaaggcacacgattcgtgaactcttggaccccagccgccagaaaaagctggtgttgggggaccagcaccaactttag

SEQ ID NO: 100871 - DNA, 147 bp, Artificial Sequence
  derived and/or modified sequence
atggcggcatatcaacaggaagaacaaatgcagcttcccagagcagacgcaatcagatcgcgactgatcgacacattttccctgatcgagcatttacaggggctgagtcaggctgtgcctcggcatacaatccgtgaactgctgtag

SEQ ID NO: 100872 - DNA, 243 bp, Artificial Sequence
  derived and/or modified sequence
atggctgcctatcagcaagaagagcagatgcaattgccccgagccgatgctatccgcagtcgactgattgatacattttccctgatcgaacacctccagggactgtcacaggccgttccgagacataccatcagagagcttctggaccctagcaggcagaaaaaattggtgctcggtgatcagcatcagctcgtgagattcagcattaagcctcagcgtattgagcaaataagccatgcctag

SEQ ID NO: 100873 - protein, 528 aa, Artificial Sequence
  derived and/or modified sequence
MAAYQQEEQMQLPRADAIRSRLIDTFSLIEHLQGLSQAVPRHTIRELLDPSRQKKLVLGDQHQLVRFSIKPQRIEQISHAQRLLSRLHVRCSQRPPLSLWAGWVLECPLFKNFIIFLVFLNTIILMVEIELLESTNTKLWPLKLTLEVAAWFILLIFILEILLKWLSNFSVFWKSAWNVFDFVVTMLSLLPEVVVLVGVTGQSVWLQLLRICRVLRSLKLLAQFRQIQIIILVLVRALKSMTFLLMLLLIFFYIFAVTGVYVFSEYTRSPRQDLEYHVFFSDLPNSLVTVFILFTLDHWYALLQDVWKVPEVSRIFSSIYFILWLLLGSIIFRSIIVAMMVTNFQNIRKELNEEMARREVQLKADMFKRQIIQRRKNMSHEALTSSHSKIEDRGASQQRESLDLSEVSEVESNYGATEEDLITSASKTEETLSKKREYQSSSCVSSTSSSYSSSSESRFSESIGRLDWETLVHENLPGLMEMDQDDRVWPRDSLFRYFELLEKLQYNLEERKKLQEFAVQALMNLEDK

SEQ ID NO: 100874 - DNA, 1918 bp, Artificial Sequence
  derived and/or modified sequence
gctccgcatggtcctgggctgtgggtaggggctagggccgggtcccggggtgagccgaaacctgggggtcgagcggggcggggaatggggcgcagtgaggctgggagccggccctgagctcgtcttgcataggggtagccaggctcggggcacctgagctggaggcggaagcgtgaaataaggactgagtgggcaaagagaacctgggctgagacatggccgcttaccaacaagaagagcagatgcagcttccccgagctgatgccattcgttcacgtctcatcgatactttctctctcattgagcatttgcaaggcttgagccaagctgtgccgcggcacactatcagggagttacttgatccttcccgccagaagaaacttgtattgggagatcaacaccagctagtgcgtttctctataaagcctcagcgtatagaacagatttcacatgcccagaggctgttgagcaggcttcatgtgcgctgcagtcagaggccacctctttctttgtgggccggatgggtccttgagtgtcctctcttcaaaaacttcatcatcttcctggtctttttgaatacgatcatattgatggttgaaatagaattgctggaatccacaaataccaaactatggccattgaagctgaccttggaggtggcagcttggtttatcttgcttattttcatcctggagatccttcttaagtggctatccaacttttctgttttctggaagagtgcctggaatgtctttgactttgttgttaccatgttgtccctgcttcccgaggttgtggtattggtaggggtaacaggccaatcggtgtggcttcagcttctgaggatctgccgggtgctgaggtctctcaaactccttgcacaattccgtcaaattcaaattattattttggtcctggtcagggccctcaagagcatgaccttcctcttgatgttgctgctcatcttcttctacatttttgctgtgactggtgtctacgtcttctcagagtacacccgttcacctcgtcaggacctggagtaccatgtgttcttctcggacctcccgaattccctggtaacagtgttcattctcttcaccttggatcattggtatgcactgcttcaggacgtctggaaggtgcctgaagtcagtcgcatcttcagcagcatctatttcatcctttggttgttgcttggctccattatctttcgaagtatcatagtagccatgatggttactaactttcagaatatcaggaaagagctgaatgaggagatggcgcgtcgggaggttcagctcaaagctgacatgttcaagcggcagatcatccagaggagaaaaaacatgtcacatgaagcactgacgtcaagccatagcaaaatagaggacagaggagctagtcaacaaagggaaagtttggacttatcagaagtgtctgaagtagagtctaattatggtgccactgaagaggatttaataacatctgcatcaaaaacagaagagaccttgtcaaaaaagagagagtaccagtcttcctcctgtgtctcctccacatcctcttcctattcttcctcttctgaatccagattttctgaatctattggtcgtttggactgggagactcttgtgcacgaaaatctgcccgggctaatggaaatggatcaggatgaccgtgtttggcccagagactcactcttccgatattttgagttgctagaaaagcttcagtataacctagaggaacgtaagaagttacaagagtttgcagtgcaggcactgatgaacttggaagacaagtaaagcaatggatggcttcaatatccttgggcccagcaaaagataatgaagggaattgttggaaatagagaattgaaaatataaacattcagatagaacaatgtctgttcattaaaatt

SEQ ID NO: 100875 - DNA, 1706 bp, Artificial Sequence
  derived and/or modified sequence
gctccgcatggtcctgggctgtgggtaggggctagggccgggtcccggggtgagccgaaacctgggggtcgagcggggcggggaatggggcgcagtgaggctgggagccggccctgagctcgtcttgcataggggtagccaggctcggggcacctgagctggaggcggaagcgtgaaataaggactgagtgggcaaagagaacctgggctgagacatggccgcttaccaacaagaagagcagatgcagcttccccgagctgatgccattcgttcacgtctcatcgatactttctctctcattgagcatttgcaaggcttgagccaagctgtgccgcggcacactatcagggagttacttgatccttcccgccagaagaaacttgtattgggagatcaacaccagctagtgcgtttctctataaagcctcagcgtatagaacagatttcacatgcccagaggctgttgagcaggcttcatgtgcgctgcagtcagaggccacctctttctttgtgggccggatgggtccttgagtgtcctctcttcaaaaacttcatcatcttcctggtctttttgaatacgatcatattgatggttgaaatagaattgctggaatccacaaataccaaactatggccattgaagctgaccttggaggtggcagcttggtttatcttgcttattttcatcctggagatccttcttaagtggctatccaacttttctgttttctggaagagtgcctggaatgtctttgactttgttgttaccatgttgtccctgcttcccgaggttgtggtattggtaggggtaacaggccaatcggtgtggcttcagcttctgaggatctgccgggtgctgaggtctctcaaactccttgcacaattccgtcaaattcaaattattattttggtcctggtcagggccctcaagagcatgaccttcctcttgatgttgctgctcatcttcttctacatttttgctgtgactggtgtctacgtcttctcagagtacacccgttcacctcgtcaggacctggagtaccatgtgttcttctcggacctcccgaattccctggtaacagtgttcattctcttcaccttggatcattggtatgcactgcttcaggacgtctggaaggtgcctgaagtcagtcgcatcttcagcagcatctatttcatcctttggttgttgcttggctccattatctttcgaagtatcatagtagccatgatggttactaactttcagaatatcaggaaagagctgaatgaggagatggcgcgtcgggaggttcagctcaaagctgacatgttcaagcggcagatcatccagaggagaaaaaacatgtcacatgaagcactgacgtcaagccatagcaaaatagaggacaggtcgtttggactgggagactcttgtgcacgaaaatctgcccgggctaatggaaatggatcaggatgaccgtgtttggcccagagactcactcttccgatattttgagttgctagaaaagcttcagtataacctagaggaacgtaagaagttacaagagtttgcagtgcaggcactgatgaacttggaagacaagtaaagcaatggatggcttcaatatccttgggcccagcaaaagataatgaagggaattgttggaaatagagaattgaaaatataaacattcagatagaacaatgtctgttcattaaaatt

SEQ ID NO: 100876 - DNA, 3898 bp, Artificial Sequence
  derived and/or modified sequence
gttgctccgcatggtcctgggctgtgggggtagccaggctcggggcacctgagctggaggcggaagcgtgaaataaggactgagtgggcaaagagaacctgggctgagcagacatggccgcttaccaacaagaagagcagatgcagcttccccgagctgatgccattcgttcacgtctcatcgatactttctctctcattgagcatttgcaaggcttgagccaagctgtgccgcggcacactatcagggagttacttgatccttcccgccagaagaaacttgtattgggagatcaacaccagctagtgcgtttctctataaagcctcagcgtatagaacagatttcacatgcccagaggctgttgagcaggcttcatgtgcgctgcagtcagaggccacctctttctttgtgggccggatgggtccttgagtgtcctctcttcaaaaacttcatcatcttcctggtctttttgaatacgatcatattgatggttgaaatagaattgctggaatccacaaataccaaactatggccattgaagctgaccttggaggtggcagcttggtttatcttgcttattttcatcctggagatccttcttaagtggctatccaacttttctgttttctggaagagtgcctggaatgtctttgactttgttgttaccatgttgtccctgcttcccgaggttgtggtattggtaggggtaacaggccaatcggtgtggcttcagcttctgaggatctgccgggtgctgaggtctctcaaactccttgcacaattccgtcaaattcaaattattattttggtcctggtcagggccctcaagagcatgaccttcctcttgatgttgctgctcatcttcttctacatttttgctgtgactggtgtctacgtcttctcagagtacacccgttcacctcgtcaggacctggagtaccatgtgttcttctcggacctcccgaattccctggtaacagtgttcattctcttcaccttggatcattggtatgcactgcttcaggacgtctggaaggtgcctgaagtcagtcgcatcttcagcagcatctatttcatcctttggttgttgcttggctccattatctttcgaagtatcatagtagccatgatggttactaactttcagaatatcaggaaagagctgaatgaggagatggcgcgtcgggaggttcagctcaaagctgacatgttcaagcggcagatcatccagaggagaaaaaacatgtcacatgaagcactgacgtcaagccatagcaaaatagaggacagaggagctagtcaacaaagggaaagtttggacttatcagaagtgtctgaagtagagtctaattatggtgccactgaagaggatttaataacatctgcatcaaaaacagaagagaccttgtcaaaaaagagagagtaccagtcttcctcctgtgtctcctccacatcctcttcctattcttcctcttctgaatccagattttctgaatctattggtcgtttggactgggagactcttgtgcacgaaaatctgcccgggctaatggaaatggatcaggatgaccgtgtttggcccagagactcactcttccgatattttgagttgctagaaaagcttcagtataacctagaggaacgtaagaagttacaagagtttgcagtgcaggcactgatgaacttggaagacaagtaaagcaatggatggcttcaatatccttgggcccagcaaaagataatgaagggaattgttggaaatagagaattgaaaatataaacattcagatagaacaatgtctgttcattaaaattaaaaagtataagtgtctaggccaggcgtggtgaaaccctgtctctactaaaaatacaaaaaaattagctgggtgtggtggcagatgcttgtaatcatagctacttgggagcctgaggcaggagaatcacttgaacctgggagtcagaggttgcagtgagccaagattgcaccactgcactccagcctgggcaacagagtgagactctgtataagtgtcttataaatactcctgatagctgctcagtagtgtgaccctgagataagggatattgaaaggcataaggtcaagtaaaagagttagttcaagctgagtgtggtgatgtgtgcctctagtcccagctatgggctgaggcaggattgtttgaggcagggagttcgaggctacagcaagctaggatcatatcactgcattccagcctgggcaacatagcgagaccctatctctaaaaaagaacaaaacaagttagctcagatgccagtggagtctgtgctccttagctttctaccctttccacagctcctgaatctgactcatttcttgactttatcattatagcttccacccttcctgcaacctctactgcctgattagagtcctaattttaccctctccctccctgatgcataggtaaaggcccctctgtggagtaaggagatcttcagagctgttagtgtaactaattgagaagtattgtttccattgcgtgttccactcatgttgcttctcttgtgaaccattaactttaattggatattatttttacctgtttctggaccggaagtctctttatttcattttgccatagctcagggcagtgttcaaatcagtaagtgttgtacaggtttttagtgttagaagggatttcagagttaatctatctcccatcaaagcaggaacaccttttagaacatcactgaaaggaggattatccaggtaatgcttaatgtttctagttatttgggatttattatctagaagggatcccattccatcgttagaagacttaagtctttagacatgtttattattaaaaattatatcacttattgagtgtttaacatgtatgaggttatttatatatttagtatatatatactgtatatagagtatgcatatttcataaaataatcatatatggaagatagcgtcacatttttagagatcagaaaactaaggcctaaagaaattaagtaagttaagtagcttgcccaagagcacataccaagtaagaggtagagctaaggttctaactcaggttaaaaattctgagttgagaaaaaaatcagttgaagccatttaaacaataaaatagcttactggagactggaaaattcaaaggtagtatagcttcaggattgatttaatgtaaaaattcactgttgttagatctgtggttttgtttctctggaattttcctgtctgcgctctcctccacgtgttcttgttattctcagactggcttcacttgggtagccagacaattttctgaagcgcctaggcttgcatacctatttccccatatgcaggggaagagagccggtgactcctttctcagtcaatgaacaaaatttttgagctttgggtcacaataatggttattcttggagtgaagatactgatggggaggaagcatgaagcatctggagtgctatagatatgttccatatcttgatctgcatggtggttacaccggtatatacagatgtaaaaattcaacaaaatgtacacttaaaatttgggcattaactgcaggtaagtcaacctccactcctctaaagatatcctgaccaccactctgattggaccaagaagttaggtcatatgcttacgtctgaacaaattgttgaggtaaggtggtggttgtgatgaaatcactaattaaggctttctcctgaactggaggtaaggtcagtaacacccaaccttaagtaagggctgctacccaagtggggaagagatggaagggggcaatagggtggtaattataaagtcctcacctaagagtatgtctggcaaaaaggccaagatggggaaaaggcaaatgaattgaatgtccagaataaacaaatctatgaagaca

SEQ ID NO: 100877 - DNA, 275 bp, Artificial Sequence
  derived and/or modified sequence
agtgatcagctgaagggagaaactgtacaccatgtgacggacaaattgcctgcctcaagaaagcacttaggaccattctgcagccactcagtgaccttggctagaaaccaatggctgtgcggcgtgagacatggccgcttaccaacaagaagagcagatgcagcttccccgagctgatgccattcgttcacgtctcatcgatactttctctctcattgagcatttgcaaggcttgagccaagctgtgccgcggcacactatcagggagttacttg

SEQ ID NO: 100878 - DNA, 252 bp, Artificial Sequence
  derived and/or modified sequence
ggctgtggcagacatggccgcttaccaacaagaagagcagatgcagcttccccgagctgatgccattcgttcacgtctcatcgatactttctctctcattgagcatttgcaaggcttgagccaagctgtgccgcggcacactatcagggagttacttgatccttcccgccagaagaaacttgtattgggagatcaacaccagctagtgcgtttctctataaagcctcagcgtatagaacagatttcacatgc

SEQ ID NO: 100879 - protein, 230 aa, Artificial Sequence
  derived and/or modified sequence
MRLAGPLRIVVLVVSVGVTWIVVSILLGGPGSGFPRIQQLFTSPESSVTAAPRARKYKCGLPQPCPEEHLAFRVVSGAANVIGPKICLEDKMLMSSVKDNVGRGLNIALVNGVSGELIEARAFDMWAGDVNDLLKFIRPLHEGTLVFVASYDDPATKMNEETRKLFSELGSRNAKELAFRDSWVFVGAKGVQNKSPFEQHVKNSKHSNKYEGWPEALEMEGCIPRRSTAS

SEQ ID NO: 100880 - DNA, 693 bp, Artificial Sequence
  derived and/or modified sequence
atgagattagctggcccactgagaatcgttgttctggtggttagcgtcggagtcacgtggatcgtcgtgtcaatcttgctgggtggcccaggctctgggttcccacgcattcagcagctgttcacaagccccgagtcaagcgtgaccgccgctccaagggccagaaagtacaagtgtggcctgccccagccgtgccccgaggagcacttagccttccgggtggtgtctggtgcagctaacgtgattggccctaagatctgtctggaggataagatgctcatgagcagcgtgaaggataatgtgggaagaggcttgaacatagctctggtcaatggggtgtccggggagctgatcgaggcaagggcctttgacatgtgggcaggagacgttaacgatctcctgaagttcatcagaccattgcatgaaggaacccttgtgttcgtagccagttacgacgaccccgctaccaaaatgaacgaggaaacgcgcaagttgttcagtgagctggggagccgcaacgccaaagagctcgctttccgcgactcatgggtctttgtaggcgctaaaggtgtccaaaacaagtctcctttcgaacagcacgtcaaaaacagcaaacattccaataagtatgaaggctggcccgaagctctagagatggagggctgtattcctcgccgaagtactgcatcatag

SEQ ID NO: 100881 - DNA, 693 bp, Artificial Sequence
  derived and/or modified sequence
atgaggctggcaggccctcttcgaattgtggtgctcgtggtaagtgtgggcgtaacttggattgtggtctcgatacttctggggggacctggcagtggatttccacgcatccaacagctgtttacatctcctgaaagcagcgtcaccgcagccccaagggcccgaaagtacaagtgcgggttaccacagccttgcccagaggagcacctagcctttagagtggtctccggggcagcgaacgtgataggacctaaaatctgcctggaggataaaatgctcatgtcatccgtaaaagacaacgtgggtaggggactgaatatagcactggtgaacggggtttccggcgagctcatcgaggccagggcatttgacatgtgggcaggcgatgtcaatgacctgctgaaattcatccgtcctttacatgaaggaactctggtcttcgtggcaagttatgacgatcctgcaactaagatgaacgaagaaaccagaaagctcttttcagagttaggctctaggaatgctaaagaactcgcttttagagattcctgggtttttgttggcgctaagggcgtgcagaataaatctccctttgagcagcacgtgaagaacagcaagcactcgaataaatatgaagggtggcccgaagcgctggagatggagggctgcattcctcgcaggtcaacagccagttag

SEQ ID NO: 100882 - DNA, 693 bp, Artificial Sequence
  derived and/or modified sequence
atgaggcttgcagggccactccgcattgtagtgctggtggtgagtgtaggagtgacatggatcgttgtaagtatcctgctcggaggcccaggctctggcttccccaggatccaacagctgtttacatccccggaaagttccgtcactgccgcacccagggctagaaaatacaagtgcggcctgccacaaccatgtccagaggaacatctggccttcagggtggttagcggcgctgccaacgttatcggaccgaaaatctgcctggaggataagatgttgatgagttctgtgaaggataatgtcggacgcggattgaatattgcactcgtgaatggggtgagtggtgaactaattgaggccagggcattcgacatgtgggccggagacgtgaacgacctgctaaagttcatccggccactgcacgagggcactcttgttttcgtagcatcttacgacgaccccgcaaccaagatgaatgaggaaaccagaaaattgttctctgaactggggtctagaaacgccaaggaactcgccttcagagactcctgggttttcgtgggtgccaagggcgttcagaataaatccccatttgagcagcatgtgaagaattctaaacacagcaataagtacgaggggtggccagaggctttggaaatggaggggtgcatcccaaggcgctctaccgcatcctag

SEQ ID NO: 100883 - DNA, 693 bp, Artificial Sequence
  derived and/or modified sequence
atgcgcttggctggccccctaagaatcgtggttttggtggtgtctgtcggggtgacatggatcgtggtgtcaattctcctcggaggccctgggtcaggatttcctcgaattcaacaactattcacctcccccgaatcatccgtcaccgcagcccccagagccagaaagtacaaatgtggactgccacagccatgcccagaggagcatctggcctttcgtgtggttagcggcgcagcaaatgttataggaccgaagatatgtctcgaggacaaaatgcttatgtcaagtgtgaaggacaacgtgggccgcggacttaacattgccttggtgaatggggtctctggcgaactcattgaggcccgggcattcgacatgtgggccggggacgtcaatgatctgcttaagtttattcgccctcttcacgaagggaccctcgtgttcgtagcttcttatgacgacccggctactaaaatgaatgaggagacccggaaattgttctctgaattaggttcccggaatgctaaagaactggccttcagggactcttgggtatttgtcggcgcaaagggagtgcagaataagtccccctttgagcaacatgttaagaattctaaacacagtaacaagtatgaaggatggccagaagccttggagatggagggctgtatccccaggagatcaacagcgtcatag

SEQ ID NO: 100884 - DNA, 693 bp, Artificial Sequence
  derived and/or modified sequence
atgagactcgccggaccattgcggattgtggtgcttgtggtgagcgtgggcgttacatggattgtggtgtcaattctgttgggtgggccgggctccgggttcccccggattcagcagctcttcacttctccagaatcctcagtgactgcggcaccccgtgctcgcaagtacaaatgtgggcttccacagccctgcccagaggaacatttagcattccgcgttgttagcggcgccgctaatgtgatcggccccaaaatttgcctcgaagacaagatgctcatgtccagcgtgaaggataacgtaggaagaggactcaacattgctttggtgaatggtgtatcaggtgagttgatagaggcaagagcctttgatatgtgggcaggagacgttaacgatctgcttaaatttattaggccactgcatgaaggcacactggtctttgttgcgagctacgatgacccagcaactaagatgaatgaagaaacgagaaagctgtttagcgaactcgggagcagaaacgccaaagagctggcatttagggactcatgggtttttgttggagccaaaggtgtgcagaacaagtcaccgttcgaacagcacgtgaagaattcaaagcattcaaataaatacgagggatggccggaagcactcgagatggaaggatgtatccctcggcgatccacggcttcatag

SEQ ID NO: 100885 - DNA, 693 bp, Artificial Sequence
  derived and/or modified sequence
atgagattagcaggacctctgaggattgtcgttctcgtagtgtcggtgggtgtcacatggatcgtggtgtcaatcctcctcggcggaccaggaagcggctttccccgaatccagcagctcttcaccagtccagaaagttctgttaccgcggctcccagagcccggaaatacaagtgcggcctgccccagccatgccctgaagaacatctcgcttttagagtggtctctggggcggctaatgtcatcggtcctaagatttgcctggaagacaaaatgttgatgagcagtgttaaagataacgttgggcgaggcctgaacattgctttggttaatggagtgagcggggagctcatagaggcccgggcttttgacatgtgggccggagacgtaaatgaccttctgaaatttatccgcccactacacgaaggtactcttgtattcgtggctagctacgacgaccccgcaaccaagatgaacgaagaaactcgcaagctcttttctgaactcggttcaagaaatgccaaggaacttgccttccgcgattcatgggtctttgtgggggccaaaggtgtacagaataagagcccgtttgagcagcatgttaagaactctaagcattctaataagtacgagggatggcctgaagcactcgaaatggaggggtgtatcccgcgacgttctacggcttcttag

SEQ ID NO: 100886 - DNA, 1800 bp, Artificial Sequence
  derived and/or modified sequence
agccgccattgccgggcctgcctggccaccctgcgcagcggccttgcgtcctctccgggggcggagcgggtcggcgggcctgacagggaacctccctgaccgagcccacgtctccccacggccagagaaatctccggcccggcccgcatcgccagcccccaggcccggaggaacggcccgagcccaggagaaccacatcttcgtcccagccccggaggctcctgtgggcaagatcgtgagccaacgggttcctgaggcccctcctggccaggcagggtttccccgcgcgtttccgaggagccctgcctggccgggcggctggacaaacaggtcgtagcaccgatcgcgcccgcccccagcaggggtcccgcacaggcttgcccctgacccccacccaaacctgtccttccgctttgcccccaaacagtgcacttgccggcggtcccaacccagcaggagaagtggacatgaggttggcaggccctctccgcattgtggtcctagtcgtcagtgtgggtgtcacatggatcgtggtcagcatcctcctgggtgggcctggcagtggctttcctcgcatccagcaactcttcaccagtccagagagctcggtgactgcagcgccacgggccaggaagtacaagtgtggcctgccccagccgtgtcctgaggagcacctggccttccgcgtggtcagcggggccgccaacgtcattgggcccaagatctgcctcgaggacaagatgctgatgagcagcgtcaaggacaacgtgggccgcgggctgaacatcgccctggtgaacggggtcagcggcgagctcatcgaggcccgggcctttgacatgtgggccggagatgtcaacgacctgttgaagtttattcggccactgcacgaaggcaccctggtgttcgtggcatcctacgacgacccagccaccaagatgaatgaagagaccagaaagctcttcagtgagctgggcagcaggaacgccaaggagctggccttccgggacagctgggtgtttgtcggggccaagggtgtgcagaacaagagcccctttgagcagcacgtgaagaacagtaagcacagcaacaagtacgaaggctggcccgaggcgctggagatggaaggctgtatcccgcggagaagcacggccagctagcacggccagtgccaggaccgggccgagggaggccagaccaagggaggcacgcgcgctgccgggcggacagaggctgaggctcacaccccacacccgggcaggagcgctccctggccccaacacatcggggctccgaggcagtgaccagaacgtggtctcaaggtggtgggggctatgggggctgcagggggtagccctgccgcactttgtcacgggagcccagggtacccgcctccttttcgtaacactgttccccccggtcagcccatctagccctgtcctccattcctcacgccatctccatccccatcttgagtcctggaacggccctgggtgcctgcccctcactgtgcaactctgggagcagcccggcaggttggggcgtcttccagaacctctcccttctggagccactctgcactgcgggctaaacatgtttccagtgtgattccttccagtgagccaaacccggtggctgcttcatgagcctgactgcctctcgcctgctctcagcaggaagggacccctggagcaggctggcccggggtggtgaagtagctggagcccgatcacagtcccgcggtttgtcagggggcccaccttctagatgaccccttaataaagtgatggccccacagaa

SEQ ID NO: 100887 - DNA, 693 bp, Artificial Sequence
  derived and/or modified sequence
atgagattggccggtcctcttagaatcgtggtccttgttgtgagcgttggcgtcacttggatcgtggtctcaatcctccttgggggacctggcagtggcttccctagaatccagcaattgttcacatctccggaaagtagtgttacggcagccccccgtgcacgcaaatacaagtgtggcctgccccagccttgccctgaggagcatcttgcattccgagtggttagcggtgccgctaatgtaattggtcctaagatctgcctggaagataaaatgctgatgagtagtgtgaaggacaacgtggggcgtggtttgaatatagctttggtgaatggagtgagtggagaactcatagaagcaagagccttcgatatgtgggcgggagatgtgaacgatctgctcaaatttataaggccactgcatgaggggacattggtcttcgtggcatcctacgatgaccctgcaaccaaaatgaatgaagagaccaggaaacttttcagcgaactcggaagccggaacgctaaggagttagcctttcgtgactcatgggtatttgttggggcaaagggagttcaaaataagtccccatttgagcaacatgtgaagaatagcaaacactcaaataagtatgaaggatggcctgaagccttggagatggagggatgtataccaagacgatccacagccagttag

SEQ ID NO: 100888 - DNA, 693 bp, Artificial Sequence
  derived and/or modified sequence
atgcgtttggctggtccactacgtatagtggttctcgtagttagtgtaggtgttacgtggatcgttgtcagtatcctgcttggtggacccggtagcggattccctcggatccaacagttgttcacctctccagagtcaagcgtgacggcagcgcccagagctagaaaatataaatgtggcctgccacagccttgcccagaagaacatcttgctttcagagtggtttccggagcagctaatgtcatcgggccgaagatttgtttggaggataaaatgctcatgagctcagttaaggacaatgtaggaagaggactcaacattgctttggtgaatggtgtatcaggtgagttgatagaggcaagagcctttgatatgtgggcaggagacgttaacgatctgcttaaatttattaggccactgcatgaaggcacactggtctttgttgcgagctacgatgacccagcaactaagatgaatgaagaaacgagaaagctgtttagcgaactcgggagcagaaacgccaaagagctggcatttagggactcatgggtttttgttggagccaaaggtgtgcagaacaagtcaccgttcgaacagcacgtgaagaattcgaaacactcaaacaagtatgagggctggccagaggctctggaaatggaaggatgcataccaagacgatctaccgctagttag

SEQ ID NO: 100889 - DNA, 693 bp, Artificial Sequence
  derived and/or modified sequence
atgcgcctcgccggccctttgaggattgtggtgctggtcgtaagtgtgggagtcacatggattgtcgtctctattctgttaggagggcccggctctggcttcccaagaatacagcaattgttcacatcccccgagtctagcgtgaccgccgccccccgggcccggaaatataaatgcggcttaccacagccttgtcccgaagagcacctcgcttttagagttgtgagcggcgctgcaaacgtaatcggccccaagatctgccttgaagataaaatgctcatgagttcagtcaaggacaatgtcgggagagggttaaatattgccttggtcaacggagtgagcggcgagctgatcgaggccagggcattcgacatgtgggctggtgatgtgaatgacctattaaaatttattaggccattgcacgaaggtactttggttttcgtcgcttcgtatgacgaccccgcaactaaaatgaatgaggaaaccaggaaattgttctcggagttgggaagccgcaacgctaaagaacttgccttccgagacagttgggtattcgtcggagcaaagggcgtccagaataagtctccatttgagcagcacgtgaagaacagcaaacactctaacaagtatgaagggtggccagaagcactcgaaatggaaggatgtataccacgtagatcaaccgccagctag

SEQ ID NO: 100890 - DNA, 693 bp, Artificial Sequence
  derived and/or modified sequence
atgagactggccggccccctgagaatcgtggtgctggtggtgagcgtgggcgtgacctggatcgtggtgagcatcctgctgggcggccccggcagcggcttccccagaatccagcagctgttcaccagccccgagagcagcgtgaccgccgcccccagagccagaaagtacaagtgcggcctgccccagccctgccccgaggagcacctggccttcagagtggtgagcggcgccgccaacgtgatcggccccaagatctgcctggaggacaagatgctgatgagcagcgtgaaggacaacgtgggcagaggcctgaacatcgccctggtgaacggcgtgagcggcgagctgatcgaggccagagccttcgacatgtgggccggcgacgtgaacgacctgctgaagttcatcagacccctgcacgagggcaccctggtgttcgtggccagctacgacgaccccgccaccaagatgaacgaggagaccagaaagctgttcagcgagctgggcagcagaaacgccaaggagctggccttcagagacagctgggtgttcgtgggcgccaagggcgtgcagaacaagagccccttcgagcagcacgtgaagaacagcaagcacagcaacaagtacgagggctggcccgaggccctggagatggagggctgcatccccagaagaagcaccgccagctag

SEQ ID NO: 100891 - DNA, 693 bp, Artificial Sequence
  derived and/or modified sequence
atgcggctagcaggcccattgagaatagtggttctggtagtgtcggtaggtgtgacttggatcgtcgtgtcaatcctcctaggaggccccggcagtggatttcccaggatccaacagcttttcacttccccagaatcctctgttacagctgcgcccagggcaaggaagtacaaatgtggcttgcctcagccctgtccagaggagcacctcgcctttagggtggtaagtggtgctgccaatgttattgggcccaaaatctgcctagaagacaaaatgcttatgtcgtcggtgaaggacaacgtgggtcggggcctaaatatagccctcgtcaatggcgtatcgggcgagctcattgaggcccgcgctttcgatatgtgggccggggacgtcaatgacctgctgaaatttatacgtcctctgcatgagggcacgctagtgtttgtggcgagctacgacgaccctgccactaaaatgaacgaagagacccggaaactgttcagtgagttaggctctcggaacgcaaaagaattagcctttagagacagctgggtcttcgtcggtgctaagggagtccagaataaatcgccttttgaacaacatgtgaaaaattctaagcattcgaataaatacgaaggctggcctgaggccctggagatggaaggctgtattccacgaagatctacagccagctag

SEQ ID NO: 100892 - DNA, 693 bp, Artificial Sequence
  derived and/or modified sequence
atgagactggccggaccactgaggattgtggtcctagtggtgagcgtgggagtcacatggatagtggtgtcaattcttctgggggggccaggttccgggtttcctaggatccagcaactgtttacctccccggagtcctctgtcactgctgcgccgagggctagaaaatataaatgcgggctgcctcagccctgcccagaggagcaccttgcgtttcgcgttgtgtctggtgccgccaacgtaatcggtcccaaaatttgtcttgaagacaaaatgctaatgagctctgtaaaagacaacgtgggtagaggcctgaacattgccctggtgaacggcgtttctggagaattaatagaagctcgcgcctttgatatgtgggctggagacgtcaatgacctcctgaagttcatacgcccgctacacgagggtactctggtattcgtcgcatcctacgacgaccccgccacgaaaatgaacgaagagacacgtaaattattctcagagctcggaagccggaacgctaaagagcttgcctttagggactcttgggtgttcgttggtgctaagggagtgcagaataaaagcccctttgagcagcacgtgaagaactccaaacacagcaataaatacgaaggctggcccgaagccctcgagatggagggatgtatccctaggcgctccacggcttcctag

SEQ ID NO: 100893 - DNA, 693 bp, Artificial Sequence
  derived and/or modified sequence
atgagattggctggccccctgaggattgtcgtactggtcgtgtccgtcggcgtgacctggattgtcgtgtccatcctgctggggggacccggaagtggatttcctcggatccagcagctctttacttcacctgagagtagtgtgacagccgcccctcgtgcccgcaaatataaatgtgggcttcctcagccatgtcccgaagaacatctggccttcagggtggtttctggagctgccaatgttattgggcccaaaatttgtcttgaagacaagatgctcatgagttctgtgaaggataatgtgggcaggggactgaatattgcactcgttaacggcgtgtcaggagaactgatcgaagccagggctttcgacatgtgggcaggggatgtgaatgatttgctgaaattcattcgccctctgcacgaaggaacattggttttcgtcgccagctacgacgaccccgctacgaagatgaacgaggagacccggaaactgtttagcgagctgggctctagaaatgccaaggaactggcttttcgagactcatgggtatttgtgggagcaaagggcgtgcagaataaatccccgtttgagcagcatgtgaagaactccaagcattctaacaagtacgaagggtggccagaggctcttgaaatggagggatgtattcctcgtcgaagtactgccagttag

SEQ ID NO: 100894 - DNA, 1712 bp, Artificial Sequence
  derived and/or modified sequence
cgccattgccgggcctgcctggccaccctgcgcagcggccttgcgtcctctccgggggcggagcgggtcggcgggcctgacagggaacctccctgaccgagcccacgtctccccacggccagagaaatctccggcccggcccgcatcgccagcccccaggcccggaggaacggcccgagcccaggagaaccacatcttcgtcccagccccggaggctcctgtgggcaagatcgtgagccaacgggttcctgaggcccctcctggccaggcagggtttccccgcgcgtttccgaggagccctgcctggccgggcggctggacaaacagtgcacttgccggcggtcccaacccagcaggagaagtggacatgaggttggcaggccctctccgcattgtggtcctagtcgtcagtgtgggtgtcacatggatcgtggtcagcatcctcctgggtgggcctggcagtggctttcctcgcatccagcaactcttcaccagtccagagagctcggtgactgcagcgccacgggccaggaagtacaagtgtggcctgccccagccgtgtcctgaggagcacctggccttccgcgtggtcagcggggccgccaacgtcattgggcccaagatctgcctcgaggacaagatgctgatgagcagcgtcaaggacaacgtgggccgcgggctgaacatcgccctggtgaacggggtcagcggcgagctcatcgaggcccgggcctttgacatgtgggccggagatgtcaacgacctgttgaagtttattcggccactgcacgaaggcaccctggtgttcgtggcatcctacgacgacccagccaccaagatgaatgaagagaccagaaagctcttcagtgagctgggcagcaggaacgccaaggagctggccttccgggacagctgggtgtttgtcggggccaagggtgtgcagaacaagagcccctttgagcagcacgtgaagaacagtaagcacagcaacaagtacgaaggctggcccgaggcgctggagatggaaggctgtatcccgcggagaagcacggccagctagcacggccagtgccaggaccgggccgagggaggccagaccaagggaggcacgcgcgctgccgggcggacagaggctgaggctcacaccccacacccgggcaggagcgctccctggccccaacacatcggggctccgaggcagtgaccagaacgtggtctcaaggtggtgggggctatgggggctgcagggggtagccctgccgcactttgtcacgggagcccagggtacccgcctccttttcgtaacactgttccccccggtcagcccatctagccctgtcctccattcctcacgccatctccatccccatcttgagtcctggaacggccctgggtgcctgcccctcactgtgcaactctgggagcagcccggcaggttggggcgtcttccagaacctctcccttctggagccactctgcactgcgggctaaacatgtttccagtgtgattccttccagtgagccaaacccggtggctgcttcatgagcctgactgcctctcgcctgctctcagcaggaagggacccctggagcaggctggcccggggtggtgaagtagctggagcccgatcacagtcccgcggtttgtcagggggcccaccttctagatgaccccttaataaagtgatggccccacagaagaaatgccttca

SEQ ID NO: 100895 - DNA, 1521 bp, Artificial Sequence
  derived and/or modified sequence
agagaaatctccggcccggcccgcatcgccagcccccaggcccggaggaacggcccgagcccaggagaaccacatcttcgtcccagccccggaggctcctgtgggcaagatcgtgagccaacgggttcctgaggcccctcctggccagtgcacttgccggcggtcccaacccagcaggagaagtggacatgaggttggcaggccctctccgcattgtggtcctagtcgtcagtgtgggtgtcacatggatcgtggtcagcatcctcctgggtgggcctggcagtggctttcctcgcatccagcaactcttcaccagtccagagagctcggtgactgcagcgccacgggccaggaagtacaagtgtggcctgccccagccgtgtcctgaggagcacctggccttccgcgtggtcagcggggccgccaacgtcattgggcccaagatctgcctcgaggacaagatgctgatgagcagcgtcaaggacaacgtgggccgcgggctgaacatcgccctggtgaacggggtcagcggcgagctcatcgaggcccgggcctttgacatgtgggccggagatgtcaacgacctgttgaagtttattcggccactgcacgaaggcaccctggtgttcgtggcatcctacgacgacccagccaccaagatgaatgaagagaccagaaagctcttcagtgagctgggcagcaggaacgccaaggagctggccttccgggacagctgggtgtttgtcggggccaagggtgtgcagaacaagagcccctttgagcagcacgtgaagaacagtaagcacagcaacaagtacgaaggctggcccgaggcgctggagatggaaggctgtatcccgcggagaagcacggccagctagcacggccagtgccaggaccgggccgagggaggccagaccaagggaggcacgcgcgctgccgggcggacagaggctgaggctcacaccccacacccgggcaggagcgctccctggccccaacacatcggggctccgaggcagtgaccagaacgtggtctcaaggtggtgggggctatgggggctgcagggggtagccctgccgcactttgtcacgggagcccagggtacccgcctccttttcgtaacactgttccccccggtcagcccatctagccctgtcctccattcctcacgccatctccatccccatcttgagtcctggaacggccctgggtgcctgcccctcactgtgcaactctgggagcagcccggcaggttggggcgtcttccagaacctctcccttctggagccactctgcactgcgggctaaacatgtttccagtgtgattccttccagtgagccaaacccggtggctgcttcatgagcctgactgcctctcgcctgctctcagcaggaagggacccctggagcaggctggcccggggtggtgaagtagctggagcccgatcacagtcccgcggtttgtcagggggcccaccttctagatgaccccttaataaagtgatggccccacagaa

SEQ ID NO: 100896 - DNA, 693 bp, Artificial Sequence
  derived and/or modified sequence
atgaggctggccggccccctgagaattgtggtgctggtggtgtctgtgggcgtgacctggatcgtggtgtccatcctgctgggcggccctggcagcggcttcccccgcatccagcagctgttcaccagccctgagagctctgtgacagctgccccccgggccaggaagtacaagtgtggcctgccccagccctgcccagaggagcacctggccttccgggtggtgtctggggccgccaacgtcatcggccccaagatctgcctggaggacaagatgctgatgagctctgtgaaggacaacgtgggccggggcctgaacatcgccctggtgaatggagtgtctggagagctgattgaggcccgggcctttgacatgtgggccggagatgtgaatgacctgctgaagttcatccggcccctgcacgagggcaccctggtgtttgtggccagctatgatgatcctgccaccaagatgaatgaggagaccaggaagctgttcagcgagctgggcagcagaaatgccaaggagctggccttccgggacagctgggtgtttgtgggcgccaagggcgtgcagaacaagagcccctttgagcagcacgtgaagaacagcaagcacagcaacaagtatgagggctggccagaggccctggagatggagggctgcatccccaggaggagcacagccagctag

SEQ ID NO: 100897 - DNA, 693 bp, Artificial Sequence
  derived and/or modified sequence
atgcggctggccggccccctgcggatcgtggtgctggtggtgagcgtaggagttacgtggattgtggtcagcattttgctgggaggtccagggtccgggtttcctaggatacagcagttgttcacttcaccggaaagctctgtgaccgccgccccacgtgcccgcaagtataagtgtggattacctcaaccttgtccagaagaacacctggcatttcgcgtggtaagtggggccgcaaacgtcattggccccaaaatctgcctggaggataaaatgttaatgtccagtgtgaaggacaacgtaggaaggggattaaacattgccttagtcaacggggttagcggagaacttattgaggcccgtgcattcgatatgtgggcaggcgatgttaacgatttgctgaaattcataaggccacttcatgaaggaaccttagtgttcgtggccagctatgatgaccccgcaaccaagatgaatgaagagacacggaagctgttctctgagctggggagtcggaatgccaaggagttggcctttcgtgactcctgggtgttcgtcggcgccaaaggagtgcagaataaaagcccctttgagcagcacgtgaagaatagcaagcacagcaacaagtacgaaggctggcccgaggctcttgagatggagggctgtataccccggcgatctaccgcttcatag

SEQ ID NO: 100898 - DNA, 693 bp, Artificial Sequence
  derived and/or modified sequence
atgcggctggccggccccctgcggatcgtggtgctggtggtgagcgtcggcgtgacatggattgtggtaagcatactcctgggagggcctgggagtggattccccagaatccagcagctgttcacctctcctgagtccagcgtgaccgcggccccgcgtgcacggaagtataaatgcgggctgccccagccgtgtcccgaggagcacctcgccttccgggtggtatccggggcagcaaacgttatcgggcccaagatttgtttagaagacaagatgttgatgtcctcagttaaggacaacgtcggtagagggctcaatattgccctcgtgaacggggttagcggggagctgattgaggcaagggcgtttgacatgtgggctggagatgttaacgacttactgaagtttatccgacctttgcacgaggggacattggtattcgtcgcctcgtatgatgaccccgcaaccaaaatgaatgaggagactcgcaaacttttttcagagctcgggtcaagaaacgccaaggaattggccttccgcgacagctgggtgtttgttggggctaaaggggtgcagaacaagagtcctttcgagcagcatgtgaaaaatagcaaacacagtaataaatacgaggggtggcccgaagccctagaaatggaaggctgcattcctaggaggtctactgctagctag

SEQ ID NO: 100899 - DNA, 693 bp, Artificial Sequence
  derived and/or modified sequence
atgcggctggccggccccctgcggatcgtggtgctggtggtgagcgtgggcgtgacttggattgtggtatcaattctacttgggggtccagggtccggatttccacgaatccagcaactgtttactagccctgaatcatccgtgactgctgcgccacgagctagaaagtacaaatgtggcctgcctcagccgtgccccgaagaacatttggcttttagagtcgtgagcggtgctgccaacgtcatcggccccaagatttgcttggaggataaaatgctgatgtcaagcgttaaagacaatgtgggccggggtttgaatatcgccctcgtgaacggcgtgagtggcgaactgatagaggcccgagccttcgacatgtgggccggggacgtcaatgatctgctgaaattcatccggccccttcacgagggcaccctggtgtttgtcgccagctacgatgatcctgctaccaaaatgaacgaagaaacgcggaagctgttttccgagctgggatcccggaatgctaaggaactggcgtttcgtgattcttgggtgtttgtgggcgccaagggcgtgcagaataagtccccattcgagcaacacgtcaaaaactctaagcactctaacaaatacgaagggtggccggaggctctggagatggaaggctgcattcctcggagaagcacagcgtcctag

SEQ ID NO: 100900 - DNA, 693 bp, Artificial Sequence
  derived and/or modified sequence
atgaggttggcgggtcctttacggatcgtagttctggttgtcagcgtaggcgtgacctggatagtcgtctccattctcctgggaggaccaggttcagggttcccccgtatccaacagctatttaccagtcctgagagtagtgttaccgcggcccctagagcccgaaaatataaatgcggtttgccccaaccctgccctgaggagcatttagcgtttagggtcgtttccggcgcagctaatgtgattgggccaaagatctgcctggaggacaagatgctcatgagctctgtgaaagataacgtcggacggggcctgaacattgccctggtgaatggggtgagcggcgaattgatcgaggccagagcattcgacatgtgggcaggggacgttaacgacctgttaaagttcatcaggccgctgcatgagggcaccctcgtgtttgttgcttcctacgacgacccagctacaaagatgaatgaagaaactcgtaagctgttctcagagctgggctccagaaacgctaaggagctggcgtttcgggactcgtgggtattcgtgggggctaagggtgtccagaacaagtcaccctttgagcaacacgtcaaaaactctaaacatagtaataagtacgaaggttggcctgaggctcttgagatggaggggtgtattccccggaggagtacagcttcatag

SEQ ID NO: 100901 - DNA, 693 bp, Artificial Sequence
  derived and/or modified sequence
atgcggctggccggccccctgcggatcgtggtgctggtggtgagcgtgggggtcacctggatcgtcgtttccatcctgcttggggggcctggtagcggcttccccagaatccaacagctattcacaagccccgagagctcagtgacggcagcacccagggctcgcaagtacaagtgcgggctaccgcagccgtgccccgaagagcacctggcctttcgcgtggtctcaggagcagccaatgtcattggacccaaaatttgcctagaagacaagatgctcatgagctctgtaaaagataatgtcgggagaggcttgaatattgctttggtgaatggggtaagtggcgagctcattgaagcccgggcattcgacatgtgggctggggacgttaatgaccttttgaagttcatccgtcccctgcatgaaggcactcttgtgttcgtggcttcgtacgatgatcctgctaccaaaatgaacgaagaaaccaggaaactgttctccgaactcgggtcgcgtaacgcgaaggagttagcgttccgggacagctgggttttcgtgggagcaaagggtgtgcaaaataaatctcctttcgagcaacatgtaaagaattccaagcattcgaacaagtatgagggatggccggaggcgctggagatggagggctgcatcccgcggcgatccactgctagttag

SEQ ID NO: 100902 - DNA, 693 bp, Artificial Sequence
  derived and/or modified sequence
atgcggctcgcagggccactgcgaatcgttgtgctggtggtctcagtgggcgtgacatggatcgtcgtgagtatccttctaggtgggcctggatcagggttccccaggatacagcagctgtttactagccctgaatcatctgtgaccgcagccccacgcgctagaaagtacaaatgcggactgcctcagccgtgcccagaagaacaccttgcattcagagtcgtcagcggcgctgccaatgtgatcggcccaaaaatctgcttggaagacaagatgttaatgtcaagcgttaaagataacgtcggccgtggactcaatattgctcttgtcaacggtgtttcaggagaactgattgaggcccgagcattcgatatgtgggctggggacgtgaacgaccttttgaaattcatcaggcccctgcatgagggcacgttggtctttgtggctagttatgacgatccagcaacaaagatgaatgaagagacacgaaagttgttttccgaacttggcagtagaaacgctaaggagctggccttcagggactcttgggttttcgttggcgctaagggcgtgcagaataagagtccctttgagcagcacgtaaaaaactccaagcactccaataagtacgaaggatggcctgaggctctcgaaatggaaggttgcatcccaagaagatccacagcttcctag

SEQ ID NO: 100903 - DNA, 2955 bp, Artificial Sequence
  derived and/or modified sequence
cttagccgccattgccgggcctgcctggccaccctgcgcagcggccttgcgtcctctcccggggcggagcgggtcggcgggcctgacagggaacctccctgaccgagcccacgtctccccacggccagagaaatctccggcccggcccgcatcgccagcccccaggcccggaggaacggcccgagcccaggagaaccacatcttcgtcccagccccggaggctcctgtgggcaagatcgtgagccaacgggttcctgaggcccctcctggccaggcagggtttccccgcgcgtttccgaggagccctgcctggccgggcggctggacaaacaggtcgtagcaccgatcgcgcccgcccccagcaggggtcccgcacaggcttgcccctgacccccacccaaacctgtccttccgctttgcccccaaacagtgcacttgccggcggtcccaacccagcaggagaagtggacatgaggttggcaggccctctccgcattgtggtcctagtcgtcagtgtgggtgtcacatggatcgtggtcagcatcctcctgggtgggcctggcagtggctttcctcgcatccagcaactcttcaccagtccagagagctcggtgactgcagcgccacgggccaggaagtacaagtgtggcctgccccagccgtgtcctgaggagcacctggccttccgcgtggtcagcggggccgccaacgtcattgggcccaagatctgcctcgaggacaagatgctgatgagcagcgtcaaggacaacgtgggccgcgggctgaacatcgccctggtgaacggggtcagcggcgagctcatcgaggcccgggcctttgacatgtgggccggagatgtcaacgacctgttgaagtttattcggccactgcacgaaggcaccctggtgttcgtggcatcctacgacgacccagccaccaagatgaatgaagagaccagaaagctcttcagtgagctgggcagcaggaacgccaaggagctggccttccgggacagctgggtgtttgtcggggccaagggtgtgcagaacaagagcccctttgagcagcacgtgaagaacagtaagcacagcaacaagtacgaaggctggcccgaggcgctggagatggaaggctgtatcccgcggagaagcacggccagctagcacggccagtgccaggaccgggccgagggaggccagaccaagggaggcacgcgcgctgccgggcggacagaggctgaggctcacaccccacacccgggcaggagcgctccctggccccaacacatcggggctccgaggcagtgaccagaacgtggtctcaaggtggtgggggctatgggggctgcagggggtagccctgccgcactttgtcacgggagcccagggtacccgcctccttttcgtaacactgttccccccggtcagcccatctagccctgtcctccattcctcacgccatctccatccccatcttgagtcctggaacggccctgggtgcctgcccctcactgtgcatctctgggagcagcccggcaggttggggcgtcttccagaacctctcccttctggagccactctgcactgcgggctaaacatgtttccagtgtgattccttccagtgagccaaacccggtggctgcttcatgagcctgactgcctctcgcctgctctcagcaggaagggacccctggagcaggctggcccggggtggtgaagtagctggagcccgatcacagtcccgcggtttgtcagggggcccaccttctagatgaccccttaataaagtgatggccccacagaagaaatgccttcagatgctgttgtcagtgcggagtcagaggtggcggtgtcctctggggtgcgggaggacagattccagagtcttaaccaacctgctcccacagcccgagcagacagccttttgtctccagggctcctgccaccaacaggccccgctgcgactgagatgtgactcaagcagtcaacagagcagtgggactcttttcgtctggcagagaagattgcacactcgggctgcaggaagctgactcaacaactccctctgacccagtgcaggcctgtacggacagggacagggattgggattaacaccagcccaggcccccaccacaccccatcatcatccaggagcacatgtcgcccacagacttcggctgcctttgaagtcagggttgtgaggggtcgagtcacttgggctttttgcgtctctcccaggttacggttaatacctccctttgctaagcgagagccagcaaattagaagcaattttgctggaatatcaactccagaggcccagaagcagtctgagttcagcgaaaggagagaaggcagttcctagatgggaggcactgtggtgtccttcatggggcgacgttaggggcgatggacttaggagccaatcccaggaagagtacagagcgcagacagagcctcagaagacaaaagtgcttctggagcaggcacatgtggggttggaggcacaggggtgccctggaggagcggctcaccagggaggaaacgatggtgatgccagtcctgcctctgcaccaggaactttctacgtgtattccattccttttttgtttttgtaaactttccttcttagagccattttaggttcacagcaaaactgagtgaaaaggtcagagttcctgtgtgccccctgccagcccccagcttcccatctgttgctgtcaatgaaccagtatcggtgctcacatgaggcttcagtttgctgttggacgttcagtgggtttggacaaaaatgtgtaatgatggatccactgcaggatcatacacacttcactctttagacttgctatggaaaattgcaaacatctccaggagacagactagcatacaatcggcccttcatatccatgggggttccatgtccacagattcaaccaaccacagattggaaatacttgg

SEQ ID NO: 100904 - RNA, 693 nt, Artificial Sequence
  derived and/or modified sequence
augcgcuuggcuggcccccuaagaaucgugguuuugguggugucugucggggugacauggaucguggugucaauucuccucggaggcccugggucaggauuuccucgaauucaacaacuauucaccucccccgaaucauccgucaccgcagcccccagagccagaaaguacaaauguggacugccacagccaugcccagaggagcaucuggccuuucgugugguuagcggcgcagcaaauguuauaggaccgaagauaugucucgaggacaaaaugcuuaugucaagugugaaggacaacgugggccgcggacuuaacauugccuuggugaauggggucucuggcgaacucauugaggcccgggcauucgacaugugggccggggacgucaaugaucugcuuaaguuuauucgcccucuucacgaagggacccucguguucguagcuucuuaugacgacccggcuacuaaaaugaaugaggagacccggaaauuguucucugaauuagguucccggaaugcuaaagaacuggccuucagggacucuuggguauuugucggcgcaaagggagugcagaauaagucccccuuugagcaacauguuaagaauucuaaacacaguaacaaguaugaaggauggccagaagccuuggagauggagggcuguauccccaggagaucaacagcgucauag

SEQ ID NO: 100905 - RNA, 693 nt, Artificial Sequence
  derived and/or modified sequence
augagacucgccggaccauugcggauuguggugcuuguggugagcgugggcguuacauggauuguggugucaauucuguugggugggccgggcuccggguucccccggauucagcagcucuucacuucuccagaauccucagugacugcggcaccccgugcucgcaaguacaaaugugggcuuccacagcccugcccagaggaacauuuagcauuccgcguuguuagcggcgccgcuaaugugaucggccccaaaauuugccucgaagacaagaugcucauguccagcgugaaggauaacguaggaagaggacucaacauugcuuuggugaaugguguaucaggugaguugauagaggcaagagccuuugauaugugggcaggagacguuaacgaucugcuuaaauuuauuaggccacugcaugaaggcacacuggucuuuguugcgagcuacgaugacccagcaacuaagaugaaugaagaaacgagaaagcuguuuagcgaacucgggagcagaaacgccaaagagcuggcauuuagggacucauggguuuuuguuggagccaaaggugugcagaacaagucaccguucgaacagcacgugaagaauucaaagcauucaaauaaauacgagggauggccggaagcacucgagauggaaggauguaucccucggcgauccacggcuucauag

SEQ ID NO: 100906 - RNA, 693 nt, Artificial Sequence
  derived and/or modified sequence
augagauuagcaggaccucugaggauugucguucucguagugucggugggugucacauggaucguggugucaauccuccucggcggaccaggaagcggcuuuccccgaauccagcagcucuucaccaguccagaaaguucuguuaccgcggcucccagagcccggaaauacaagugcggccugccccagccaugcccugaagaacaucucgcuuuuagaguggucucuggggcggcuaaugucaucgguccuaagauuugccuggaagacaaaauguugaugagcaguguuaaagauaacguugggcgaggccugaacauugcuuugguuaauggagugagcggggagcucauagaggcccgggcuuuugacaugugggccggagacguaaaugaccuucugaaauuuauccgcccacuacacgaagguacucuuguauucguggcuagcuacgacgaccccgcaaccaagaugaacgaagaaacucgcaagcucuuuucugaacucgguucaagaaaugccaaggaacuugccuuccgcgauucaugggucuuugugggggccaaagguguacagaauaagagcccguuugagcagcauguuaagaacucuaagcauucuaauaaguacgagggauggccugaagcacucgaaauggagggguguaucccgcgacguucuacggcuucuuag

SEQ ID NO: 100907 - RNA, 693 nt, Artificial Sequence
  derived and/or modified sequence
augagauuggccgguccucuuagaaucgugguccuuguugugagcguuggcgucacuuggaucguggucucaauccuccuugggggaccuggcaguggcuucccuagaauccagcaauuguucacaucuccggaaaguaguguuacggcagccccccgugcacgcaaauacaaguguggccugccccagccuugcccugaggagcaucuugcauuccgagugguuagcggugccgcuaauguaauugguccuaagaucugccuggaagauaaaaugcugaugaguagugugaaggacaacguggggcgugguuugaauauagcuuuggugaauggagugaguggagaacucauagaagcaagagccuucgauaugugggcgggagaugugaacgaucugcucaaauuuauaaggccacugcaugaggggacauuggucuucguggcauccuacgaugacccugcaaccaaaaugaaugaagagaccaggaaacuuuucagcgaacucggaagccggaacgcuaaggaguuagccuuucgugacucauggguauuuguuggggcaaagggaguucaaaauaaguccccauuugagcaacaugugaagaauagcaaacacucaaauaaguaugaaggauggccugaagccuuggagauggagggauguauaccaagacgauccacagccaguuag

SEQ ID NO: 100908 - RNA, 693 nt, Artificial Sequence
  derived and/or modified sequence
augcguuuggcugguccacuacguauagugguucucguaguuaguguagguguuacguggaucguugucaguauccugcuugguggacccgguagcggauucccucggauccaacaguuguucaccucuccagagucaagcgugacggcagcgcccagagcuagaaaauauaaauguggccugccacagccuugcccagaagaacaucuugcuuucagagugguuuccggagcagcuaaugucaucgggccgaagauuuguuuggaggauaaaaugcucaugagcucaguuaaggacaauguaggaagaggacucaacauugcuuuggugaaugguguaucaggugaguugauagaggcaagagccuuugauaugugggcaggagacguuaacgaucugcuuaaauuuauuaggccacugcaugaaggcacacuggucuuuguugcgagcuacgaugacccagcaacuaagaugaaugaagaaacgagaaagcuguuuagcgaacucgggagcagaaacgccaaagagcuggcauuuagggacucauggguuuuuguuggagccaaaggugugcagaacaagucaccguucgaacagcacgugaagaauucgaaacacucaaacaaguaugagggcuggccagaggcucuggaaauggaaggaugcauaccaagacgaucuaccgcuaguuag

SEQ ID NO: 100909 - RNA, 693 nt, Artificial Sequence
  derived and/or modified sequence
augcgccucgccggcccuuugaggauuguggugcuggucguaagugugggagucacauggauugucgucucuauucuguuaggagggcccggcucuggcuucccaagaauacagcaauuguucacaucccccgagucuagcgugaccgccgccccccgggcccggaaauauaaaugcggcuuaccacagccuugucccgaagagcaccucgcuuuuagaguugugagcggcgcugcaaacguaaucggccccaagaucugccuugaagauaaaaugcucaugaguucagucaaggacaaugucgggagaggguuaaauauugccuuggucaacggagugagcggcgagcugaucgaggccagggcauucgacaugugggcuggugaugugaaugaccuauuaaaauuuauuaggccauugcacgaagguacuuugguuuucgucgcuucguaugacgaccccgcaacuaaaaugaaugaggaaaccaggaaauuguucucggaguugggaagccgcaacgcuaaagaacuugccuuccgagacaguuggguauucgucggagcaaagggcguccagaauaagucuccauuugagcagcacgugaagaacagcaaacacucuaacaaguaugaaggguggccagaagcacucgaaauggaaggauguauaccacguagaucaaccgccagcuag

SEQ ID NO: 100910 - protein, 159 aa, Artificial Sequence
  derived and/or modified sequence
MIPPQEASARRREIEDKLKQEEETLSFIRDSLEKSDQLTKNMVSILSSFESRLMKLENSIIPVHKQTENLQRLQENVEKTLSCLDHVISYYHVASDTEKIIREGPTGRLEEYLGSMAKIQKAVEYFQDNSPDSPELNKVVRGPQNNVRSLGISVSALVS

SEQ ID NO: 100911 - DNA, 480 bp, Artificial Sequence
  derived and/or modified sequence
atgatccccccccaggaggccagcgccagaagaagagagatcgaggacaagctgaagcaggaggaggagaccctgagcttcatcagagacagcctggagaagagcgaccagctgaccaagaacatggtgagcatcctgagcagcttcgagagcagactgatgaagctggagaacagcatcatccccgtgcacaagcagaccgagaacctgcagagactgcaggagaacgtggagaagaccctgagctgcctggaccacgtgatcagctactaccacgtggccagcgacaccgagaagatcatcagagagggccccaccggcagactggaggagtacctgggcagcatggccaagatccagaaggccgtggagtacttccaggacaacagccccgacagccccgagctgaacaaggtggtgagaggcccccagaacaacgtgagaagcctgggcatcagcgtgagcgccctggtgagctag

SEQ ID NO: 100912 - DNA, 480 bp, Artificial Sequence
  derived and/or modified sequence
atgattccaccacaggaggcatcagctcgtaggcgagagatcgaggataagctcaaacaagaggaggaaactctgagtttcattcgagattctctggagaagagtgatcagctgacaaaaaatatggtctctattctcagctcattcgagtctaggctgatgaagctggagaactcaatcattcccgtacataagcaaaccgaaaacctgcagcgtctccaggaaaacgtggaaaaaactctttcctgtttagatcatgtcattagctattaccatgtagctagcgatacagagaagattattcgggaggggccaactggccgactcgaggaatacctgggttctatggccaaaatccagaaggctgtggaatacttccaggataatagtccagacagtccagaactaaataaagtcgtgcgggggccgcagaataacgtccgatctcttgggatctccgtctctgccctcgtgtcctag

SEQ ID NO: 100913 - DNA, 480 bp, Artificial Sequence
  derived and/or modified sequence
atgatccccccccaggaggccagcgccaggagaagagaaattgaggacaagctgaagcaggaggaggagaccctgtccttcatccgggacagcctggagaagagtgaccagctgaccaagaacatggtgtccatcctgagcagctttgagagccggctgatgaagctggagaacagcatcatccctgtgcacaagcagacagagaacctgcagaggctgcaggagaatgtggagaagaccctgagctgcctggaccacgtgatctcctactaccacgtggccagtgacacagagaagatcatccgggagggccccaccggccgcctggaggagtacctgggctccatggccaagatccagaaggctgtggagtacttccaggacaacagcccagacagccctgagctgaacaaggtggtgcggggcccccagaacaacgtgcgcagcctgggcatctctgtgtctgccctggtgtcctag

SEQ ID NO: 100914 - DNA, 480 bp, Artificial Sequence
  derived and/or modified sequence
atgatccccccccaggaggccagcgcccggcggcgggagatcgaggacaagctgaagcaggaagaagaaaccctgagctttatcagagactcactcgaaaaatcagaccagctgacaaaaaatatggtgtctatactgagcagtttcgaatcccggctaatgaaactggagaatagtatcataccagtgcacaagcagactgagaatcttcaaagactgcaagagaacgttgagaaaacactgtcatgcctggaccacgtgatcagctactatcacgtggcttccgacaccgagaaaattatccgcgaggggcccacaggtcgtctggaggaatatctggggtccatggccaagatacagaaggcggttgagtacttccaagacaacagccctgattccccggagctaaataaggtcgtgaggggcccccagaataatgtgcggagcttgggaattagtgtatcggctctcgtgtcatag

SEQ ID NO: 100915 - DNA, 718 bp, Artificial Sequence
  derived and/or modified sequence
gaggaaagatactggggagtgggagccgcggggttcagagcgatgattcccccacaggaggcatccgctcgacggcgggagattgaggacaagctgaagcaggaggaggagactctgtccttcatccgagacagcctggagaagagcgaccagctcactaagaacatggtgtctatcttatcatcctttgagagccgccttatgaagctggagaactccatcatccctgtgcacaagcagacggagaatctgcagcggctgcaggagaatgttgagaagacgctgtcctgcctggaccatgtcatcagctactaccatgtggccagtgacactgagaagatcatcagagagggccccacaggtaggctggaagagtacctgggaagcatggccaagattcagaaggcagtggagtatttccaggacaacagcccagacagcccggaactcaacaaagtggtaaggggtccgcagaataacgtgagaagcttggggatatcagtctctgccctggtctcatgagggacatggagccagcttgaggatgtatgcagtagaatacacagaaggatatagcacagtacatcctataggcattaggatctctgcttcaagaattgcacattttttattattaaaaattctttattataaaacttgttaatgtattataaaaattaaattataaattacatataaaatataaacttaacatttg

SEQ ID NO: 100916 - DNA, 480 bp, Artificial Sequence
  derived and/or modified sequence
atgataccaccacaggaggctagtgcccgtcgtcgggaaatagaggacaagctgaagcaggaggaggaaaccctctcgtttattcgcgattcgctggaaaaatctgaccaactcaccaagaatatggtgagcatcctgtccagtttcgaatctagactaatgaagctggagaactctatcattcctgtacacaaacagacagagaacttacaacggctccaggaaaatgtggaaaagacgctctcgtgtttagatcacgtcatttcctactaccatgtggcttctgatacggagaaaattatccgagaagggcctacgggtagactcgaagagtatctcggaagcatggcaaagattcaaaaagccgtggagtattttcaggacaattcccctgactctcctgaactcaacaaggtggtccgtggaccacagaataacgtgcgctccttgggcatctctgtctccgctctggtgagctag

SEQ ID NO: 100917 - protein, 330 aa, Artificial Sequence
  derived and/or modified sequence
MRFRLCHQRGCCPHERENTCTCKMIISSLQVIAADCKRVTVLKYFLEALCGQEEPLLAFKGGKYVSVAPVPDTMGKEMGSQEGTRLEDEEEDVVIEDFEEDSEAEGSGGEDDIRELRAKKLALARKIAEQQRRQEKIQAVLEDHSQMRQMELEIRPLFLVPDTNGFIDHLASLARLLESRKYILVVPLIVINELDGLAKGQETDHRAGGYARVVQEKARKSIEFLEQRFESRDSCLRALTSRGNELESIAFRSEDITGQLGNNDDLILSCCLHYCKDKAKDFMPASKEEPIRLLREVVLLTDDRNLRVKALTRNVPVRDIPAFLTWAQVG

SEQ ID NO: 100918 - DNA, 993 bp, Artificial Sequence
  derived and/or modified sequence
atgagattcagactgtgccaccagagaggctgctgcccccacgagagagagaacacctgcacctgcaagatgatcatcagcagcctgcaggtgatcgccgccgactgcaagagagtgaccgtgctgaagtacttcctggaggccctgtgcggccaggaggagcccctgctggccttcaagggcggcaagtacgtgagcgtggcccccgtgcccgacaccatgggcaaggagatgggcagccaggagggcaccagactggaggacgaggaggaggacgtggtgatcgaggacttcgaggaggacagcgaggccgagggcagcggcggcgaggacgacatcagagagctgagagccaagaagctggccctggccagaaagatcgccgagcagcagagaagacaggagaagatccaggccgtgctggaggaccacagccagatgagacagatggagctggagatcagacccctgttcctggtgcccgacaccaacggcttcatcgaccacctggccagcctggccagactgctggagagcagaaagtacatcctggtggtgcccctgatcgtgatcaacgagctggacggcctggccaagggccaggagaccgaccacagagccggcggctacgccagagtggtgcaggagaaggccagaaagagcatcgagttcctggagcagagattcgagagcagagacagctgcctgagagccctgaccagcagaggcaacgagctggagagcatcgccttcagaagcgaggacatcaccggccagctgggcaacaacgacgacctgatcctgagctgctgcctgcactactgcaaggacaaggccaaggacttcatgcccgccagcaaggaggagcccatcagactgctgagagaggtggtgctgctgaccgacgacagaaacctgagagtgaaggccctgaccagaaacgtgcccgtgagagacatccccgccttcctgacctgggcccaggtgggctag

SEQ ID NO: 100919 - DNA, 993 bp, Artificial Sequence
  derived and/or modified sequence
atgagatttagactctgccatcagaggggatgttgcccacacgaacgcgaaaatacctgcacatgcaaaatgataattagctccctccaggtgatcgccgcagactgcaaacgagtgactgtcctgaaatattttctggaagccctttgcggtcaggaggagcctctcctggcctttaaggggggtaaatacgtgtccgtggctcccgtgcccgataccatggggaaagagatgggctctcaggaaggcacgcgacttgaagacgaagaggaagacgttgtaattgaggatttcgaagaagactccgaagctgaagggtcgggtggggaggacgatattagggagctgcgcgctaaaaagctggctttggcgaggaaaatcgccgagcagcagaggagacaggagaaaatccaagcagtgctggaagatcactctcagatgcgccaaatggagctggaaatcagaccgctgtttttggtgcctgacacaaacggtttcattgaccatttggcatcactggcgcgattgttggagtcacgaaagtatattcttgtagtcccgctgatcgtgatcaatgaattagacggactggccaaaggtcaggaaaccgaccaccgggcaggaggctacgcgagagtggtgcaggagaaggctaggaagtccattgaattcctggaacagcgcttcgagagcagagattcatgcctgagggctcttacctcccgcggaaacgagttagaatcaatagcattccgctccgaagacatcacaggccagctgggaaacaatgacgatctgatcttatcctgttgccttcattattgtaaggacaaagcaaaggacttcatgcccgcaagcaaggaggagcccattcgactgctccgcgaagttgtgctcttaaccgacgacaggaatctgcgggtgaaggccctcaccagaaatgtgcctgtaagggacataccagcattccttacatgggctcaggtcgggtag

SEQ ID NO: 100920 - DNA, 993 bp, Artificial Sequence
  derived and/or modified sequence
atgaggttccggctgtgccaccagaggggctgctgcccccatgaaagagagaacacctgcacctgcaagatgatcatcagcagcctgcaggtgattgctgctgactgcaagagggtgacagtgctgaagtacttcctggaggccctgtgtggccaggaggagcccctgctggccttcaagggcggcaagtatgtgtctgtggcccctgtgcctgacaccatgggcaaggagatgggcagccaggagggcacccggctggaggatgaggaggaggatgtggtgattgaggactttgaggaggacagcgaggccgagggcagcggcggggaggatgacatccgggagctgcgggccaagaagctggccctggccaggaagattgctgagcagcagaggcggcaggagaagatccaggccgtgctggaggaccacagccagatgaggcagatggagctggagatccggcccctcttcctggtgcctgacaccaacggcttcatcgaccacctggccagcctggcccggctgctggagagcaggaagtacatcctggtggtgcccctgattgtcatcaatgagctggatggcctggccaagggccaggagacagaccacagagctgggggctacgcccgggtggtgcaggagaaggccaggaagagcattgagttcctggagcagagatttgagagccgggacagctgcctgcgggccctgaccagcagaggaaatgagctggagagcatcgccttccgctctgaggacatcaccggccagctgggcaacaatgatgacctgatcctgagctgctgcctgcactactgcaaggacaaggccaaggacttcatgcctgccagcaaggaggagcccatccggctgctgcgggaggtggtgctgctgacagatgacaggaacctgcgggtgaaggccctgaccagaaatgtgcctgtgcgggacatcccagccttcctgacctgggcccaggtgggctag

SEQ ID NO: 100921 - DNA, 993 bp, Artificial Sequence
  derived and/or modified sequence
atgcggttccggctgtgccaccagcggggctgctgcccccacgagcgagagaacacctgtacatgcaagatgattatcagttctcttcaggttatagctgcggattgcaagcgcgtaacggtgcttaagtatttcctggaggctctgtgtggacaggaggagccactgttagctttcaagggggggaaatacgtgtcagtggccccagtccctgatactatggggaaggagatgggttctcaagagggcactcgtttggaggacgaggaggaagacgtggtgatcgaggacttcgaagaggacagcgaggccgagggctctggaggagaggatgacatccgggaattaagggcaaaaaagctggcgttggcccgcaagattgccgaacagcagcggagacaggaaaaaatccaggcagtcctggaggatcatagtcaaatgcggcaaatggagttagaaatcaggcccctcttcttggtacctgacacaaatggcttcattgaccacctggctagcctggcccggctactggaatcccgaaaatatatcctggtcgtgcccctgattgtcatcaacgagttggacggtctggccaaaggacaggagacagaccaccgcgccgggggatacgccagggtggtgcaagagaaggcccgcaagtccattgagttcctggaacagcgcttcgaatcacgagactcctgtctccgcgcgctgacttctcgaggcaatgaactcgagtccatagcctttaggtcggaggacattactggtcaactcggtaataacgatgatctaatcctctcctgttgccttcactactgtaaagataaggccaaggactttatgcctgcttccaaagaagaaccaattagactcttgcgcgaggtcgtgctgctgacagacgaccggaatcttcgcgtgaaggcattgacacggaatgtgcctgttcgtgatatcccagctttcctgacgtgggcccaggtgggctag

SEQ ID NO: 100922 - DNA, 993 bp, Artificial Sequence
  derived and/or modified sequence
atgaggtttcgtctttgccatcagcgcggatgttgcccccatgagagggagaacacatgtacttgcaagatgataatttcatcattgcaggtcatcgccgctgactgcaaaagagtaaccgtgctgaaatactttctagaggctttgtgtggccaggaagagccgcttctggcgttcaaaggcggaaaatacgtttcagtagcaccggtgcctgacacaatgggcaaggagatgggttcgcaggaaggaacacgtctagaagacgaggaggaggacgtcgtgattgaagactttgaggaggactcagaagctgagggatcagggggtgaggatgacatcagagagctgcgcgcaaagaagctcgcactcgcacgcaagattgcagaacagcagagacgccaggagaagatccaggctgtgctggaagaccactcccaaatgcgacaaatggaactggagattagacccctattccttgtgccagacacgaacggcttcatcgaccacttggcctccctggccagattgctagaaagtcggaagtacatcctggtcgtgccacttatagtcattaacgaactcgatggactggcaaaaggtcaggagaccgatcatagggccggaggttatgccagagtggttcaagagaaggcacgcaaatccatcgagtttttagagcagcggtttgagtcgagggacagctgtctgcgcgctctcaccagcaggggaaacgaattggagtcaattgcatttcggagtgaagacattacaggacagcttggaaacaatgacgacctgattctttcttgttgtctccattattgtaaggataaggccaaagacttcatgccggcaagcaaagaggagcccatccggttgttaagggaagtggtgcttctgaccgatgatcgtaacttgagggtgaaagctctgaccaggaatgttccggtccgcgacattccagcattcctgacgtgggcccaggtcggatag

SEQ ID NO: 100923 - DNA, 2646 bp, Artificial Sequence
  derived and/or modified sequence
atgagatttaggctttgccaccagaggggttgctgtccacatgagagagagaacacctgcacctgtaaaatgatcatcagtagtctccaggttattgcagctgactgcaaaagggtcacagtgctgaagtattttctggaagccctttgtggacaagaagagcctctgctggcattcaagggtggaaagtatgtgtcagtggcacccgtcccagacaccatgggaaaggaaatgggaagccaagagggaacacgactggaagatgaggaggaggatgtggtgattgaagactttgaggaagattcagaggctgaaggcagcggaggcgaggatgacatcagggagcttcgggccaagaagctggctctggccaggaagatagctgagcagcagcgtcgccaggaaaagatccaggctgtcctggaggaccacagtcagatgaggcagatggagctcgaaatcagacctttgttcctcgtaccagacaccaacggcttcattgaccacctggccagtctggcgcggctgctggagagcaggaagtacatcctggtggtgcccctcatcgtgatcaatgagctggacggcctggccaaggggcaggagacagaccaccgggctgggggctacgcccgtgtggtacaagagaaggcccgcaagtccatcgagttcctcgagcagcgattcgagagtcgggactcttgcctgcgagccctgaccagccgtggcaatgaactcgaatccatcgccttccgcagtgaggacatcactggccagctgggtaacaacgatgatctcatcctgtcctgctgcctccactactgcaaagacaaggctaaggacttcatgcccgccagcaaagaggagccaatccggctactgcgggaggtggtgctgttgacggatgaccggaacctgcgtgtgaaggcgctcacaaggaatgttcctgtacgggacatcccagccttcctcacgtgggcccaggtgggctgagggagccacactggggccccccccccgtggaaccgttcctgaaaggccaccaggcgcccagtgtagcacggaagatgcccacgtgcctgagccaccaatccacccagacaataaaccatcctcttccaacccacgccacggccatgctgtgggggacctgctcctcacagagcccctcccaaggatcgggcggaagctgctgggaccctcctgggctgccaggatttagcagggaggtggctggctacagcaacagcagctgggcaagccagataggccgcccatgctctcagcctttctccctcccccgtctcattccaaggctgagggagggccttctcgcctggggacgcagccactttctccagtggagacagggcaggggttctgagtttccgtcagatgcagtgaaatcacagttccctttcatcttcagaacctctgtcgtgaatgtgttcaagaggctttggttaagtcaggaagaagtgcccagggtgtgtgtccccagtctccctgaggcctggactcgcccatgaacccaagtcggcttctagacagcatgtccctaacagcagccctgggcccccacctcttctaccatccaccccagacttaccacacacccttcctgctgctcctcttcctgcccttatcaacctgggtccctcacacttcgccagttgcgtccccgtggacagtcatgagtctagaggaaaggggcatctggtctcaggcccgtgctctcgggtggcctccacctgctccctctctcctcactggcctttctttccgtctagcttcctcttcaggaaatgtcctgactcccctcagctcccccttcacccctccttgcccgcctaccctccctccagaatagcccctcacccttcttccccttctagttgatccttttcacctccctgatccccttcatttcttcaccgcggttcctcgtcataggggttctcactctgaactttccctctctactacccatggcaggaacctagtacaggtctcccacccagggccttccaccctcggctcctgtgctgggagaaacttccaggcgtggacagcccagcctgaggcattccagtgctggggcaccgtcgcctaacctggtttctagctttgccctcactccccggaaaaactgacactgacacaggggccctttccttgcccctttagctggtacctcagtggggaggcttccttaccaagaatgagttcctgaaacccagggccagagacaaggacaacttaggggaagacggggttttcggtggagccaggggcaaatcttaatgggaccagtgggggataccccagagcccatggcctgactgcacagcctgcctggaggatgggtgcgcagctctgccctccctgaggcccaggactatgccagaagcgatggggtaccgtgtaggggagccaaggccagtagtttgggggtaggagtcccctagagtctcagaagactgggctctttggagtacagggtccccggcctctcctttaagattctctccccagctggaaggccgatgactgggtggtcgggagggagacccagctctcctttctgtcccgtttgcagcactggttttgtttccttaataaatttttagttatgaaacatacctg

SEQ ID NO: 100924 - protein, 449 aa, Artificial Sequence
  derived and/or modified sequence
MCFLFSTFPRTGKCHVQTIQLCRRLTVEFMHYIIAARALRKVFLSIKGIYYQAEVLGQPIVWITPYAFSHDHPTDVDYRVMATFTEFYTTLLGFVNFRLYQLLNLHYPPKLEGQAQAEAKAGEGTYALDSESCMEKLAALSASLARVVVPATEEEAEVDEFPTDGEMSAQEEDRRKELEAQEKHKKLFEGLKFFLNREVPREALAFIIRSFGGEVSWDKSLCIGATYDVTDSRITHQIVDRPGQQTSVIGRCYVQPQWVFDSVNARLLLPVAEYFSGVQLPPHLSPFVTEKEGDYVPPEKLKLLALQRGEDPGNLNESEEEEEEDDNNEGDGDEEGENEEEEEDAEAGSEKEEEARLAALEEQRMEGKKPRVMAGTLKLEDKQRLAQEEESEAKRLAIMMMKKREKYLYQKIMFGKRRKIREANKLAEKRKAHDEAVRSEKKAKKARPE

SEQ ID NO: 100925 - DNA, 1350 bp, Artificial Sequence
  derived and/or modified sequence
atgtgcttcctgttcagcaccttccccagaaccggcaagtgccacgtgcagaccatccagctgtgcagaagactgaccgtggagttcatgcactacatcatcgccgccagagccctgagaaaggtgttcctgagcatcaagggcatctactaccaggccgaggtgctgggccagcccatcgtgtggatcaccccctacgccttcagccacgaccaccccaccgacgtggactacagagtgatggccaccttcaccgagttctacaccaccctgctgggcttcgtgaacttcagactgtaccagctgctgaacctgcactacccccccaagctggagggccaggcccaggccgaggccaaggccggcgagggcacctacgccctggacagcgagagctgcatggagaagctggccgccctgagcgccagcctggccagagtggtggtgcccgccaccgaggaggaggccgaggtggacgagttccccaccgacggcgagatgagcgcccaggaggaggacagaagaaaggagctggaggcccaggagaagcacaagaagctgttcgagggcctgaagttcttcctgaacagagaggtgcccagagaggccctggccttcatcatcagaagcttcggcggcgaggtgagctgggacaagagcctgtgcatcggcgccacctacgacgtgaccgacagcagaatcacccaccagatcgtggacagacccggccagcagaccagcgtgatcggcagatgctacgtgcagccccagtgggtgttcgacagcgtgaacgccagactgctgctgcccgtggccgagtacttcagcggcgtgcagctgcccccccacctgagccccttcgtgaccgagaaggagggcgactacgtgccccccgagaagctgaagctgctggccctgcagagaggcgaggaccccggcaacctgaacgagagcgaggaggaggaggaggaggacgacaacaacgagggcgacggcgacgaggagggcgagaacgaggaggaggaggaggacgccgaggccggcagcgagaaggaggaggaggccagactggccgccctggaggagcagagaatggagggcaagaagcccagagtgatggccggcaccctgaagctggaggacaagcagagactggcccaggaggaggagagcgaggccaagagactggccatcatgatgatgaagaagagagagaagtacctgtaccagaagatcatgttcggcaagagaagaaagatcagagaggccaacaagctggccgagaagagaaaggcccacgacgaggccgtgagaagcgagaagaaggccaagaaggccagacccgagtag

SEQ ID NO: 100926 - DNA, 1350 bp, Artificial Sequence
  derived and/or modified sequence
atgtgtttcctctttagtacattccccagaaccggtaaatgtcacgtacagactatccagctctgtcgtagactgacggtcgaatttatgcattatatcattgccgcccgtgctctgcgaaaggtgtttttaagtataaagggcatctattatcaggccgaggtcctgggccaacctattgtctggattacaccctacgccttctcacacgatcacccaaccgatgtggattatcgcgttatggccacctttaccgaattctacaccacacttctcggctttgtgaattttcggctttatcaactcttaaacctgcactatccacctaaactggagggccaggcacaagcggaggccaaggcaggtgaaggaacctatgccttggacagtgagtcctgtatggagaaactggcagctctgtccgcctcactggcaagagtagtcgtccccgcaaccgaggaagaagctgaggtggacgaatttcctacggacggggagatgtccgctcaggaagaggatcgccggaaggagcttgaggcgcaggagaagcacaagaaactcttcgaaggcctgaaatttttcttgaatcgtgaggtgccaagggaagctctagccttcattatcaggtcatttggcggagaagtgagttgggataagagcttgtgcatcggggccacttatgacgtgacggacagccgtataactcatcagatagtggataggcccggccagcaaacatctgtaatcgggcgatgctacgttcagccgcaatgggtgttcgactccgtgaacgcccgtctgttgcttccagtggctgagtatttcagcggggtccagctccctcctcatttgagccccttcgtgaccgaaaaggagggggattacgtgcccccagagaagctgaagctactcgccctacagagaggagaggatccagggaacttgaacgaatcggaggaggaggaagaggaggacgataacaacgaaggggacggcgacgaggagggagagaatgaggaggaggaggaagacgccgaggccgggtccgaaaaagaggaagaggcgcggctcgccgccctggaagaacagcgaatggaaggaaagaaacctagagttatggctggcaccctgaaactggaggacaagcagcgtttagcccaagaggaagaatcggaggcaaaacggttagctattatgatgatgaaaaagcgcgagaagtacctgtatcagaagatcatgttcggtaagcgtaggaagatacgggaagccaacaaactcgcggagaagagaaaggctcatgacgaggcagtgcgtagcgagaaaaaggctaaaaaagccaggcccgaatag

SEQ ID NO: 100927 - DNA, 1350 bp, Artificial Sequence
  derived and/or modified sequence
atgtgttttctcttttccacatttcctagaacagggaagtgccacgttcaaaccatccagctttgtcggcgacttaccgtggaatttatgcattacattatcgcagcgcgcgccctgcgcaaggtctttttgtcaatcaaaggaatttactatcaggcagaagttcttgggcagcctatcgtttggattacaccatatgcattttcccacgatcacccaacggacgtggattacagggtcatggccaccttcaccgaattttatacaacgctcctgggtttcgttaactttcggttataccagttgctgaatctgcattaccctcccaagctggagggccaggcccaggcagaggctaaggcaggggaaggcacatatgctttagattctgagagctgcatggagaaacttgctgcactgtccgcttcattagccagggtggttgtgcctgctacagaggaagaagccgaagtggacgagttcccgactgacggcgagatgagtgcccaagaggaggatagaaggaaagagctcgaagcccaggaaaaacataagaagttgtttgaagggctgaagttcttcctgaatcgcgaggtgcctcgcgaggcactggcattcataatccggtcattcggcggtgaagtctcatgggacaagtcactgtgtatcggcgcaacttacgatgttacagacagtcggattactcaccagatagttgatagaccaggccagcaaacatcagttattgggcgctgttatgtgcaaccccagtgggtatttgacagcgtgaatgctcgattgctcctccctgtggccgaatacttttccggtgtgcagctgccaccccatttgagtcccttcgtgactgaaaaggaaggtgattatgtgccacctgaaaaactcaagctcttagcgctgcagcggggcgaggacccgggaaaccttaatgagtcagaagaggaggaggaagaggacgataacaatgaaggcgacggtgatgaggagggagaaaacgaagaggaggaagaggacgctgaagccggatccgagaaggaagaggaggcccgcttagccgcactcgaggagcaacggatggaaggaaagaagccacgtgtgatggctggcacgcttaagctggaggataaacaacgcttggcccaggaagaggaaagcgaggccaagcgcttagccatcatgatgatgaagaaaagagagaaatacctttaccagaagattatgttcggcaagcgacggaagattcgagaagccaacaagttggccgagaagcggaaggcccatgacgaagcggtaaggtcagaaaaaaaggctaaaaaagctagacccgagtag

SEQ ID NO: 100928 - DNA, 1350 bp, Artificial Sequence
  derived and/or modified sequence
atgtgcttcctgttcagcaccttccccaggactggaaaatgtcatgtgcagaccatccagctgtgccggcggctgactgtggagttcatgcactacatcatcgccgcccgggccctgaggaaggtgttcctgagcatcaagggcatctactaccaggccgaggtgctgggccagcccatcgtgtggatcaccccctatgccttcagccatgaccaccccacagatgtggactacagagtgatggccaccttcacagagttctacaccaccctgctgggctttgtgaacttccggctgtaccagctgctgaacctgcactacccacccaagctggagggccaggcccaggccgaggccaaggccggggagggcacctacgccctggacagcgagagctgcatggagaagctggccgccctgagcgccagcctggcccgggtggtggtgcctgccacagaggaggaggccgaggtggatgagttccccacagatggagagatgtctgcccaggaggaggacaggaggaaggagctggaggcccaggagaagcacaagaagctgtttgagggcctgaagttcttcctgaaccgggaggtgccccgggaggccctggccttcatcatccgcagctttggaggagaggtgtcctgggacaagagcctgtgcattggagccacctatgatgtgacagacagccgcatcacccaccagatcgtggaccggcccggccagcagacctctgtgattggccgctgctacgtgcagccccagtgggtgtttgacagcgtgaatgcccggctgctgctgcctgtggccgagtacttcagcggcgtgcagctgcccccccacctgagcccctttgtgacagagaaggagggggactatgtgcccccagagaagctgaagctgctggccctgcagagaggagaggaccccggcaacctgaatgaaagtgaggaggaggaggaggaggatgacaacaatgaaggagatggagatgaggagggagaaaatgaggaggaggaggaggatgctgaggccggcagcgagaaggaggaggaggcccggctggccgccctggaggagcagaggatggagggcaagaagccccgggtgatggccggcaccctgaagctggaggacaagcagaggctggcccaggaggaggagagcgaggccaagaggctggccatcatgatgatgaagaagcgggagaagtacctgtaccagaagatcatgtttgggaagaggaggaagatccgggaggccaacaagctggccgagaagaggaaggcccatgatgaggccgtgcgctctgagaagaaggccaagaaggcccggcctgagtag

SEQ ID NO: 100929 - DNA, 1350 bp, Artificial Sequence
  derived and/or modified sequence
atgtgcttcctgttcagcaccttcccccggaccggcaagtgccacgtccaaaccattcagttgtgtcgacggctgacagtagaatttatgcactatataattgccgccagagccctgcgcaaggtgttcttatctatcaaggggatttactatcaggccgaggtgttaggccagcctatcgtttggattacaccttatgcatttagccatgaccacccaactgacgttgattacagagttatggccacttttacggagttctataccacacttcttggatttgtgaactttcggttgtaccagctactgaatttgcactacccgcccaagttggagggccaggctcaagccgaggctaaagcaggggaaggaacatacgccctagactccgagagctgtatggaaaaactggccgctttgtcagccagtctggccagagtcgtcgtgcctgccactgaggaggaagccgaggttgacgagtttccaaccgacggagagatgtcagcacaggaggaagatagacgcaaggaattggaggcccaggaaaagcataagaagctgttcgagggactgaaattctttctgaatcgcgaggtgccaagggaggctctggcgttcatcattcgtagttttggcggtgaggtgtcatgggacaaatctctctgtatcggggctacatacgatgtgacagacagccgcattacgcatcagatcgtggacaggccaggccagcagacgtctgttataggtcgctgttacgtgcagccccaatgggtctttgatagcgtgaatgctaggctgcttttgcccgtcgccgagtacttctcaggagtgcaactgcctcctcatcttagccctttcgtaaccgagaaagaaggcgactacgttccccccgaaaagctcaagcttcttgccctgcagagaggagaggatccaggcaacctgaatgaatccgaagaagaggaggaggaagacgataacaacgagggagacggcgatgaagagggggagaacgaagaagaagaagaggatgccgaggccggcagtgaaaaggaggaagaggcccgccttgctgccttggaagaacagagaatggaaggaaagaaacctcgcgtgatggcgggcaccttgaaattggaggataaacagcggctggcgcaagaagaagaatccgaagccaagaggctggccatcatgatgatgaagaagcgtgaaaaatacctttatcagaaaattatgttcgggaagcgtcggaaaatccgagaggccaataagctggcggaaaaaagaaaagcccacgacgaggcggtgcgtagtgagaaaaaggcaaagaaggcgaggcccgagtag

SEQ ID NO: 100930 - DNA, 1350 bp, Artificial Sequence
  derived and/or modified sequence
atgtgcttcctgttcagcaccttcccccggaccggcaagtgccacgtgcagactattcagctgtgcaggaggttaactgtggaattcatgcactatattattgcggcccgagcacttcgaaaggtgttcctctcaattaagggcatctattaccaagccgaggttctgggacagcccattgtgtggatcactccctatgcatttagccacgatcatcccacagatgtagactaccgagtgatggctacttttaccgaattttacacaactctgctcgggtttgtgaattttagactgtatcagttgttgaacctccattatccacccaaactggaaggccaagcccaagccgaagctaaggctggcgagggcacttatgcattagattctgaatcttgcatggagaaactagctgctctctctgcctcactcgcccgggtcgtcgtccctgcaactgaggaggaggccgaggttgacgaatttccgactgatggagaaatgagcgcacaggaagaggaccgtaggaaggagctggaggcacaggagaagcacaagaaactattcgaagggcttaagtttttcttgaatcgcgaagtcccacgggaagcactcgctttcattattaggtcattcggtggggaagtatcctgggataaatctctgtgcatcggagccacgtatgacgtgacagattcgaggataactcaccagattgtcgaccgccctgggcagcagacttccgtgattggccgctgttacgtacaaccccaatgggtctttgacagtgtgaacgccaggcttctgctcccagttgccgagtattttagtggcgttcagctgcccccccatctgagtccttttgtcactgaaaaagaaggtgattacgtgcctcccgaaaagctcaagttgctagccctccagcgcggtgaggatccaggaaatttgaacgagagcgaggaggaggaggaggaagacgacaacaacgaaggggatggggacgaggagggtgagaatgaagaagaagaagaggatgccgaggccggctccgaaaaagaagaggaggcgcggcttgccgccctagaggagcagcggatggagggcaaaaagccacgggtgatggccggcacgctcaagttggaagacaaacagaggctcgcccaggaggaggagtccgaagcgaaaaggttggccatcatgatgatgaagaagagagagaaatacttataccagaagatcatgttcggcaagagacgtaagatccgagaagctaataaattggccgaaaagaggaaagcccatgacgaagctgtccgatccgagaagaaagccaaaaaagccaggcccgagtag

SEQ ID NO: 100931 - DNA, 1350 bp, Artificial Sequence
  derived and/or modified sequence
atgtgctttcttttcagcacgttcccccgtacaggcaaatgccacgtgcagacaattcaactctgccgacggctgacagtagaatttatgcattacatcattgctgctagggcactgaggaaagtttttctgtcaattaaagggatctattatcaggcagaggtgctagggcagccaatagtgtggattaccccttatgcatttagccacgatcaccccactgacgtagactaccgggtgatggccacgttcacagaattttataccacactgctcggcttcgtcaatttccggctgtatcagctgctcaacctgcactacccacctaagcttgagggacaggcgcaggccgaggcaaaagcgggagaaggaacgtatgccctggactctgaatcctgcatggagaaattggcggctctgtccgctagcctggcaagagtcgtagtgcccgcaacggaagaagaggccgaggttgacgagttccctaccgacggagagatgtccgcccaggaagaggatagacgtaaagagctcgaggcccaggagaagcacaagaaactgttcgaaggcctcaagttcttcctgaacagagaggtgcccagggaggccttagccttcattatacggagttttgggggtgaagtctcttgggacaaaagtctatgcatcggcgcaacatacgatgtcactgactcccggatcactcaccaaatagtggaccgcccagggcagcagacaagcgtcatcggaaggtgctatgtgcaaccccagtgggtgttcgacagcgtgaacgccaggctgctgctgccagtggctgagtacttttccggcgttcaactgccaccgcacctttcgcccttcgtgacggagaaggagggggactacgtcccaccagaaaagctgaagctacttgctctccagagaggagaagacccaggaaaccttaacgagtctgaggaagaagaggaagaagacgataacaatgagggtgatggtgatgaggagggtgagaatgaagaagaagaggaggatgcagaggccggaagtgagaaggaggaggaggccaggctggccgcactcgaggagcagcgcatggagggtaaaaagccacgcgttatggccggtaccttaaagctggaagacaaacagcgccttgcgcaagaggaggaatctgaagccaagcggttggccattatgatgatgaaaaagcgggagaagtacctatatcagaaaattatgttcggaaagcggcgaaagatcagggaagccaacaagttggccgagaagagaaaagcgcacgatgaggctgtgcggagcgaaaaaaaagcaaagaaggcacggccagaatag

SEQ ID NO: 100932 - DNA, 1350 bp, Artificial Sequence
  derived and/or modified sequence
atgtgttttttgttcagcacctttcctaggaccggcaagtgtcacgtccagaccatccagttgtgccgaagactcactgtcgagttcatgcattacattattgcggctagagcactacgtaaagtctttttaagcataaagggaatttattatcaggcggaggtcctcggtcaaccaattgtttggatcactccttacgccttcagtcacgaccaccccacggatgtggattatagggtcatggccacgtttaccgaattttatacaacactactgggctttgttaacttccgattgtaccaactgttgaatctacactaccccccaaagttggaagggcaggcacaagccgaggccaaagctggcgaaggtacttacgcactggacagcgaatcatgcatggaaaagttggccgctctctcagccagcttggcccgtgtggtcgtgcccgcaactgaggaagaggccgaagtggatgagtttccgactgacggggagatgtcagcacaagaagaggacagacggaaggagttagaagctcaagaaaagcataaaaagctattcgagggattaaagtttttcctaaaccgggaagtccctagggaggctctcgctttcatcattagaagtttcggtggagaggtgagctgggataaaagcctgtgtataggagcaacttatgacgtcactgacagtcgtattacacatcaaatcgtggatcggcctggccaacagacgtccgtgatcggacgatgttacgtgcaaccacagtgggtctttgacagtgtgaatgctcgactgttgttgcccgtcgccgaatacttcagcggagtgcagttgcctccccacctgagcccctttgtcaccgagaaggaaggcgactacgttccacccgaaaagttgaagcttctggcgctgcagcgcggagaggatcccggtaacctgaatgaatctgaggaagaggaagaggaggacgataataatgagggggatggggacgaggagggtgaaaacgaagaagaagaagaggacgccgaggcaggatcagaaaaagaggaggaagccaggctggccgctctggaggaacagaggatggagggaaagaaaccaagagtgatggctggcactttgaagctggaggacaagcagcgcctggcccaagaggaggaatctgaggcgaaaaggctagctatcatgatgatgaagaaacgagaaaaatacctgtaccagaagatcatgtttggtaagaggcgtaaaatcagagaggctaataaattagcagaaaaacgtaaagcacatgatgaggctgtgaggtcagagaagaaggctaagaaggctcgtcctgagtag

SEQ ID NO: 100933 - DNA, 933 bp, Artificial Sequence
  derived and/or modified sequence
atgctggtggtggaggtggccaacggcagaagcctggtgtggggcgccgaggccgtgcaggccctgagagagagactgggcgtgggcggcagaaccgtgggcgccctgcccagaggccccagacagaacagcagactgggcctgcccctgctgctgatgcccgaggaggccagactgctggccgagatcggcgccgtgaccctggtgagcgcccccagacccgacagcagacaccacagcctggccctgaccagcttcaagagacagcaggaggagagcttccaggagcagagcgccctggccgccgaggccagagagaccagaagacaggagctgctggagaagatcaccgagggccaggccgccaagaagcagaagctggagcaggccagcggcgccagcagcagccaggaggccggcagcagccaggccgccaaggaggacgagaccagcgacggccaggccagcggcgagcaggaggaggccggccccagcagcagccaggccggccccagcaacggcgtggcccccctgcccagaagcgccctgctggtgcagctggccaccgccagacccagacccgtgaaggccagacccctggactggagagtgcagagcaaggactggccccacgccggcagacccgcccacgagctgagatacagcatctacagagacctgtgggagagaggcttcttcctgagcgccgccggcaagttcggcggcgacttcctggtgtaccccggcgaccccctgagattccacgcccactacatcgcccagtgctgggcccccgaggacaccatccccctgcaggacctggtggccgccggcagactgggcaccagcgtgagaaagaccctgctgctgtgcagcccccagcccgacggcaaggtggtgtacaccagcctgcagtgggccagcctgcagtag

SEQ ID NO: 100934 - DNA, 933 bp, Artificial Sequence
  derived and/or modified sequence
atgctggtcgtggaggtggccaatgggcgcagtctcgtgtggggcgctgaggccgtgcaagccctcagagaaaggctgggtgtgggaggtagaacggtgggtgcgttgccacgcggtcctcgacaaaacagcaggctcggactccccctcctgctgatgcccgaggaagccagattactcgctgaaatcggtgccgtgacgctcgtgagtgcaccaagaccagactcaaggcaccattctctggcactgacctcttttaagcgacagcaggaggagagtttccaggagcagtctgccttagccgccgaggcaagagaaacgcggcgccaggagcttctggagaagatcacggagggtcaggcagccaagaagcagaaattggagcaggcctccggcgcatccagttcacaggaagccgggagcagccaggccgcaaaagaggacgaaaccagtgacggccaggcttctggcgaacaggaagaggctgggccttccagctcacaggcaggcccatccaacggagtcgcacccttgcctcggagtgccttgttggtccagctggccacggctcgtccccgccccgtgaaagcacggccccttgactggcgagtgcagtcaaaagactggccccatgcgggaagacccgcgcatgaactccggtactctatttatagggatctatgggagcgaggcttttttctttccgccgcaggcaaatttggaggtgatttcctggtgtatcctggcgatccacttcggtttcatgcccattatatcgctcagtgttgggctcctgaagacaccattcctctgcaggacctggtggcagcagggcgcttaggcacttcggtgagaaagaccctgttgctctgtagcccgcaaccagacggaaaagtagtatacacctctctacagtgggcaagcttacagtag

SEQ ID NO: 100935 - DNA, 933 bp, Artificial Sequence
  derived and/or modified sequence
atgctggttgtcgaggtggcaaacggccgctcactggtgtggggcgctgaagcggtgcaggctctccgcgagcggctaggggtcggcgggcggacagtcggagctctcccacgcgggccacggcaaaatagccgcctaggactccctctgttgctgatgccagaggaagctagactgcttgctgaaatcggggccgtgactttggtctcagcaccaagacctgacagccggcaccacagtctagccctgacttcattcaagcgccagcaagaagaatctttccaggaacagtccgcactggccgcagaggcccgagagactcgccgccaagaacttcttgaaaagataaccgaggggcaggccgcaaagaaacagaaactcgagcaggcctctggggcgtcctcatctcaggaagccgggtcatcacaggcagctaaagaagacgaaacctctgacggccaagcaagtggggagcaggaagaagccggaccgtcaagtagccaggccggacccagcaatggcgtggcccccctgccccgcagtgccctgctggtgcagcttgctacagcccgacctcggccagtaaaggctcgtccgctcgattggcgagtgcagagtaaagattggccacatgccggcaggcctgctcacgagctgaggtatagcatctatcgagacctgtgggagaggggatttttcctgagcgcagccggtaaatttggtggggactttctggtgtatcctggcgacccattgagattccacgctcactacatcgcccagtgctgggcccccgaggacacgattcccttgcaggacctcgtcgcagccgggcgtttagggacaagtgtgaggaaaaccctgttgctgtgttccccacagccagacggaaaggtagtatacacttctctgcagtgggcaagtctgcagtag

SEQ ID NO: 100936 - DNA, 933 bp, Artificial Sequence
  derived and/or modified sequence
atgctggtggtagaagtggccaacggccggagtctggtctggggcgctgaggctgtgcaagccctaagggagcgactcggagtgggaggaagaactgttggtgctctcccacgcggcccccggcagaactcgaggcttggcctaccacttctgctaatgccagaggaggcccgacttctggcagagatcggcgcagtgaccctagtgtcggccccgcggcccgattcaagacatcactcactggcgctaacctcattcaagcgccaacaagaagaaagctttcaagagcaatctgcattagcggccgaagctagggaaactaggcgtcaggagctgctcgagaaaattaccgagggccaggcagcaaaaaagcagaagctggaacaggctagcggagcatcctcttcccaagaagcaggatcgtcacaggccgccaaggaggatgagaccagcgacggccaggccagcggggaacaggaggaagccggaccctccagctcccaagccgggcccagcaacggtgtcgccccgctgccacgctctgctcttctcgtacagctggccaccgccagaccccggcctgtaaaggctagacctctcgattggagggtgcagtcaaaggattggccacacgcagggagaccagcacacgagctcagatactccatctacagagatctatgggaacggggtttcttcctgagcgccgctggaaagttcggcggcgattttctggtatacccgggggacccactgcgattccatgcacattacatcgcgcagtgttgggcccctgaagatactatcccactgcaggacctggtcgccgctggccgtttgggtacgtctgtgcggaaaaccttacttttgtgcagcccccagcctgatggtaaagtagtttacacctctctgcagtgggcatccctccagtag

SEQ ID NO: 100937 - DNA, 933 bp, Artificial Sequence
  derived and/or modified sequence
atgttggttgtcgaagtcgctaacggtcgctctcttgtctggggagccgaagccgtgcaggccctgcgggagaggctcggcgtggggggtagaaccgtcggagctttgccaagagggcccaggcagaatagccggctgggcctcccactgctgctgatgcccgaggaagccaggttgttagccgaaatcggagcagttacattggtgagtgccccacggcctgactctaggcaccacagtctcgccctgacaagcttcaaaagacagcaagaagaaagctttcaggaacagtcagctctggccgccgaggcccgagaaacaaggcgccaggaactgcttgagaaaattactgaggggcaggccgctaagaagcagaaactcgagcaggcttccggcgccagcagctctcaggaggccggttcctcccaggcagcaaaagaagacgagacgagcgatgggcaggcttcgggtgagcaagaggaggctgggcctagctcctcccaggctggtccttcaaatggggtggcaccactgcctcggagcgccctgctagtccagttagccacagcacggcctagacccgtcaaggctagacccctcgattggagggtgcaaagtaaggactggccacacgccgggcgccccgcgcatgagcttcggtactctatttaccgggatctgtgggaacgcggcttttttctgagcgctgcaggtaaatttgggggggattttctagtgtatcctggagatcccttgagatttcacgcccattacatagcacagtgctgggcgcccgaagacaccattccactgcaagacctggtggcggccgggcgcctgggaactagcgtgagaaagaccctgctgctctgcagcccccagccagatggtaaagtggtgtatactagcctacagtgggcatctctacagtag

SEQ ID NO: 100938 - DNA, 933 bp, Artificial Sequence
  derived and/or modified sequence
atgctcgtcgtggaggtcgccaacggccggtcattagtgtggggggccgaagccgtgcaggccctccgggagcgattaggagttggcggaagaacagtcggagccctcccccggggacccaggcaaaattctcggcttggattgcccctcctgctgatgcctgaagaagcccggctgctggccgagattggcgccgtgacgttggtatccgccccgcgaccagactctcgacaccacagtttagccctcaccagctttaagcgccagcaggaagaatcctttcaggagcagtccgcccttgccgccgaggcacgcgagactcggagacaggaactactggagaaaatcactgagggccaggcagctaagaagcagaaattagagcaggcatccggcgcttcttctagccaggaagctgggagcagtcaggccgccaaagaggacgaaacatccgacggacaggctagtggtgaacaggaagaagccggcccgagctcatcacaggcgggaccctctaatggggtggcgccgctgccgcgatccgctctcttggtgcagctggctaccgcccggccccgcccggttaaagccagacccttggattggagggtccagtccaaagattggccccatgccgggagaccagcgcatgagctacgttattcaatttaccgggacctgtgggagcgaggcttctttctgtccgcagctggcaaattcgggggggacttcctggtgtatcctggggaccccctgcgtttccacgcccattacatcgcccagtgttgggccccggaggacactataccactgcaggatctggtcgcagccggtagactgggaacctcagtcagaaaaaccttgttactctgttcaccccagccagacggcaaggttgtgtacacctccctccaatgggcaagtctccagtag

SEQ ID NO: 100939 - DNA, 933 bp, Artificial Sequence
  derived and/or modified sequence
atgttggtcgtggaggtagccaatggaagaagcctggtgtggggcgccgaggcagtgcaggccctgagagaacgcttgggagtggggggtaggacggtaggtgccctgccacgggggcctaggcaaaacagccgtcttgggctgccgttgcttctgatgcccgaggaagctcgactcctagctgagatcggggctgtcacactggtctctgcaccgcggccagatagtaggcatcactcgctggctcttacctcatttaaaaggcagcaagaagagtcgtttcaggaacagtctgcgctggctgctgaggcaagagagactagacgtcaggaattactcgagaagatcacagagggacaagccgcaaagaaacagaagttggaacaggcttccggagctagttcgagtcaggaggccgggtcatcccaggccgctaaagaggatgagaccagcgatggacaggcaagcggcgaacaagaggaagccggtcccagcagctcccaggctggaccaagtaatggcgtggcccctcttccacgcagtgccctgcttgtgcaactcgctacggcacgccctagacctgtaaaagcgcggcctctggactggcgggtgcagtctaaagactggccacatgcgggccgcccagctcacgaactacggtacagtatctaccgcgatttgtgggagagaggattctttttgagtgccgccggcaaattcggaggggatttcctggtgtaccctggtgacccccttcggttccatgctcattacatagctcagtgctgggctcccgaggacactattcccttacaggatctcgtcgctgctggaaggctgggcacgagtgtgcggaaaaccttgctgctgtgctcccctcaaccagatggcaaagtggtctatacctccttgcaatgggcttcacttcagtag

SEQ ID NO: 100940 - DNA, 933 bp, Artificial Sequence
  derived and/or modified sequence
atgcttgtggtagaggtggctaacggtaggagtctggtgtggggagcggaagccgtccaggcactcagggaaagactgggcgtgggcggccgcactgtgggcgctctccccagagggcctcggcagaactctaggctcggccttccactgctcctgatgcccgaggaggctcgtctgctggccgagataggagccgtgactcttgtgtctgctcctcgccccgactcccgccaccactcgctcgcgctgactagttttaaacggcagcaagaagagtcttttcaagaacagagtgcgctcgctgccgaagcaagggaaaccaggagacaggagctgcttgagaaaattactgaaggccaggccgccaagaagcagaagctcgagcaggcaagcggcgcatcctcgagccaggaggctgggtcctcccaggcagcaaaggaggacgagacgtctgatggccaggcctccggtgagcaggaggaagctggtccttctagttcacaggccggaccttcaaatggtgtagctccactccctcggagtgcgctgcttgttcagctcgcgacggctagacctcgcccagtgaaggcgcgtcctcttgattggcgagtgcaatcaaaagactggcctcacgctgggcggcccgcccatgaactcaggtattcgatctaccgtgacctgtgggaacgaggtttctttctgtctgctgctggcaaatttggcggggattttttagtatatcccggagatcctctcaggtttcacgctcattatatcgcgcagtgctgggcaccggaggataccatccctctccaggatcttgtcgcggccggaagacttgggaccagtgtgcgtaaaacactgctcttgtgtagcccgcagccagacggaaaggttgtgtatacatccctacagtgggcctctttacagtag

SEQ ID NO: 100941 - DNA, 933 bp, Artificial Sequence
  derived and/or modified sequence
atgctggtagtcgaagtggcaaatggacgttcgctcgtgtggggggcagaggcagtgcaggccctccgtgaacgcctcggcgtcggaggtaggacagtgggggctttaccccggggccccagacagaacagccgtctgggactccctcttctgctgatgcctgaggaagccaggctcctggcagaaatcggagctgtaactctggtgagcgctccccggccagacagccgacatcattccctcgccttgacaagcttcaagcgccagcaggaagagtccttccaagagcaatctgcgttggccgccgaggcccgcgaaacccggaggcaggaactactggagaaaataactgaaggtcaggccgctaaaaaacagaaactggaacaggcctctggggcttcttcctctcaggaggcaggcagtagccaagcagcaaaagaagatgaaacctccgacgggcaggcatctggggaacaggaagaggccggcccttcttccagtcaggctgggccttctaacggtgtcgccccccttccacgctctgctcttttggtccagcttgccactgcccggcccaggcctgttaaagcgcgacctctggattggcgggtgcagtccaaggactggccacacgcaggccggcccgctcatgagttgagatattccatttacagagacttgtgggaacgaggattttttctgtcggcggcgggcaagttcggaggtgatttcctggtgtaccctggggaccccctgcgctttcatgcccactatatagctcaatgctgggcccccgaggataccatacccctccaggacctggtggccgccgggaggctgggcactagtgtacggaaaacactgctgctttgcagtccccagcccgatgggaaagttgtgtatacgtctctacagtgggcgagcctccaatag

SEQ ID NO: 100942 - DNA, 933 bp, Artificial Sequence
  derived and/or modified sequence
atgctggtggtagaagtggcaaatgggagatccctggtgtggggagcagaggccgtgcaggctctgcgagagagattgggagtcggcggtcggacagtcggcgcactccctaggggtccaaggcagaattcacgactcggcctgccacttctactcatgccggaggaagctcgtcttctcgctgagatcggagctgttacactggtgtccgccccaaggccggattcccgtcaccacagcctggcactgacttcattcaaacggcagcaagaggagtcttttcaggagcaatccgccttggctgcagaagcaagggagacaagaagacaagaactgctagagaagatcaccgaaggtcaggctgcaaaaaagcagaaattggagcaggcttccggggccagcagctcacaggaagccgggtcctctcaagcagccaaagaggacgaaacatctgacggtcaagcttccggcgagcaggaggaggcgggtcccagcagctcccaggctgggccctctaatggcgtcgctcctcttcctagatccgctctgctggttcagcttgccacagcccggcccaggcctgtcaaggcccggccactggattggcgggtgcagtcgaaagactggccacacgcaggtcgccccgcgcacgagttgcggtattccatttatagagacttatgggagagaggatttttcctgtcggccgctggaaagttcggcggagatttcctggtgtaccccggagaccctctgcggtttcatgcccactacatcgcccaatgctgggctccagaagacaccattcctttgcaggacctagtggctgctggtagactcggaacgtcggtccgcaagacattgctcctttgctctccgcaacctgatggaaaagtggtgtacacaagtctgcagtgggcttctctgcagtag

SEQ ID NO: 100943 - DNA, 933 bp, Artificial Sequence
  derived and/or modified sequence
atgctggtcgtcgaagtagctaacggtagatcgctggtgtggggagcagaagctgtgcaagctttgcgggaacgcctgggggtgggcggtaggactgtcggagcgctgccacgagggcctcgccaaaacagtcggctgggccttcctctgttgttaatgccggaggaggctcgattgctggcggagatcggtgccgttactctggtctctgccccacggcctgattcacggcaccacagcttggctctgacctcgttcaaacgccagcaggaggagagtttccaggaacagtcggctttagctgccgaggcaagagaaactaggcgtcaagaactcctggaaaagatcaccgagggacaggcagcaaagaagcagaagctggagcaggcttctggggccagttcatcccaagaggcagggtcctcccaagcagcaaaggaggatgaaacgtctgacgggcaggcgtcaggtgagcaggaagaggccggaccctcgagttcccaagcgggaccatctaacggcgtcgcaccattacccaggtctgccttgctggttcaactggctactgcccgcccgcggcccgtcaaagctcgtccgctggattggagggtacagtcgaaggactggccacatgctggaagacccgctcatgagctgcgctacagtatatacagggatctgtgggaaaggggcttcttcttatccgccgcagggaaatttggaggagatttccttgtctatcctggagatccgctgaggtttcacgcccactacatagcacagtgttgggcgccggaagatactattcccttgcaggacctggttgcggccggcaggctgggtacgtcagtgagaaagacactattgctctgttcaccgcagcctgatgggaaagtcgtgtacacatctctgcagtgggcatctcttcagtag

SEQ ID NO: 100944 - DNA, 933 bp, Artificial Sequence
  derived and/or modified sequence
atgttggtggtcgaagtggctaatgggcggtcccttgtgtggggtgccgaggccgtgcaggcactcagagaaaggctcggagtgggaggtcgaactgttggcgcactgcccagagggccaagacagaactctcgactgggcttgccacttctcctcatgccggaggaggctagactgctcgcagagattggtgcagtgaccctggtgtccgctccccgcccagattctcggcatcattccctcgctctcacaagcttcaagcggcaacaggaggagagtttccaagagcagtccgcgctcgccgccgaggcccgtgaaacaaggagacaggagctgctcgaaaaaatcaccgagggtcaggccgctaagaagcagaaactggagcaggcatccggagcatcgtcctcccaggaagctggttcatcacaggcagccaaagaggacgagacctctgatggccaggccagcggcgaacaggaggaagccgggccgagctcttctcaagcaggtccgtccaatggggtggctcctctcccccgcagcgcgcttttggttcagctcgctaccgccagaccccggccggtgaaagctcgacccttggactggcgtgtccaatctaaagattggccacacgcagggagacccgctcacgagctgagatattccatctaccgtgacctgtgggagcgcggcttcttcctgagcgcagccgggaagtttggaggggacttcctggtctaccccggagaccccctccggttccacgctcactacatagcacaatgctgggctccagaggacactatccccctccaagatctggtggccgcgggcaggctgggcacatctgtgcggaagacactgctgctatgcagcccccagcccgatggcaaggttgtctatacgtcattgcaatgggcatctctccaatag

SEQ ID NO: 100945 - DNA, 933 bp, Artificial Sequence
  derived and/or modified sequence
atgttggtagtcgaagtggccaacggcagaagcctggtttggggtgcagaagcagtgcaggccctgagagaacgcctcggcgtgggtggacgcactgtgggtgcgctcccccgggggccgcgccagaatagtcgtctgggcctgccactgcttttgatgcctgaggaggcgaggctcctagccgaaattggtgcggtcacattggtgagcgcacccaggcccgatagtagacatcacagtttggccctgacatccttcaagcgtcagcaggaggaatcctttcaggagcaatctgcccttgcagcagaagctcgggaaactcgaaggcaggaactgctggagaagattaccgagggacaagcggccaagaagcagaaattagaacaggctagcggcgcctcctcttctcaggaagccggctctagccaagccgccaaggaggatgaaaccagcgatggccaggcgtccggtgagcaggaagaagcagggccatccagctctcaggctggaccatctaacggggtggccccccttcctcgctccgccctcctcgtgcagctggccaccgcccgacctaggccagtgaaagctcgacctctcgattggagggtgcaatctaaagactggcctcatgcaggacggcccgcacatgaattgaggtactctatttatcgggatctgtgggaacggggcttcttcctcagtgcagccggtaaattcggtggcgattttctggtgtatcctggagatcccctgcgttttcacgcccattatatcgcccagtgctgggctcctgaggatactatcccactacaggacctggtagccgccggacgtctgggtacatcagtgcggaaaaccctcttgctgtgttcacctcagcccgacggcaaggttgtgtacaccagtctccaatgggcttcactgcaatag

SEQ ID NO: 100946 - DNA, 933 bp, Artificial Sequence
  derived and/or modified sequence
atgctggtggtggaggtggccaacggccgcagcctggtgtggggcgctgaggccgtgcaggccctgcgggagcggctgggcgtgggcggccgcacagtgggcgccctgccccggggcccccggcagaacagccggctgggcctgcccctgctgctgatgcctgaggaggcccggctgctggccgagattggagctgtgaccctggtgtctgcccccaggccagacagccgccaccacagcctggccctgaccagcttcaagaggcagcaggaggagagcttccaggagcagagcgccctggccgctgaggcccgggagacccggcggcaggagctgctggagaagatcacagagggccaggccgccaagaagcagaagctggagcaggccagcggggccagcagcagccaggaggccggcagcagccaggccgccaaggaggatgagaccagtgatggccaggccagcggggagcaggaggaggccggccccagcagcagccaggccggccccagcaatggagtggcccccctgcccaggtctgccctgctggtgcagctggccacagcccggcccaggcctgtgaaggcccggcccctggactggagggtgcagagcaaggactggccccacgccggccgcccagcccacgagctgcgctacagcatctacagagacctgtgggagcggggcttcttcctgtctgctgctgggaagtttggaggagacttcctggtgtacccaggggaccccctgcgcttccacgcccactacatcgcccagtgctgggcccctgaggacaccatccccctgcaggacctggtggccgccggccgcctgggcacctctgtgaggaagaccctgctgctgtgcagcccccagccagatggcaaggtggtgtacaccagcctgcagtgggccagcctgcagtag

SEQ ID NO: 100947 - DNA, 933 bp, Artificial Sequence
  derived and/or modified sequence
atgctggtggtggaggtggccaacggccggagcctggtgtggggcgccgaagcagtgcaggcgctccgggagaggctcggagtaggagggaggacagtgggagccctccccagagggccaaggcagaattcacggctgggtttgcctttgcttctgatgccggaagaagctagactccttgctgagatcggcgctgtgacccttgtctcagcccccaggcccgactcccggcaccatagcctcgcactcacatcctttaaacgccagcaagaggagtctttccaggaacagtccgccttggcggccgaggcccgtgagacacggcggcaggagttgctagagaagatcaccgaaggacaggcggcaaagaagcaaaagttagagcaggcatcgggcgcgagctcctctcaggaagcaggaagctcccaggccgctaaagaagatgagacctcagatggccaggcgtctggtgagcaggaagaggccggaccaagcagcagccaggcagggccgagcaacggggtggcccctctgccccggagtgcactgctcgtgcagctggctacagccaggcctcgacccgtcaaggctagaccactagactggcgggttcagtccaaggattggccccatgccggaaggcctgcccacgagcttcgctatagtatctaccgggacctgtgggagcggggcttctttctgagtgccgcaggcaagtttggcggagactttttggtctatcccggagacccccttcgattccacgcccactatattgcccagtgctgggcacctgaagacactattccactgcaagatctcgtggcagcaggtcgcttaggcacctctgtgcgcaagaccctgctcctgtgctctccccagcccgatggcaaagtggtgtacacaagcctgcagtgggcttctctgcagtag

SEQ ID NO: 100948 - DNA, 933 bp, Artificial Sequence
  derived and/or modified sequence
atgctggtggtggaggtggccaacggccggagcctggtgtggggcgctgaggcagtccaagcactgagggagcgccttggcgtgggcggccgcaccgttggggctttgcctaggggtccccggcagaacagccgattggggttacccctactcctaatgccagaggaggcgcggttgttagccgaaatcggggcagtgactctggtcagtgccccgaggcccgatagccgacatcattccctggctctgacaagctttaaacgccagcaggaggagtctttccaggaacagagcgccctggcagccgaggcacgtgaaactagacggcaggaactcctagaaaagatcactgaaggtcaagccgcgaagaaacagaagctggagcaggcaagcggagcctcctcttctcaggaagctggaagcagccaagctgctaaagaggatgagacatctgacggccaggcatcaggggaacaagaggaggcggggccaagcagttcccaggccggcccttccaacggggtggctcctttgccaagaagcgcactgcttgtccagttggccaccgcccggcctcgccccgtgaaggctagacctctggattggcgcgtgcagtcgaaggactggcctcacgcgggccggccagctcatgaactgagatactcaatatacagagatctctgggagcgtggattcttcctatctgcagcaggaaagttcggcggcgacttcctggtatacccaggagatccactccgcttccacgctcactatatcgcccagtgctgggctcctgaagacacaatccctctgcaggacctggtcgccgccggcaggttgggcacttctgtgagaaagacgctcttattgtgttcgccacaaccagacgggaaggttgtctatacgtctcttcagtgggcctcacttcagtag

SEQ ID NO: 100949 - DNA, 933 bp, Artificial Sequence
  derived and/or modified sequence
atgctggtggtggaggtggccaacggccggagcctggtgtggggcgcagaagccgtgcaggctttgcgcgagcgcctgggggtgggcggcagaacagtcggcgctcttccccgcggccctaggcaaaactcacggcttggtcttccattgctcctgatgcctgaagaggcccgcctactggctgagattggcgccgtgacactcgtcagtgccccaaggccagattcgaggcaccacagtctcgctctcaccagttttaagcgacagcaggaagagtcattccaggaacagtcggcgctcgctgctgaggctcgcgagacacggcgtcaggagctcctagagaaaattaccgaaggccaggctgccaagaagcaaaagctagaacaagcctctggcgctagcagctcccaagaagccggatcatctcaggcagccaaggaagacgaaaccagcgatggacaggcctccggcgaacaagaggaggccggtccgtcttcgtctcaggctggtccaagtaatggagtcgccccactcccgcggtccgccctcctggttcagttagccacagcccgcccgcggccagtcaaagcccggcctctggattggcgcgtgcaatccaaggattggccacatgccgggagacctgcccatgaactgcggtactctatttacagggacctctgggagcggggctttttcttgtcagcggctgggaagttcggcggggattttctggtctatccaggtgaccctctgcggtttcatgcccattacattgcccaatgttgggcgccggaggatactatccctctccaggacctggtggccgcagggagactgggtacatccgtgcgaaagactttactgttatgcagcccccagcccgacggcaaagtggtctacaccagtctgcaatgggcatcgctgcagtag

SEQ ID NO: 100950 - DNA, 933 bp, Artificial Sequence
  derived and/or modified sequence
atgctggtggtggaggtggccaacggccggagcctggtgtggggcgctgaggccgtccaggcccttcgcgagcgtttgggagtcggaggccggaccgtgggcgctctgccacgtggcccgcgccagaacagccgcctgggattaccactgctcctgatgcctgaagaggcccgtttgctagctgagatcggcgcagtgacattggtgtctgctccacgccccgactcccgacaccactcattggccctgactagctttaagagacagcaagaagaaagcttccaagagcagagcgccctcgcagctgaggctcgcgagacaagacggcaggagctgctcgagaaaataacggaagggcaggctgcgaaaaagcagaagctcgagcaggcgtccggggccagtagctctcaagaggcggggtcaagccaggcagccaaagaagatgagaccagcgacgggcaggcgtccggggagcaagaggaagcaggaccctcaagctcccaggcgggcccatctaacggcgtcgctcccctgccaagaagcgcgctgctagtccaactggccactgctcgaccgcggcccgttaaggcccgccccctggattggcgcgttcagtcaaaggactggccccacgctggaagacccgctcacgaacttcgctattcaatctaccgtgacctttgggagcgcggttttttcctgtctgcggcgggaaaattcggaggggattttttggtgtatccgggtgatccattgcggttccacgcccactacatcgcccagtgttgggcacccgaggataccatccccctccaagatcttgtcgcggctggtaggctgggcacctcagtgagaaaaacactgctgctgtgttctccacagcccgatggcaaagttgtctatacgagcctacaatgggcctcactgcagtag

SEQ ID NO: 100951 - DNA, 933 bp, Artificial Sequence
  derived and/or modified sequence
atgctggtggtggaggtggccaacggccggagcctggtgtggggcgctgaggctgtgcaagctctgcgcgaacgcctcggtgtggggggcagaaccgttggtgccctgccccgcgggcccaggcaaaatagcagactgggacttccactgttgctcatgcccgaggaggctcggttactcgcagaaattggagccgttacactggtctcagcccccagacctgattcacggcatcactcactggcactaacttcctttaagcgacagcaggaggagtcttttcaggagcaaagcgctctggccgccgaggccagggagacaaggcgccaggagctcctggagaagattactgagggacaggccgccaaaaagcaaaaactggagcaggcttcaggagcatccagctcccaagaagccgggtctagtcaggcagccaaggaggacgagacctctgatggacaggcttccggagagcaggaagaagccggtcccagttccagccaagctgggccgtccaacggtgttgcccccttgcctcggagtgcactcctggtgcagctagctactgcccggcctcgtcctgtgaaagcaaggccccttgattggcgcgtccagagcaaagactggcctcacgcagggaggcctgcccacgagctgaggtactcaatctatcgcgatctgtgggaaaggggattcttccttagtgctgcaggcaagttcggaggggactttttggtctatcccggagaccccctcaggtttcatgcacactatatcgcacagtgctgggcaccagaagacacgattcctctgcaggatctcgtcgcagctggccggcttgggacgtcagtaagaaagacactgctgctgtgttccccccagccggacggaaaagtagtgtatacaagccttcagtgggcctctctccagtag

SEQ ID NO: 100952 - DNA, 933 bp, Artificial Sequence
  derived and/or modified sequence
atgctggtggtggaggtggccaacggccggagcctggtgtggggcgctgaagccgtccaggccctacgagagcgactgggggtaggcggcagaactgtcggggctctccccaggggccccagacagaatagccgcctgggcttgccactgttactgatgccagaagaggcccgcctccttgccgaaatcggtgccgtaaccttggtatcggcacctcggccagatagtaggcaccactcacttgcacttacgtcgttcaagcggcagcaggaggagtctttccaggagcaatcagcactggccgccgaggcccgtgagacacgccgccaggaactcctggaaaaaataaccgaaggccaagccgcaaaaaagcagaagctggaacaggcaagtggggcctcgtcgagccaggaagcagggtctagccaagcagctaaggaagacgaaacatccgacggccaggcctccggcgagcaggaggaggccggcccttccagtagtcaggctggtccaagcaatggtgtggcccccctgcctaggagcgccttgctggtccagctggctactgctcgaccccgccctgtcaaagcgagacctttggattggagggtgcagtccaaggattggccccatgccgggaggcccgcccatgaattgaggtatagcatataccgggatctgtgggagcgagggtttttcttgtccgccgctggcaagtttggaggggactttttagtctaccctggcgatccacttcgatttcatgcccactacatcgcacagtgctgggcccctgaggatacaatcccacttcaggatctggtggcagcaggcaggctgggaacgagcgtaaggaaaacattgcttctttgctccccccagcctgacggtaaagtggtgtacacaagcctgcagtgggcctcccttcagtag

SEQ ID NO: 100953 - DNA, 933 bp, Artificial Sequence
  derived and/or modified sequence
atgctggtggtggaggtggccaacggccggagcctggtgtggggcgccgaagccgtgcaggcacttagggagagactgggagttggggggagaactgtgggggctctgccgcggggcccacggcaaaacagcagactggggcttcctctgttactgatgcctgaggaggcccgcctgttagctgaaattggcgccgttaccttggtctcagcgcctaggcctgacagccgacaccacagcctggcactgacatcatttaaaagacagcaggaggagagtttccaggagcaaagcgctctcgcggctgaggcccgagagacacgcaggcaggaactgctggaaaaaatcactgagggccaagccgcgaagaagcagaagctggagcaggcctctggggcctcttcctctcaagaggccgggtctagtcaggccgctaaggaggatgaaaccagcgatggccaagcctcaggcgagcaggaggaggcgggcccctcctccagtcaggctggacccagtaatggagtcgcccccctccccagatcagcccttcttgtgcagttggcgaccgcccgtcccaggccggttaaagccaggcctctggactggcgcgtgcagtctaaggattggccccacgccggaaggcctgcgcatgaactcagatattcaatctatcgcgacctctgggagaggggatttttcttgtctgcagcagggaagttcggcggagactttctggtgtacccaggcgacccattgaggttccacgcgcactatattgctcagtgttgggcccccgaagacaccattccccttcaggacctggtcgctgccggacgactaggaacttccgtgcggaaaactctgctactatgtagcccccagccggacggaaaggtcgtatacacttctctgcagtgggcgagcttgcagtag

SEQ ID NO: 100954 - DNA, 933 bp, Artificial Sequence
  derived and/or modified sequence
atgctggtggtggaggtggccaacggccggagcctggtgtggggcgctgaagctgtgcaggctctgcgggagcggctgggtgtgggaggtcggactgttggggctctccccaggggacctaggcagaattcccggctgggactcccgctccttctgatgcccgaggaggcgcgcctactggccgaaattggcgcggtaaccctagtcagcgctcctcgccctgatagcaggcaccactccctggcactgacttctttcaaacgccagcaggaagagagcttccaagagcaaagcgcccttgccgcagaagctcgcgaaacccgtagacaagagcttctggaaaaaattacggaagggcaagcagccaaaaaacaaaagctggagcaggcgtcgggtgcctccagctctcaggaagccggatcctcgcaggctgcaaaggaggacgaaacttcagatggtcaagcgtctggagagcaggaagaagccgggcccagttccagccaagccggcccgagcaacggagtagcacctttgccacggtcggccctgctggtccagctggccacagcccgacctcggcccgttaaagctcggccactggattggagggtgcagagcaaagattggcctcacgccgggagacccgcgcacgagctcagatattcaatctaccgtgatctctgggagagaggcttcttcctttcggcggctggaaaatttggcggtgacttcctggtctaccccggagaccctttaaggttccacgcccactatatcgcacaatgttgggcccccgaagacaccatccccctgcaggacctggtggcagcaggacggctggggacctccgtgcggaagactcttttactgtgctccccgcagccggatggcaaggtggtttataccagcttacagtgggctagcctgcagtag

SEQ ID NO: 100955 - DNA, 933 bp, Artificial Sequence
  derived and/or modified sequence
atgctggtggtggaggtggccaacggccggagcctggtgtggggcgcggaagccgtgcaagccctccgtgagagactaggggttggtggtcggactgttggggccctgcctcgcggtcccaggcagaacagccggctgggcctgccgctgctgctcatgccagaagaggcgcgactcctggcggagatcggtgccgtgacactcgttagcgcccctcgaccagactctagacaccactccctcgccttgaccagttttaaacgacagcaggaggaatcctttcaggagcaaagcgctctggctgcagaggcaagggagacacgacggcaagaactgttagagaagatcacggaaggtcaagcagctaaaaaacagaagctggaacaggccagtggggcgagtagttcccaggaggccggtagtagccaggctgccaaagaagatgaaacatccgacggacaagcctccggcgaacaagaagaggcaggcccctcgagctcccaagcgggtccgtcaaatggagtggcccctcttccgaggagtgcgctgctggtgcaactcgccaccgcgagaccccggccggtgaaggcccgcccgctagattggagggtgcaatccaaggattggccccacgccggtcgcccagcccacgaacttcgttacagcatctatagagatttgtgggagagagggttctttctgagcgctgccggaaaatttggcggagacttcctggtgtatcccggagatcccctccgcttccatgcccactatatcgcccaatgttgggctccagaagatacaatccctctgcaagatctggtggccgctggtaggctcggtacatctgttaggaagaccctcctgctatgttccccacagccagatggcaaagttgtttatactagcctgcaatgggcttccctccagtag

SEQ ID NO: 100956 - DNA, 933 bp, Artificial Sequence
  derived and/or modified sequence
atgctggtggtggaggtggccaacggccggagcctggtgtggggcgcagaggctgtgcaggcgctcagggaaagactaggagtgggaggacggacagtcggtgcgctaccaagagggccacgccagaacagcagacttgggctgccgctcctcctaatgcccgaagaagctagattattagctgaaatcggcgccgttactctcgtaagcgcaccacgacccgacagtaggcaccacagcctggcactgactagctttaaaaggcagcaggaggaatcatttcaggagcagtcagctctggcagcggaggctcgcgaaacaaggcgtcaggagctgctggagaagattaccgagggccaggcggccaaaaaacaaaaactggagcaggctagtggcgcttcttcctcccaagaggcaggttcctcccaagctgctaaggaggacgagaccagcgatggacaggcaagtggcgagcaggaggaggctggtccatctagcagccaggctgggccctctaacggtgtcgctccgctgccccgttcggcactgctggtgcaattggctaccgcaaggcctagacctgtaaaagcacggccgttggactggcgtgtgcagtcaaaggattggcctcacgccgggcgtcctgctcacgagctcagatattctatctatcgggacctttgggagcgtggcttctttctgtccgccgcgggcaagttcggtggcgactttctggtgtatccaggcgaccccctgcgcttccatgcccactatatcgcccagtgctgggcccctgaggacacaatcccgctgcaagatttggtggcagcaggccgcctgggcaccagcgtacggaaaaccctgctactgtgtagcccccaaccagatggaaaggttgtctataccagcttacagtgggctagcttgcagtag

SEQ ID NO: 100957 - DNA, 933 bp, Artificial Sequence
  derived and/or modified sequence
atgctggtggtggaggtggccaacggccggagcctggtgtggggcgccgaagccgtgcaggcactcagggaaagactcggcgtggggggacgcacagtgggtgcactgcctagagggccacgccagaactcacgactgggcctgcctcttctgctgatgcctgaggaagcaagacttctcgctgagataggagccgtcacacttgtctctgcaccccgaccggactcccggcatcattcattggctctcacttcattcaaaagacagcaggaggaatccttccaggagcagagcgctctcgcagcagaagcccgtgagaccagacggcaggagctgttggaaaagatcaccgaggggcaggctgccaagaaacagaagttggagcaagcctctggagcctcgtcaagtcaagaagcaggatcgagccaagcagcaaaggaagacgaaacatctgacggacaggcgagtggggaacaagaagaggctggacctagtagcagtcaagccggtccctccaacggtgtagctcctcttccccgatctgccctgcttgttcagcttgccacagctagaccacgcccagtcaaagctagacctctggattggcgcgtacaatctaaggattggccgcacgccggcaggccagcccacgaactaagatactctatctatcgtgacctatgggaacggggattcttcctcagtgcagctgggaagttcggcggggatttcctggtgtatccaggtgatccactcagattccatgcccattatatcgcccagtgttgggccccggaagacactatcccattgcaggatttagttgccgccggcagactggggacatctgtccgtaaaaccctcttgctgtgttcgccccaacctgacggcaaagtagtgtacacaagcctacagtgggcgagcctgcagtag

SEQ ID NO: 100958 - DNA, 933 bp, Artificial Sequence
  derived and/or modified sequence
atgctggtggtggaggtggccaacggccggagcctggtgtggggcgccgaagcagtgcaagctcttcgggagcgattaggtgtgggaggacgaacagtgggcgccctgccaaggggcccaagacagaattcacgactaggtctgccattgctcctgatgccagaggaggcgcggctgttagccgagatcggggcagtgacactggtgtcagcaccacgcccagatagccgacaccattcactggccctgacctcattcaagcggcaacaggaggaaagctttcaggagcagagcgcattagccgcagaggcccgggaaacacgccgacaggagttactagagaagatcacagaagggcaggccgcgaaaaagcagaagttagagcaggcctccggggcttcaagttcccaggaggccggtagctcgcaggcagctaaggaggatgaaacttcagatggccaggccagcggagagcaggaggaagctggaccaagctctagccaggccgggccaagcaatggtgtggctccactgcctagaagtgcactacttgtgcagttagctaccgctcgccctcgtccagtgaaagccaggcctttggactggcgggtgcagtcaaaggactggccccatgccggaaggcctgcccatgaactgagatacagcatatatagagacctgtgggaacgcggcttcttcctgtccgccgcaggcaagttcggtggagactttctcgtgtacccgggtgaccctctgcggtttcacgcacactacatcgctcagtgttgggctcctgaagacacgattccactgcaggaccttgtggcggcgggccgcctgggaacaagcgtgcggaaaacactgctgctctgtagcccgcagcctgatggtaaagtggtatataccagtctgcagtgggccagcctgcagtag

SEQ ID NO: 100959 - DNA, 933 bp, Artificial Sequence
  derived and/or modified sequence
atgttagtcgtcgaggttgccaacggacggagtctcgtatggggcgctgaggccgtgcaagcactcagggagagactgggcgtggggggacggacagttggtgctctgccacgcggtcctaggcagaactcccgacttggattgcccctgctcctcatgccggaggaagctcggctgttggccgaaatcggggcagttacgctggtttccgcgccacggcctgacagccgacatcattccctggccctgacatcattcaaacgacaacaggaggagtctttccaagagcaaagcgccctggctgccgaggctcgggaaacgcggcgtcaggaactcctcgagaaaattactgaaggtcaagcagccaagaaacaaaaactggaacaagcttctggcgcatcgtcgagccaagaggcgggtagcagtcaagcagcgaaggaagatgaaacgtctgatggacaggcctctggggagcaggaagaggcgggtcccagcagctcccaagccggtcctagcaacggagtggcccctctcccaaggagcgcacttttggtgcagctggccaccgccaggcccaggcctgtgaaggctcggccacttgattggcgggtgcagtctaaagattggccacatgctgggcgtcccgctcatgagctgagatacagcatctacagagacctttgggaacgcggattcttcctgagcgccgctgggaaattcggtggggattttctcgtgtaccccggtgatccgctcaggtttcatgcccactacattgcgcagtgctgggctcctgaggacacaattccccttcaggatttggtggcagcaggcagacttgggacatccgtgcgcaagacattgctgctctgctcccctcagcccgatggtaaggttgtttatactagcctgcagtgggcctctcttcagtag

SEQ ID NO: 100960 - DNA, 933 bp, Artificial Sequence
  derived and/or modified sequence
atgctggtggtagaggtcgccaacgggaggagcttggtctggggcgctgaagcggtacaggcactccgggaaaggctgggagtcggaggcaggacagtgggtgcactgcccagaggcccacggcaaaattcccgattaggcctgccactgctgttgatgcccgaagaggccaggctgctggccgagatcggggcagtgacgttagtcagcgccccacgacctgatagtcggcaccactccctggctcttaccagcttcaaaaggcagcaggaggagagttttcaagaacagagcgcgcttgctgcggaagctcgcgagacccgacgccaggagctgctggaaaaaataactgaggggcaggctgccaagaaacaaaaattggagcaggcaagcggcgcatcctcctcccaagaggccggttccagtcaagcggcaaaagaggacgaaacttcggatggccaggcatccggagagcaggaagaagctgggccttccagcagccaggccggaccatctaatggcgtcgctcccctaccacggagcgcactgctcgtgcaactcgcgactgcgagacctaggcccgtgaaggcccgaccactcgattggagagtgcagagcaaagactggccacacgcaggccgaccggctcacgagttacgttacagcatctatcgagatctttgggagcgtggatttttcttatccgctgcaggcaaattcggaggagattttctggtgtacccgggtgatccccttcgtttccatgcacattacatcgcccagtgttgggcaccagaagacacaattccattgcaggacctggtggctgccggtcggttggggacatcggtccggaaaacccttcttctttgtagccctcaacccgacggtaaggtcgtctacacctccctgcagtgggccagtcttcagtag

SEQ ID NO: 100961 - DNA, 933 bp, Artificial Sequence
  derived and/or modified sequence
atgctggtcgttgaggtagccaacggcagatcgttggtctggggggcagaggccgttcaggcactgcgggaacggctcggcgtggggggtaggaccgtaggcgcactccccagaggtcctcgacagaacagccggctagggctgccgctactgctgatgccggaggaggccaggttgctggctgagattggtgccgtgaccctcgtgagcgctccgaggcctgactctcgtcatcattcactggcattgacgtccttcaagcggcagcaagaagagagtttccaggagcagagcgccttagcagccgaagctagggagacgaggcggcaggagttgctcgaaaaaattaccgagggccaagcagctaaaaagcagaagctggagcaggcttccggcgcttcttcttcccaagaagcgggttcgtcccaggcagctaaagaagacgaaacgagcgatgggcaggcctctggtgagcaggaggaggccggtcctagctccagtcaggccggacctagcaatggcgtggcccctctccccaggtccgcactcctggtgcagctggcgactgccagaccaaggcctgttaaggctcggccactggattggagggtacagagcaaagactggccccatgcgggtcgccctgcccacgaactgcggtactccatctatagggatctgtgggagcgcggtttctttctcagtgctgccggaaagtttggaggggactttttggtgtatcccggagaccctctgcggtttcacgctcattatatagcccagtgctgggcccctgaggacactatcccgcttcaggacttggtggctgctggcagacttggcacttctgttcggaagaccctgctcctgtgctcaccccagcctgatgggaaagtggtgtatacaagtcttcagtgggcatccctccagtag

SEQ ID NO: 100962 - DNA, 933 bp, Artificial Sequence
  derived and/or modified sequence
atgcttgtagttgaggtggctaatggacggtcactagtgtggggcgcagaggccgtacaggccctacgggagcggttgggggtggggggaaggactgtaggggcactccccaggggaccaagacagaattcccgtttgggactacccttgcttctgatgcccgaggaggctcggctcttggcagaaatcggggcagtcactctggtctcggcaccacgcccagattcacgccaccattctctcgcactcacgtccttcaagagacagcaggaggagtcctttcaggaacaaagtgcgctcgccgcagaagctagggaaactcgaagacaggaactacttgagaaaattactgagggacaggctgcaaagaaacagaagctggagcaggcctcgggagcaagtagttcgcaggaagccggaagctctcaggcagccaaagaggacgaaacaagtgatggacaggcctctggagagcaggaggaggcaggtccaagctctagccaagccggaccctccaatggagtggccccactaccgagatctgctctgctcgtgcaactggccaccgcacgccctcggcctgttaaggcccgtccgctcgactggcgtgtccagtctaaggattggcctcatgctgggcgtcctgctcatgaactgcggtactccatatatcgggacctgtgggaaagaggctttttcctgagtgctgccggaaaattcggcggtgactttttagtttacccaggggatcccctgagattccatgctcactatatagcccaatgttgggctccagaggacacaatcccactccaagacctagtggctgcaggcaggcttggtacaagcgttcgcaagactcttctcctctgcagtccacaaccagatggcaaagttgtgtatacctctctgcagtgggccagcttacagtag

SEQ ID NO: 100963 - DNA, 933 bp, Artificial Sequence
  derived and/or modified sequence
atgctggtagtggaggtggcaaacggacgctccctggtttggggagccgaggcagtccaggctctcagggagaggctgggtgtgggtggaagaaccgtaggcgcattacctcgcggtccccgtcagaattcccgtctgggcttacctctgctgttgatgcccgaggaggctaggctcctggccgagattggtgccgtgacactagtctcagctcccagacctgatagtcgacatcactcactcgcccttacgtcatttaaaagacagcaagaggaatcctttcaggaacagagtgccctggccgcagaggcaagagagacccggcgacaggagctcttggaaaagatcacggaaggccaagctgcaaaaaagcagaagctggagcaggcgtcaggcgcaagctcctcccaggaggccggttcctctcaggcagctaaagaagacgaaaccagcgacgggcaggcaagcggcgagcaggaggaggctgggccatcttcttctcaggctggaccaagcaacggtgtagcaccgcttccaaggagcgctctgctagtccagttagcgaccgcaaggccccgtccggtgaaggcaagaccgcttgattggagagtgcagtcaaaggattggccccacgcgggaaggcccgctcacgagctgcgctacagtatttatagggacttgtgggagcgcggtttttttctatctgctgccggaaaattcgggggagattttctagtatacccaggagatccgctcagatttcacgcacactatattgcgcagtgctgggcacccgaggacaccatacccttacaagacctggtggcagccggtagactgggtacaagcgtacggaaaactttactgctgtgctcccctcagcctgatggcaaggtcgtgtacacttccctgcaatgggctagcctgcagtag

SEQ ID NO: 100964 - DNA, 933 bp, Artificial Sequence
  derived and/or modified sequence
atgctggtggtggaagttgcaaatgggaggagcttggtctggggcgcagaggccgttcaggccctcagggagcgcttgggtgtcggtggtcgcacagtaggagcactccccagagggccacgccagaacagcaggttgggtctcccactgctgctcatgccagaagaggccaggttgctggccgagattggcgcagtgacgctagtttcagcgcctaggccagatagccgtcatcattcattagcgctgaccagctttaagcggcaacaggaggaaagcttccaggagcagtcagccttggccgctgaagcgagagaaactcgacgacaggagcttctggagaagatcaccgaaggccaggcggcaaagaagcagaaactagagcaggctagtggtgcttctagctcacaggaagcaggctcatcacaagccgcaaaggaagacgagaccagcgatgggcaggcgtccggggagcaggaagaagcgggacctagttctagtcaggcgggacccagcaatggggtggccccactgccgaggagcgccctacttgttcagctggcaacagccagaccgaggcctgtgaaggcaaggcccctggactggcgcgtccagagcaaggactggcctcacgcgggtcgccctgcgcacgaactcaggtacagtatctaccgcgatctgtgggagcggggattttttttatccgccgcagggaaatttgggggagatttccttgtgtatcctggcgaccccttacggttccatgcacactatatcgcacaatgctgggccccagaggataccattcccttgcaggatctcgtggctgctggccgtctgggaacatcagtgagaaaaacactcctactgtgttccccccagcctgacgggaaggtcgtctacacatccttgcagtgggcaagcctgcagtag

SEQ ID NO: 100965 - DNA, 933 bp, Artificial Sequence
  derived and/or modified sequence
atgctggtggtcgaggtggccaatggccgatccctggtatggggcgcagaggcggtgcaagccctgagagagagactgggggtgggcggacgcactgtaggcgctctaccccgtgggcctaggcaaaattccagactcggcctcccactcctgctgatgccagaagaggcaagactgctggccgagataggagctgtgacattggtgtccgccccaaggccggactcacggcaccactctctggcgttgacatccttcaagagacaacaggaggaatcttttcaggagcagtcggctctggcagcggaggctcgggagactcgtaggcaggagttgttggagaaaattaccgaaggtcaggctgccaagaagcagaaactggaacaggcttccggcgcatcttcctcccaagaggccggtagcagtcaggccgctaaggaagacgagactagcgatggtcaggcaagcggagagcaggaagaggcaggtcctagttcctcacaggctggccctagtaacggcgtggctccccttccgagatctgcgcttctggtgcagctggcaacagcacgtccacgtcctgtcaaagccagaccccttgactggagagttcagtcgaaggactggccgcacgcagggcgacccgctcatgagctccggtacagcatctaccgagacctgtgggagcgtgggttcttcctgagcgccgctggtaaatttggtggtgatttcttagtctaccctggcgacccactacgttttcacgcgcattatatcgcacagtgctgggctccagaagacacgatcccccttcaggacctggtggctgcagggaggctcggcacgtccgttcgcaagacattgctcctctgctccccccagcctgacggaaaggtcgtttataccagtttacaatgggcctccctgcagtag

SEQ ID NO: 100966 - DNA, 933 bp, Artificial Sequence
  derived and/or modified sequence
atgctggtcgtggaggttgcaaatggcaggtccttggtttggggcgcagaggccgtgcaggccttgcgggagcgattaggagttggcggacgcacagtgggcgctctgcctagggggcctcgccagaactccagacttggcttacctctcttattgatgcccgaggaggcccgactcctggccgaaattggagcagtgacacttgtgtccgctccaagaccagactccaggcaccacagtttggccctcacgtcttttaagagacagcaggaagagtcctttcaagaacagtccgcgttagccgctgaagcaagagagacccgaaggcaggagctcttggagaagattacagagggccaagccgctaaaaagcagaagcttgaacaagcgagcggtgccagttctagccaggaagcgggatcttcacaggcagcaaaggaggacgaaacgtccgacggccaggccagcggcgagcaggaggaagcaggcccaagctcaagtcaggcgggtcccagcaacggcgtagcaccgttgccaaggagcgccttgcttgtccagctggcaaccgcaagacctcgccctgtgaaggcgaggccattagattggcgggtgcagagcaaagactggccacatgccggtaggcctgcacacgaactgcgttattcgatttaccgcgacctgtgggaacgcggatttttccttagcgctgccggaaaatttgggggagacttcctcgtgtatccaggtgatcctctccgtttccacgcccactatatcgctcaatgctgggctccggaggacacaatccccctccaggacctggttgcggctggcagattgggaaccagcgtgcgaaaaaccctgctcctttgctcaccccagccagacggaaaagtggtctacacctctctgcagtgggccagcctgcaatag

SEQ ID NO: 100967 - DNA, 933 bp, Artificial Sequence
  derived and/or modified sequence
atgctcgtggttgaggtggccaatgggaggtccctcgtctggggagctgaggccgtgcaagcgttacgggagagactaggagttggcggtagaacagtcggagcactgcccagggggccaaggcaaaactctcgcctagggctacctctgctgctcatgcctgaagaagccaggcttctggccgagatcggcgctgtcaccctggtgagtgccccacggccagactcaaggcatcactcattggcccttacgagtttcaaaaggcagcaagaagagtcttttcaagaacagtccgctctggctgctgaagcacgggaaacaagacgacaggagctgctagagaaaattacggaaggccaggcagctaagaagcagaaacttgagcaagcctctggagccagcagctcccaggaagcgggaagttcccaagccgctaaggaggacgaaactagtgatggacaggcatccggcgagcaagaggaagcaggcccatcatcttctcaggccggaccatctaatggtgtggccccactcccaaggagcgctctgctggtccaactcgcgaccgcccgtcccaggccagtgaaagcccgacctcttgactggcgtgtccaatctaaagactggcctcacgctggccgtccagcccatgagctgcggtactcgatctaccgcgacctgtgggagaggggcttttttctgtccgccgcaggaaagtttggtggggatttcttagtgtaccccggtgatccactgagatttcacgcccattatatcgcacagtgctgggctccggaggatacaatccccctacaggacctcgtggctgctggtcgtctcggtacttccgtccggaagaccttgctgctgtgctctccccagcccgatggtaaggtcgtctacaccagccttcagtgggcttctctccaatag

SEQ ID NO: 100968 - DNA, 933 bp, Artificial Sequence
  derived and/or modified sequence
atgctggtggtcgaggttgcaaacggacgttctctggtgtggggtgctgaagcagtccaggcactccgggaacgtctaggagttgggggtaggactgttggtgcactgcccagaggaccaagacagaactcaagactcggcttgcccctcctgctgatgccagaggaggcccgactcctcgcagaaatcggagcggtaacacttgtgagcgcccctcggccagactctcggcaccactcattggccttgacaagttttaaacgccaacaggaggaatcctttcaggaacagtcggccctcgcagccgaggctcgggagacacggagacaggaactgctggaaaaaatcacagaaggccaagcggcaaaaaagcaaaaactcgagcaggccagtggggcttcaagttctcaagaggcgggaagttctcaggccgctaaagaggatgagacttccgatgggcaggcctctggtgagcaagaagaagccggacctagctcaagccaggcgggaccctctaatggcgtagctcctttacctcggtcggctctgctggtgcaactggccactgcaagacctagacctgtgaaagccagaccccttgattggcgggtgcagtcaaaggactggccccatgctggtcggcctgcccatgaacttaggtactcgatctacagggatttgtgggaacggggattttttctgtctgccgcaggcaagtttgggggtgattttctggtttaccccggagaccctctgcgtttccacgcccactacatcgcacagtgttgggccccagaggacacaattcccctacaggaccttgtggccgcaggacggctcggaaccagcgttagaaaaactcttcttctttgctcccctcaacctgatggtaaagttgtgtacacaagcctgcagtgggcgagcctgcaatag

SEQ ID NO: 100969 - DNA, 933 bp, Artificial Sequence
  derived and/or modified sequence
atgctggtcgtagaagtcgcgaacggaaggtcattagtgtggggagccgaggcggtccaggcactgagggagaggctcggtgtcggaggtagaaccgtcggtgctctgccccgtggtcctcggcagaatagccgcctgggcttgccacttttgctgatgccagaagaggccaggctgctggctgagattggcgctgtgaccttggtgtctgcaccccgacccgattcaaggcaccactctctggccttgacgtcctttaagaggcagcaagaggaatcttttcaggagcaaagtgctctggcagccgaagcacgcgagaccagacgccaagagctgttggaaaaaatcaccgagggtcaggccgctaagaagcagaagcttgagcaggcctcaggcgcaagtagcagccaagaagctgggagcagccaagccgctaaggaggacgaaacatctgatggacaggctagcggggaacaggaagaggcaggcccaagtagttctcaggctggaccctctaacggggtcgctccattacccagatccgctctgctagttcagctggcaaccgcaaggccgaggccagtgaaggctcggccactagattggcgtgtccaaagcaaggattggcctcacgctggaagaccagcacacgagcttcgctactctatttatagggatttgtgggaaagaggattcttcctgagcgccgctggaaagttcggaggggatttcctggtctatcccggagatcctctgagatttcacgctcactacatcgctcagtgctgggccccagaagacactattcctctgcaagacctggtcgcagctggcaggcttgggacttcggtcagaaaaaccctcctgctgtgttcaccacagcccgatgggaaggtggtttatacctcattgcagtgggcttctctgcagtag

SEQ ID NO: 100970 - DNA, 933 bp, Artificial Sequence
  derived and/or modified sequence
atgttggtagtggaagttgccaacggcaggagcctggtatggggagctgaagctgtgcaagcgttgcgggaaaggctaggtgttggcggtcggaccgtaggtgctttgcctcgtggtcccaggcagaattccagactggggctgcctcttctgctgatgccggaagaagcccgactccttgctgagattggagccgtaacccttgtctccgctcccagacccgattcacgacatcactccctcgccctgaccagctttaagagacagcaggaggagtccttccaggaacagagcgctttggccgctgaggccagagaaacacgtcgccaggagcttctggaaaaaattactgaaggccaagctgcaaaaaaacagaaactcgagcaagcttccggagccagctctagccaggaggccggtagcagccaggcggctaaagaagatgaaacttccgatggacaggctagcggggagcaggaagaggcaggcccaagtagtagccaggccggtccctccaacggcgtagctcccctgcccagaagtgctctgttggtgcaactggctacggctcggccacggcctgtgaaagcccgtcctctggactggcgtgtgcagtctaaggattggccacacgcaggccgacctgctcacgagttacgttatagcatttaccgggacctgtgggaaagaggttttttcttgtcggctgccggaaagtttgggggagattttctcgtgtatccaggcgaccccctccggttccacgcccactacatagcccagtgctgggctcccgaggacacgataccacttcaagacctcgttgccgctggcagactcgggactagcgtgcggaagacactcctgttatgtagccctcagcccgacggcaaggtagtatatacgtccctgcagtgggcctcactccagtag

SEQ ID NO: 100971 - DNA, 729 bp, Artificial Sequence
  derived and/or modified sequence
atgctggtggtggaggtggccaacggcagaagcctggtgtggggcgccgaggccgtgcaggccctgagagagagactgggcgtgggcggcagaaccgtgggcgccctgcccagaggccccagacagaacagcagactgggcctgcccctgctgctgatgcccgaggaggccagactgctggccgagatcggcgccgtgaccctggtgagcgcccccagacccgacagcagacaccacagcctggccctgaccagcttcaagagacagcaggaggagagcttccaggagcagagcgccctggccgccgaggccagagagaccagaagacaggagctgctggagaagatcaccgagggccaggccgccaagaagcagaagctggagcaggccagcggcgccagcagcagccaggaggccggcagcagccaggccgccaaggaggacgagaccagcgacggccaggccagcggcgagcaggaggaggccggccccagcagcagccaggccggccccagcaacggcgtggcccccctgcccagaagcgccctgctggtgcagctggccaccgccagacccagacccgtgaaggccagacccctggactggagagtgcagagcaaggactggccccacgccggcagacccgcccacgagctgagatacagcatctacagagacctgtgggagagaggcttcttcctgagcgccgccggcaagttcggcggctag

SEQ ID NO: 100972 - DNA, 933 bp, Artificial Sequence
  derived and/or modified sequence
atgctggtagtggaggtggccaatggtagaagcctggtatggggtgccgaggcagtccaggccctgcgtgaacgtctaggggtcggtggcagaacggtgggggcactgcccagaggcccacgtcagaatagcaggctcggactgcccctcctactgatgcccgaggaggctcggctgcttgcagagatcggcgctgtgactctagtttctgccccacgcccagacagccgtcaccacagcctggccctgacctctttcaagagacagcaggaagagtccttccaagagcaatcagcactcgccgccgaggctcgcgagacccggcgccaagaattactcgaaaagatcaccgaggggcaggctgccaaaaaacagaagctcgaacaggcaagtggtgcctcctcaagccaagaggcagggagttcgcaagccgctaaagaggacgaaacatcggacggccaggcaagcggcgaacaggaggaggccgggccatcttcaagtcaggctgggccatctaacggcgttgcaccgctgcctcggagtgctcttctggtgcagctcgccaccgcaaggcctcggccagtaaaagctcgtccactcgattggcgagtgcagtctaaggattggccacacgccggacgacctgcccacgaattacggtatagtatctatagggatctgtgggagcgcggcttctttctgagcgctgctggcaagttcggcggcgattttctggtgtatcccggtgaccccctccgcttccacgcccactacatagcgcaatgttgggcacctgaggatactatccctctgcaagacctagtcgctgctggcaggctgggcacgagcgtgcgcaaaacgttgttgctctgcagtccacagcctgacggaaaggtggtgtacactagcctccagtgggctagcttacagtag

SEQ ID NO: 100973 - DNA, 933 bp, Artificial Sequence
  derived and/or modified sequence
atgctcgtggtggaagtggccaacggaaggagcctagtttggggagctgaggctgtccaagctctgcgggagcggctcggagtgggcggacggacagtcggcgctctgcctcggggcccccggcagaactctcgcttaggactgcccctgcttttgatgccagaggaagccagacttctggccgagattggagctgtcaccctggtttctgcacctcggcctgattcgagacaccactcccttgccctgacaagctttaagagacagcaagaggaatcattccaggagcagagcgccctggccgccgaggctagggaaacacggcgacaagagttgctcgagaagattacagagggtcaagctgccaaaaaacaaaagctggagcaggcctcgggcgcctccagtagtcaggaagccggctcgtcacaggcggccaaagaggatgagaccagcgatggacaggcgagtggagagcaagaagaagccggaccttcctcaagtcaggcagggccgagcaatggcgtggcaccattacctcggagcgcactcctggtgcaactggcaaccgctcgccctcgacctgtaaaggcgcgccctctagactggagagtacaatccaaggactggcctcacgccgggagaccagcccatgaactgaggtatagcatctacagagacctctgggagcgcggttttttcctcagcgcggcaggcaagttcggtggagacttcctcgtctatcctggagaccctctgcggttccatgctcactatatcgcccagtgctgggcgcccgaggataccataccactgcaggacctggtggccgcaggcaggctgggcaccagtgtgaggaaaactcttctcctgtgtagtccacagccagatggaaaagtcgtttataccagtctgcaatgggccagcctgcagtag

SEQ ID NO: 100974 - DNA, 933 bp, Artificial Sequence
  derived and/or modified sequence
atgttggtcgtagaggtggccaacggccgaagcttagtttggggtgcagaggccgtgcaggcgttgcgggagcggcttggagtgggtggtcgaaccgtaggcgcactcccgagaggcccccgtcagaattcacgcctcggtctcccactgctgctgatgccggaagaggcccggctgctagcggaaatcggggccgtgactctggtctcggcaccaagaccagactctcgtcaccacagcttggctttaactagttttaagaggcagcaggaggagtcctttcaggagcagtcagcgcttgcagcagaagcccgcgagactcggcgtcaagaactgcttgaaaagattacggagggacaggctgccaagaagcagaaactggaacaggcctctggcgcatcttcttctcaggaggccggaagctcacaggccgccaaggaggatgagacctcagatggccaggcgtccggagaacaagaagaggcaggcccctcatcttcccaagcagggcccagcaatggcgtggccccactcccaagaagcgcattgctagtccagctggcaacggcccggcctaggccagtgaaagctcggcccttagattggcgggtccaatcaaaagattggccccacgctggccgaccagcacacgagctgcggtattcaatttaccgtgatctctgggaacgcggtttctttctgagtgctgccgggaagttcggaggcgactttctggtctaccccggcgatcccctgcggtttcacgcccattatattgcacagtgttgggcaccggaagacaccatacccctccaggatctcgttgccgctgggagactcggaactagcgtgcgaaaaaccctcctgctgtgcagcccacaacccgacggtaaagtggtctatacatctctccagtgggctagccttcagtag

SEQ ID NO: 100975 - DNA, 729 bp, Artificial Sequence
  derived and/or modified sequence
atgctggtggtggaggtggccaatggtaggtctttggtttggggggccgaagctgttcaggcgctccgagagcgcctaggtgtgggagggcggaccgtgggcgccctgccaagggggccaagacagaattcacgcctgggccttccactcctcttaatgcctgaagaagctcgtcttttggctgaaatcggagccgtaacactcgtgtctgctccgcggcctgattcccgtcaccacagcctagccctgacaagtttcaaacgacaacaagaggaaagtttccaggagcagtccgccctggcagcagaagctcgcgaaacacgcaggcaggaacttctggagaagatcacagaaggccaggccgcaaagaagcagaagcttgaacaggctagcggggccagctccagccaggaggcaggaagctcacaagctgctaaagaggacgagacatccgatgggcaggcctcaggggagcaggaagaagcgggacctagcagtagtcaggctggcccctcaaatggcgtggcccccctacctcggtcggctctgctggtgcagctcgcgaccgccaggccccggcccgtcaaagctagaccactggattggcgtgttcaatcaaaggactggccccacgcagggcggcccgcccatgaactcagatactcaatctatcgcgacttgtgggaacgcgggttttttcttagtgccgcaggcaaattcgggggttag

SEQ ID NO: 100976 - DNA, 729 bp, Artificial Sequence
  derived and/or modified sequence
atgctggtggtggaggtggccaacggccgcagcctggtgtggggcgctgaggccgtgcaggccctgcgggagcggctgggcgtgggcggccgcacagtgggcgccctgccccggggcccccggcagaacagccggctgggcctgcccctgctgctgatgcctgaggaggcccggctgctggccgagattggagctgtgaccctggtgtctgcccccaggccagacagccgccaccacagcctggccctgaccagcttcaagaggcagcaggaggagagcttccaggagcagagcgccctggccgctgaggcccgggagacccggcggcaggagctgctggagaagatcacagagggccaggccgccaagaagcagaagctggagcaggccagcggggccagcagcagccaggaggccggcagcagccaggccgccaaggaggatgagaccagtgatggccaggccagcggggagcaggaggaggccggccccagcagcagccaggccggccccagcaatggagtggcccccctgcccaggtctgccctgctggtgcagctggccacagcccggcccaggcctgtgaaggcccggcccctggactggagggtgcagagcaaggactggccccacgccggccgcccagcccacgagctgcgctacagcatctacagagacctgtgggagcggggcttcttcctgtctgctgctgggaagtttggaggatag

SEQ ID NO: 100977 - DNA, 933 bp, Artificial Sequence
  derived and/or modified sequence
atgctggtggtggaggtggccaacggccggagcctggtgtggggcgcagaggcggtgcaagccctgcgtgaacgtttgggagtcggtggtagaaccgtgggggccctgccgaggggacccaggcaaaattccagactaggattgccactgctactgatgcccgaggaggccagattgctggccgaaattggcgcggtcacattagtctccgcccctcggcctgattctcgccatcatagtttggctctgaccagcttcaaacgtcaacaggaagaaagcttccaggaacaaagtgcactggccgctgaagcacgcgaaacccgccgccaggagttgctggagaaaatcaccgaagggcaggctgcaaagaagcagaaactcgagcaagcttctggtgcctcatctagccaggaggcggggtcctctcaagccgctaaagaagatgagacgtctgatgggcaggcttctggtgaacaggaagaggctggaccatcgtctagccaggctggaccatctaatggggtcgccccgctgccgcgctctgcactacttgtgcagttagctacggcacggccgagacccgtcaaggcccggccgttagactggcgggtgcagagtaaggactggccccacgccgggagacccgcacatgagctcaggtacagtatataccgcgacctgtgggagcgggggttctttctgtcagccgcaggtaagttcggaggagactttctggtgtaccctggagacccactgcgtttccacgcccactatatcgctcaatgttgggccccagaagacacgattcctctccaggacctggtcgccgctgggcggctcggcacctccgtcaggaaaaccttgttgctgtgtagcccccagcccgacgggaaagtggtttacacaagcttgcagtgggccagtctgcagtag

SEQ ID NO: 100978 - DNA, 933 bp, Artificial Sequence
  derived and/or modified sequence
atgctggtggtggaggtggccaacggccggagcctggtgtggggcgccgaagctgttcaggcactgcgcgagcgattgggggtgggaggacgcaccgtaggagctcttccacgcggtccgcggcaaaacagtagactcgggttgcccctcttgttaatgcctgaggaggctcggttactggcggagattggtgcagttactctggtgtccgcccctcgaccagatagcagacaccacagtctagccctgacctctttcaaacggcagcaggaggagagctttcaggagcagtcagctctcgcagcagaggcccgcgagactagacggcaggaactgctggagaagatcaccgaggggcaggccgcaaagaagcagaagctggaacaggcatccggtgcaagttctagtcaggaagcgggctctagccaggccgcaaaagaggacgaaacatctgatggccaggcctcaggggagcaagaggaggcgggaccttctagttcccaggccggaccctccaatggtgtagcccctctcccccgatcagctctcctggtgcagctcgcaacggcgcggcctcgccctgttaaggctcgtcccctggattggcgggttcagtccaaagattggccgcatgcaggaaggcccgctcatgagctgaggtacagcatatatcgcgacctgtgggagcgggggttttttttatctgccgcagggaaatttgggggggatttccttgtgtatcccggggatcccctacgattccacgcccactacatcgcacagtgctgggccccagaagatactattccccttcaagacctggttgccgccggccgcctaggcacctctgtgaggaagactctgctcctgtgcagtcctcagcccgatggcaaagtggtatatacctccctacagtgggccagccttcagtag

SEQ ID NO: 100979 - DNA, 933 bp, Artificial Sequence
  derived and/or modified sequence
atgctggtggtggaggtggccaacggccggagcctggtgtggggcgcagaggctgtgcaggcgctgcgagagcgtctgggggtcggtgggaggaccgttggcgcattacctcgcggcccaagacagaacagtcggctggggttgcccctactgcttatgcccgaggaggctaggcttctggccgaaattggagcagtcactttagtttcagcaccaaggcctgacagtcgccaccacagtcttgctctgacctccttcaaaaggcagcaagaggaatcttttcaggagcaatcagcactggcagcagaagccagagaaacgagaagacaagaactgctagagaagatcacggaaggccaggccgcgaagaagcagaagttagagcaggctagtggtgcttctagtagccaggaggctggttccagtcaggcagctaaggaagacgagacaagtgacggccaggcatcgggagaacaggaggaggcggggccaagcagttctcaagccggcccgtcaaacggcgtcgcgcctcttccacgttccgcccttctcgtgcaacttgccactgccagaccaagaccagtgaaggcccggcctctggactggagggtgcaatccaaagactggccccacgccgggagaccagcacacgagcttcggtattcaatctatagggatctctgggaaagggggttcttcctcagtgccgctggcaagtttggcggagactttctggtatacccaggcgatccattgcgctttcatgcacactacatcgctcagtgttgggcccctgaggacaccatacccctgcaggatttggtggctgctgggcggttgggaacgtctgttcggaagaccctgctactgtgttccccacagccagacggaaaggtggtgtataccagcttgcagtgggcctccctgcaatag

SEQ ID NO: 100980 - DNA, 729 bp, Artificial Sequence
  derived and/or modified sequence
atgctggtggtggaggtggccaacggccggagcctggtgtggggcgccgaagctgtacaggctttgcgggagcggctaggcgtgggtggacgaactgttggggctcttcctcggggaccccgacagaattcaagacttggcctcccccttcttctgatgcctgaggaggccagactccttgcagaaattggggccgttactttggtgtcagcaccacggccagatagccggcaccactcccttgcactgacatcctttaagcgccagcaggaggagagcttccaggaacagtccgcacttgccgctgaggcccgtgaaactaggcgccaggagttgttggagaaaattacagagggacaggctgctaagaagcaaaagctagagcaggcttcaggcgctagctccagccaggaggccgggtctagccaggctgccaaggaggacgagacctctgatggtcaggcgagtggggagcaagaggaggccggccctagcagctcccaggccggaccctcaaacggcgtggcaccattgccgagatctgcgcttttagtgcagcttgccactgcacgacccagacccgtgaaggctcgccctctggattggcgagtacagagtaaggattggccccacgcaggccggcccgcgcatgagttgcgctactccatttatcgggatttatgggagagggggttctttctgtccgccgccggcaagttcggcgggtag

SEQ ID NO: 100981 - DNA, 933 bp, Artificial Sequence
  derived and/or modified sequence
atgctcgtcgttgaagttgctaatgggcgttccctggtgtggggggctgaggccgtgcaagccctgagagaacgcctgggggtgggcggtcgcacagtcggtgcattaccacgcggacctagacagaatagcagactgggattgccactgttacttatgccagaggaggctcgcctattggcggagataggcgctgtcaccttagtgtcagcccctcgccctgattccaggcatcactcattggcgctgacctctttcaagcgccagcaagaagagtcgttccaggaacagagtgcacttgctgcggaggcacgggagaccagaaggcaagagctgttggaaaagattactgagggccaagccgctaaaaaacagaagctagaacaggcctcaggtgccagctcctcgcaagaggccggttcttcacaagcagcgaaagaggacgagacctcagacggacaggcttctggggaacaggaggaggccggaccatcctcttcacaggcagggcctagcaatggtgtggccccactccccagatctgcactgctcgtccagctggcaacggcgaggccacggcctgtcaaagcaaggcccctggactggagagtccaaagcaaagattggccccacgctggaagaccagcgcacgagcttaggtacagcatctatcgcgacctgtgggagcgcggattttttctgtctgcagcaggaaaatttggcggagacttcctcgtgtaccctggagaccccctcagattccacgctcactatatcgcccagtgctgggcacccgaggataccatccctcttcaggacctcgtggccgctgggcgactcgggaccagcgttcggaaaaccttgctgctgtgttccccccaacccgacggaaaggttgtgtatacatcgctgcagtgggctagtttgcagtag

SEQ ID NO: 100982 - DNA, 933 bp, Artificial Sequence
  derived and/or modified sequence
atgctcgtcgttgaggtcgccaacggcaggtccttggtttggggcgcagaagcagtccaagcacttcgtgaacggctgggcgtgggcggtcgcacagtcggcgctcttccccgaggaccaagacagaactcccgcctcgggctcccactgctcctcatgcctgaggaggctcggcttcttgccgaaattggagcagttacacttgtttccgcaccaagacctgattcccgccaccactccctggccctgacctcgtttaaaagacagcaagaggagagtttccaagagcagtccgccctggctgccgaagcacgggaaacccggcgtcaagagctactggagaaaattactgagggacaagcagcgaaaaagcagaagttagagcaggcctcaggcgcatcgagctcccaagaagcaggttctagccaggccgcaaaggaagacgaaacctctgatggccaggccagcggggagcaggaagaggctggccctagcagctcacaggcagggccttctaacggagtcgcccctttgcctcggtctgccttgctggtccagctcgctacggccaggcctcgccctgtcaaggcacgtccactggactggagagttcagtccaaggattggccacacgctggccgtccagcacacgagcttcggtacagcatctaccgagatttgtgggaacgcggattctttctctctgctgcaggtaagttcggaggtgattttctcgtttaccccggagatcctctgaggttccacgcacattacattgcacagtgctgggctcctgaggacacaatacctctccaggatctggtggcagccggacggctgggaaccagtgtcaggaagaccctgctactttgctctccccagcccgatggtaaggtagtgtatacgtccctgcaatgggcctctcttcagtag

SEQ ID NO: 100983 - DNA, 933 bp, Artificial Sequence
  derived and/or modified sequence
atgttggttgttgaggtggccaatgggagaagccttgtctggggggctgaggcggtgcaagcactaagggaacgcttgggcgtggggggacgaacagtcggggctctcccacgtggcccacggcagaattccagattaggactgccattgttgctgatgccggaagaggcccgactgctggctgagatcggcgctgtcacgctggtctcagcccctcgtccggattcaaggcatcactcactcgcactaacctcgtttaaacgtcaacaggaggagtcttttcaggagcagagtgccctggcagcagaagccagggagacgagacgacaagaattactagagaagatcacagaagggcaggctgccaagaagcaaaaactcgagcaggccagcggtgcctcttcaagccaggaagctggatcgtctcaagccgcaaaagaggatgagacgagtgatggacaagccagcggcgagcaggaagaggctgggccaagtagctcccaggctggacccagtaatggtgtagcacctcttccgcgttccgctctgttggttcaactcgccacagctaggcccaggcccgtgaaggctagaccccttgactggcgggtgcagagtaaggattggccgcacgcgggaagacccgctcatgaattacgatatagtatttatcgcgacctttgggagagaggattctttctgagcgctgcaggcaaatttggcggtgatttcctggtctatcctggcgaccctttacgcttccacgcccattacatagcacaatgttgggctcccgaggacacaatcccactccaagacttggtcgccgctgggagactgggcacatcagtgcgaaagacgctactactgtgctcgcctcagccagacggcaaggttgtctatacaagtctacaatgggcctctctccaatag

SEQ ID NO: 100984 - DNA, 729 bp, Artificial Sequence
  derived and/or modified sequence
atgcttgtggtggaagtggcgaacggaagatcgcttgtatggggtgccgaagcagttcaggctctaagggagcgactcggcgtgggcggtcgcaccgtaggggcactcccaaggggcccaagacaaaattctcggctcggcctcccactgctgctgatgcctgaagaggccagattgctggctgagatcggagctgttacgctggtcagtgcacctcgaccagattcaaggcatcactccttagcactaactagctttaagaggcaacaagaggaatctttccaggaacaatctgctcttgcagccgaggctagggagacacgccgtcaggaactcctggagaagatcacagaaggccaggctgccaagaagcagaaactggagcaggcatccggcgcaagctcgagccaggaagccggtagttcacaggcagccaaagaggatgagactagtgacggacaggccagcggagaacaggaagaggccggaccctcgtcctcccaggccggaccctccaacggcgtcgctccactgcccaggtcagccttgctcgtacaactcgcaaccgctaggcccaggcctgtaaaagccaggcctctggattggcgcgtccaaagtaaagattggcctcacgccggaaggcctgcacatgagctgagatattcaatatatcgggatctctgggagcgagggttctttctttcggccgcaggaaaatttggcggatag

SEQ ID NO: 100985 - DNA, 956 bp, Artificial Sequence
  derived and/or modified sequence
cacaagcttcggtttacttcgtagatagttgggtacaagtgacgctaggatgataggcggagtcaacaggttcgccagatacccatgagtatttacaagggggcggggcgaaagcgacttgccctcaaaggggcggaaccccgagggccggcgtgcgcctacgggaccgggccagggtgacgatcctcaagttcccaagtagaggagaggaagcggcagagggaggaggatgctggtggtggaggtggcgaacggccgctccctggtgtggggagccgaggcggtgcaggccctccgggagcgcctgggtgtggggggccgcacggtaggcgccctgccccgcgggccccgccagaactcgcgcctgggcctcccgctgctgctgatgcccgaagaggcgcggctcttggccgagatcggcgccgtgactctggtcagcgccccgcgtccagactctcggcaccacagcctggccctgacatccttcaagcgccagcaagaggagagcttccaggagcagagcgccttggcagctgaggcccgggagacccgtcgtcaggagctcctggagaagattacggagggccaggctgctaagaagcagaaactagaacaggcttcaggggccagctcaagccaggaggccggctcgagccaggctgccaaagaggatgagaccagtgatggccaggcttcgggagagcaggaggaagctggcccctcgtcttcccaagcaggaccctcaaatggggtagcccccttgcccagatctgctctccttgtccagctggccactgccaggcctcgaccggtcaaggccaggcccctggactggcgtgtccagtctaaagactggccccacgccggccgccctgcccacgagctgcgctacagtatctacagagacctgtgggagcgaggcttcttcctcagtgcggctggcaagttcggaggtg

SEQ ID NO: 100986 - protein, 312 aa, Artificial Sequence
  derived and/or modified sequence
MLVVEVANGRSLVWGAEAVQALRERLGVGGRTVGALPRGPRQNSRLGLPLLLMPEEARLLAEIGAVTLVSAPRPDSRHHSLALTSFKRQQEESFQEQSALAAEARETRRQELLEKITEGQAAKKQKLEQASGASSSQEAGSSQAAKEDETSDGQASGEQEEAGPSSSQAGPSNGVAPLPRSALLVQLATARPRPVKARPLDWRVQSKDWPHAGRPAHELRYSIYRDLWERGFFLSAAGKFGGDFLVYPGDPLRFHAHYIAQCWAPEDTIPLQDLVAAGRLGTSVRKTLLLCSPQPDGFKSQEVSINLVYKCS

SEQ ID NO: 100987 - protein, 242 aa, Artificial Sequence
  derived and/or modified sequence
MLVVEVANGRSLVWGAEAVQALRERLGVGGRTVGALPRGPRQNSRLGLPLLLMPEEARLLAEIGAVTLVSAPRPDSRHHSLALTSFKRQQEESFQEQSALAAEARETRRQELLEKITEGQAAKKQKLEQASGASSSQEAGSSQAAKEDETSDGQASGEQEEAGPSSSQAGPSNGVAPLPRSALLVQLATARPRPVKARPLDWRVQSKDWPHAGRPAHELRYSIYRDLWERGFFLSAAGKFGG

SEQ ID NO: 100988 - DNA, 939 bp, Artificial Sequence
  derived and/or modified sequence
atgctggtggtggaggtggccaacggcagaagcctggtgtggggcgccgaggccgtgcaggccctgagagagagactgggcgtgggcggcagaaccgtgggcgccctgcccagaggccccagacagaacagcagactgggcctgcccctgctgctgatgcccgaggaggccagactgctggccgagatcggcgccgtgaccctggtgagcgcccccagacccgacagcagacaccacagcctggccctgaccagcttcaagagacagcaggaggagagcttccaggagcagagcgccctggccgccgaggccagagagaccagaagacaggagctgctggagaagatcaccgagggccaggccgccaagaagcagaagctggagcaggccagcggcgccagcagcagccaggaggccggcagcagccaggccgccaaggaggacgagaccagcgacggccaggccagcggcgagcaggaggaggccggccccagcagcagccaggccggccccagcaacggcgtggcccccctgcccagaagcgccctgctggtgcagctggccaccgccagacccagacccgtgaaggccagacccctggactggagagtgcagagcaaggactggccccacgccggcagacccgcccacgagctgagatacagcatctacagagacctgtgggagagaggcttcttcctgagcgccgccggcaagttcggcggcgacttcctggtgtaccccggcgaccccctgagattccacgcccactacatcgcccagtgctgggcccccgaggacaccatccccctgcaggacctggtggccgccggcagactgggcaccagcgtgagaaagaccctgctgctgtgcagcccccagcccgacggcttcaagagccaggaggtgagcatcaacctggtgtacaagtgcagctag

SEQ ID NO: 100989 - DNA, 939 bp, Artificial Sequence
  derived and/or modified sequence
atgctggtagtcgaggttgcgaacggccgctctcttgtgtggggagccgaggccgtgcaggcccttagggagcggctaggagtgggtggtaggaccgtaggtgctctgccacgtgggcctcgacaaaattccagattaggtctgcccctacttcttatgccagaggaagcaagactcctggctgaaattggggcggtgacattggtgtcagcaccgaggcccgattctagacaccatagtttggccttgactagctttaagcggcagcaggaagagtcatttcaggagcagtccgcactcgccgcagaagccagggagacgaggagacaggagctgctggagaaaatcacagaggggcaggccgcaaagaagcaaaagctggagcaggcttccggagctagcagctcccaggaggcagggtcatcacaggctgcgaaggaggacgaaaccagcgacgggcaagcctccggagagcaggaggaggctggcccgagcagttcccaggccggtccatccaacggcgtggccccacttccccggagcgcactgttggttcagttagccacagccagacctaggcccgtgaaggctaggcctcttgattggcgcgtgcagtcaaaagattggccccacgccggtcgcccagcgcacgagcttaggtactctatttatcgcgatctgtgggaacgcggcttctttctgagtgcagcagggaagttcggtggtgactttctcgtctaccccggagaccctctccgttttcacgctcactatatcgcacagtgctgggcccctgaagatacaattcccctccaggatctagtggccgctgggaggctaggtacttccgtgcggaaaacactgctactgtgtagtcctcagcctgacggttttaaatcacaggaagtgagcatcaatctggtgtacaaatgcagctag

SEQ ID NO: 100990 - DNA, 939 bp, Artificial Sequence
  derived and/or modified sequence
atgctggtggtggaggtggccaacggccgcagcctggtgtggggcgctgaggccgtgcaggccctgcgggagcggctgggcgtgggcggccgcacagtgggcgccctgccccggggcccccggcagaacagccggctgggcctgcccctgctgctgatgcctgaggaggcccggctgctggccgagattggagctgtgaccctggtgtctgcccccaggccagacagccgccaccacagcctggccctgaccagcttcaagaggcagcaggaggagagcttccaggagcagagcgccctggccgctgaggcccgggagacccggcggcaggagctgctggagaagatcacagagggccaggccgccaagaagcagaagctggagcaggccagcggggccagcagcagccaggaggccggcagcagccaggccgccaaggaggatgagaccagtgatggccaggccagcggggagcaggaggaggccggccccagcagcagccaggccggccccagcaatggagtggcccccctgcccaggtctgccctgctggtgcagctggccacagcccggcccaggcctgtgaaggcccggcccctggactggagggtgcagagcaaggactggccccacgccggccgcccagcccacgagctgcgctacagcatctacagagacctgtgggagcggggcttcttcctgtctgctgctgggaagtttggaggagacttcctggtgtacccaggggaccccctgcgcttccacgcccactacatcgcccagtgctgggcccctgaggacaccatccccctgcaggacctggtggccgccggccgcctgggcacctctgtgaggaagaccctgctgctgtgcagcccccagccagatggcttcaagagccaggaggtgtccatcaacctggtgtacaagtgcagctag

SEQ ID NO: 100991 - DNA, 939 bp, Artificial Sequence
  derived and/or modified sequence
atgctggtggtggaggtggccaacggccggagcctggtgtggggcgccgaggccgtgcaggccctccgggaaaggctgggtgttggcggtagaaccgtgggtgctctgccccggggtccaagacagaacagtaggctcgggctgcctctgctcctcatgcctgaagaggcgaggctgctggctgaaataggcgctgtgaccctggtatcagcccccaggccagactctcgtcatcattccttggcactcacttctttcaaaaggcaacaggaagagagtttccaagagcaatcagcactcgccgccgaagccagagagactagacggcaagagcttcttgaaaagattaccgagggccaggccgccaagaagcaaaaactggagcaggcttccggcgcctcgtccagccaggaggctggttccagccaggctgccaaagaggacgagacctctgacggacaggcatctggcgaacaggaggaggctggcccatcatcctctcaggccggcccttccaacggggtggcgccgctccctcgctcagcgctgctcgttcagctggcaactgctcggccgcgtccagttaaagccaggccactggactggcgcgtgcagagtaaggattggccacacgccgggcgtcccgcccatgagcttcggtactccatctacagagatctgtgggagcgcggctttttcctctccgccgccggtaagttcgggggggacttcctggtttatccaggcgaccctctgcgattccacgcgcactacattgctcagtgttgggccccagaggacaccattcctctgcaggacctggtcgctgctggaaggttgggaacgtctgtccgcaaaacgctcctattgtgtagcccacagccagacggatttaaaagccaagaggtgagtattaatctggtctataagtgcagttag

SEQ ID NO: 100992 - DNA, 939 bp, Artificial Sequence
  derived and/or modified sequence
atgctcgtggtggaggtcgccaatgggcgttccctggtgtggggggctgaggccgtccaagccctgagagagcggctgggcgtcggaggcaggactgttggagcactgcctcggggtccccgtcagaatagccgactgggcctgcctctgttgttgatgcctgaagaggcaagactacttgctgaaattggcgcagttactctagtgtccgctccgaggcctgactctcggcaccatagtctcgcactgaccagcttcaagaggcagcaggaagaaagctttcaggaacagtccgctctggcagcagaggccagagagacgagacggcaggaactcttggaaaagatcacagagggccaggccgctaaaaaacagaaactcgagcaggcgagtggagccagctctagccaggaggcaggaagttctcaggcggctaaagaagacgaaacctccgacggacaggcatcaggcgaacaagaggaggctggacccagtagctcccaggcaggtccatctaatggcgtcgctcctttgccgcgatccgcccttctggtacaactggccaccgcaagacctagacctgtaaaagcgcgacccctggactggagggtgcagagcaaggactggccccacgccggtagaccagcccacgaactgagatactctatttatcgagacctatgggaacgagggttttttctgagcgccgcaggtaaatttggcggtgacttcctcgtgtacccgggagatccgctgagattccatgcacactacatcgcccagtgctgggcaccagaggatactatccctcttcaggatctggtggccgcaggacgtctgggtacctctgtgagaaagacattgctgctatgttctccacaaccagatggatttaagagtcaggaagtgtccataaatctagtgtacaagtgtagttag

SEQ ID NO: 100993 - DNA, 1087 bp, Artificial Sequence
  derived and/or modified sequence
gtcggcatgagggggtggagcaaggagcgcgtggcgcggtgcgcagtgggtggctccacctcgactgcgaattactgtttatgaggaggatgctggtggtggaggtggcgaacggccgctccctggtgtggggagccgaggcggtgcaggccctccgggagcgcctgggtgtggggggccgcacggtaggcgccctgccccgcgggccccgccagaactcgcgcctgggcctcccgctgctgctgatgcccgaagaggcgcggctcttggccgagatcggcgccgtgactctggtcagcgccccgcgtccagactctcggcaccacagcctggccctgacatccttcaagcgccagcaagaggagagcttccaggagcagagcgccttggcagctgaggcccgggagacccgtcgtcaggagctcctggagaagattacggagggccaggctgctaagaagcagaaactagaacaggcttcaggggccagctcaagccaggaggccggctcgagccaggctgccaaagaggatgagaccagtgatggccaggcttcgggagagcaggaggaagctggcccctcgtcttcccaagcaggaccctcaaatggggtagcccccttgcccagatctgctctccttgtccagctggccactgccaggcctcgaccggtcaaggccaggcccctggactggcgtgtccagtctaaagactggccccacgccggccgccctgcccacgagctgcgctacagtatctacagagacctgtgggagcgaggcttcttcctcagtgcggctggcaagttcggaggtgacttcctggtctatcctggtgaccccctccgcttccacgcccattatatcgctcagtgctgggcccccgaggacaccatcccactccaagacctggttgctgctgggcgccttggaaccagcgtcagaaagaccctgctcctctgttctccgcagcctgatgggtttaagtctcaggaggtctcaataaacttggtatataaatgttcatgatttgaatgtttgcgacagtcctggaacccgtggatggtctcatctgcatgtacaggtga

SEQ ID NO: 100994 - protein, 1019 aa, Artificial Sequence
  derived and/or modified sequence
MCICGTAHPVLDEGPVRCRAGPRDLLEARRPRAHECLGEALRVMHQIISKYPLLNTVETLTAAGTLIAKVKAFHYESNNDLEKQEFEKALETIAVAFSSTVSEFLMGEVDSSTLLAVPPGDSSQSMESLYGPGSEGTPPSLEDCDAGCLPAEEVDVLLQRCEGGVDAALLYAKNMAKYMKDLISYLEKRTTLEMEFAKGLQKIAHNCRQSVMQEPHMPLLSIYSLALEQDLEFGHSMVQAVGTLQTQTFMQPLTLRRLEHEKRRKEIKEAWHRAQRKLQEAESNLRKAKQGYVQRCEDHDKARFLVAKAEEEQAGSAPGAGSTATKTLDKRRRLEEEAKNKAEEAMATYRTCVADAKTQKQELEDTKVTALRQIQEVIRQSDQTIKSATISYYQMMHMQTAPLPVHFQMLCESSKLYDPGQQYASHVRQLQRDQEPDVHYDFEPHVSANAWSPVMRARKSSFNVSDVARPEAAGSPPEEGGCTEGTPAKDHRAGRGHQVHKSWPLSISDSDSGLDPGPGAGDFKKFERTSSSGTMSSTEELVDPDGGAGASAFEQADLNGMTPELPVAVPSGPFRHEGLSKAARTHRLRKLRTPAKCRECNSYVYFQGAECEECCLACHKKCLETLAIQCGHKKLQGRLQLFGQDFSHAARSAPDGVPFIVKKCVCEIERRALRTKGIYRVNGVKTRVEKLCQAFENGKELVELSQASPHDISNVLKLYLRQLPEPLISFRLYHELVGLAKDSLKAEAEAKAASRGRQDGSESEAVAVALAGRLRELLRDLPPENRASLQYLLRHLRRIVEVEQDNKMTPGNLGIVFGPTLLRPRPTEATVSLSSLVDYPHQARVIETLIVHYGLVFEEEPEETPGGQDESSNQRAEVVVQVPYLEAGEAVVYPLQEAAADGCRESRVVSNDSDSDLEEASELLSSSEASALGHLSFLEQQQSEASLEVASGSHSGSEEQLEATAREDGDGDEDGPAQQLSGFNTNQSNNVLQAPLPPMRLRGGRMTLGSCRERQPEFV

SEQ ID NO: 100995 - DNA, 3060 bp, Artificial Sequence
  derived and/or modified sequence
atgtgcatatgtgggacagctcaccccgtgctcgatgagggaccagtgaggtgtcgcgctggccctcgagacttgctagaagcaagacgaccgagggcccacgagtgcctcggagaggccctgcgggttatgcatcagataataagtaaataccccttactaaatactgtcgaaacactcaccgccgcaggaactttaattgccaaagtcaaggcctttcattatgagtctaacaatgatcttgaaaaacaggagtttgaaaaagccctggagaccattgccgtcgctttctcatcaaccgtttccgaattcctgatgggcgaagtagactcatcaacccttttggccgttcccccaggcgacagttcacagagtatggaatctttatatggtcctggcagtgagggtacacccccgtctctggaagactgcgatgctgggtgcctccccgcagaagaggtagacgtgcttctccaacggtgcgagggcggcgttgacgccgcactgctgtacgccaagaacatggcgaagtatatgaaagacctgattagctacctcgagaaaagaacaaccttagaaatggagtttgccaaaggattacaaaagatcgcccacaattgtaggcagtctgttatgcaggaaccccacatgccgcttttaagcatatattccttggcgctggagcaagatctcgagtttggccactctatggtgcaggctgtagggactctgcaaacacaaactttcatgcaaccactgaccctgaggcgcctggaacacgaaaagcggaggaaagagataaaagaagcgtggcaccgcgctcagcgcaagttacaagaggccgaatcgaatttgcgaaaggcaaagcagggatacgtgcagcgctgtgaagatcatgacaaagcacggtttttggtggctaaagctgaggaggagcaggccggctcagctccaggggccggaagcacagcgactaaaaccctggacaagcggaggcgcctcgaagaagaggcaaagaataaggccgaagaagctatggctacctacagaacatgcgttgctgacgcaaagacacaaaagcaagagctcgaggacaccaaagttacagctcttagacaaatccaagaggttatacgacagagtgaccagactattaaaagcgccacaatctcatactatcagatgatgcatatgcagaccgcacccctgcccgtccattttcaaatgctgtgcgagagttctaagctgtatgaccccggccaacagtatgccagtcacgttcgccagctgcagagggatcaagagccagacgttcattacgactttgaaccacatgtcagtgccaatgcctggtccccagttatgcgggccaggaaatcaagctttaacgtgtctgatgtagcccgacccgaggctgccggcagccctcccgaggaaggcggatgcactgaaggcacccccgccaaggaccacagggcagggcgcggtcatcaggtccacaaaagttggcctctctctatctctgattccgattctggactcgatcccggacctggcgcgggcgactttaaaaagttcgagagaacgagttcatccggtaccatgagctccactgaagagctggtagacccagacgggggcgctggcgcaagcgccttcgagcaagctgacctgaacgggatgactcccgaactgcccgtggctgtaccctcagggcccttcagacatgaggggctctccaaagctgcacgtacccacagactaaggaagctgagaacccctgccaagtgcagggagtgcaactcctacgtgtacttccaaggagctgagtgtgaggaatgttgtctggcctgccataagaagtgtctggagaccctggccatccagtgcgggcataagaaactgcagggacgcctacagcttttcggccaggatttctctcatgcagccaggagtgctccagatggcgtgccattcatcgtcaaaaagtgcgtgtgcgaaatcgaacgccgtgctttgcgcaccaaaggaatttacagagtcaatggggtcaagacaagggtcgaaaagttgtgccaggcattcgaaaacggcaaggaactcgtggaactttctcaggcatctccccacgatataagtaacgtgcttaaactgtatctgaggcaactgcccgagcccttaatctcctttaggttgtaccatgagttggtgggattagctaaggactcgctcaaagccgaagccgaggcgaaggcagctagccggggccggcaggatggctcagagtcggaggctgttgccgtggcccttgctggacgcttacgggagctgctccgcgacctaccccctgaaaaccgggctagcctgcagtatttactcaggcacctgaggcgtattgtggaagtggaacaggataacaaaatgacccctgggaacctcgggattgtgttcggcccgactttgctcaggccacgtcccacagaggccaccgttagcctgagtagcctggtggactatccccaccaggccagagtcatcgagactctcattgtgcattacggattggtgttcgaagaagaaccggaggaaacacctggcggccaagatgagtcttccaatcagcgggcagaagtggtagtacaggttccctacctggaagcaggggaagccgtcgtctaccccctgcaggaggctgccgctgacggctgcagagaatcacgcgtcgtctctaacgactctgactccgacctcgaggaggcaagtgagctcctgtcctcaagcgaagcatctgcgctcggccatttatctttcttggaacagcagcagtcagaagcaagtctggaggttgcttccggctctcactccggatccgaggagcaacttgaagctacagctagggaagacggggacggcgatgaagacggaccagcacagcagctctcagggtttaacacaaatcagagcaacaacgtcctgcaggctccgcttccacccatgagactccgcggaggacgcatgactctggggtcttgccgcgaaagacagcctgagttcgtgtag

SEQ ID NO: 100996 - DNA, 3750 bp, Artificial Sequence
  derived and/or modified sequence
cggagacccccatcggtcagctgccaggccccacgcgctcgcggtctccgcgccccgacggctgcgccatgtgtatctgcgggacggcgcacccggtgctggacgagggccccgtgcgctgccgggcgggcccccgagacctccttgaggcccgccgcccgcgggcccacgagtgcctgggtgaggctctgcgtgtcatgcatcagatcatctccaagtacccgctgctgaacaccgtggagacgctcaccgcagccggcaccctcattgccaaggtcaaagccttccattatgagagcaacaatgatctggagaaacaggagttcgagaaggccctggagacgattgctgtggccttcagtagcacagtgtccgagttcctcatgggtgaagtggacagcagcaccctcctagcagtgcctcctggggactcgagccagtccatggaaagcctgtatggaccgggcagtgagggcacgcctcccagcctggaagactgtgacgccggctgcctgcccgccgaggaggtggacgtgctgctacagcgctgtgaggggggcgtggatgccgcactgctgtatgccaagaacatggccaagtacatgaaggacctcatcagctacctggagaagcggacgacgctggagatggagtttgccaagggcctgcagaagatcgctcacaactgcagacagagcgtcatgcaggagccccacatgccgctcctgtccatctactcgctggccctggagcaggacctggagttcggccacagcatggtgcaggcggtgggcaccttgcagacccagaccttcatgcagcccctgaccctgcggcggcttgaacacgagaagcgcaggaaggagatcaaggaggcctggcaccgtgcccagaggaagctgcaagaggcggagtccaacctgcgcaaggccaagcagggttacgtgcagcgctgcgaggaccacgacaaggctcgcttcctcgtggccaaggcggaggaggagcaggctggcagcgcgccgggagcaggcagcacggccaccaagaccctggacaagcggcggcggctggaggaggaggccaagaacaaggcggaggaagctatggccacctaccgcacctgcgtggccgacgcgaagacgcagaagcaggagctggaggataccaaggtgacggcgctgcggcagatccaggaggtcatccggcagagcgaccaaaccatcaagtcggccacgatctcctactaccagatgatgcatatgcagacggcgccgctgcccgtgcacttccagatgctgtgtgagagcagcaagctgtatgacccaggccagcagtacgcctcccacgtgcgccagctgcagcgggaccaggagcccgatgtgcactacgactttgagccccacgtctccgccaacgcctggtcccccgtcatgcgtgcccggaagagcagcttcaacgtgagtgatgtggcgcggccggaggctgccgggagccccccagaagaaggcgggtgcactgagggcacacctgccaaggaccacagggccgggcgaggacaccaggttcacaagtcatggccgctctcgatctcagactcggacagtgggctggaccccggccctggcgcaggggactttaagaagttcgagcggacgtcatccagtggtaccatgtcgtccacggaggagctggtggacccagacggtggagccggggcttcagcctttgagcaggctgacctcaacggcatgacccccgagctgccggtggccgtgcccagtggaccgttccgccacgaggggctgtccaaggcggcccgtactcaccggctccggaagctccgcacgcccgccaagtgccgcgagtgcaacagctacgtctacttccagggtgctgagtgtgaagagtgctgcctggcctgccacaagaaatgtctggagacgctggccatacagtgcgggcacaagaagctgcaaggccgcctgcagctgttcggccaggacttcagccacgcggcccgcagcgcccccgacggcgtgcccttcatcgtcaagaagtgcgtctgcgagatcgagcggcgggcgctgcgcaccaagggcatctaccgggtcaatggggtaaagacacgcgtggagaagctgtgccaggccttcgagaacggcaaggagctggtcgagctgtcgcaggcctcgccccacgacatcagcaacgtcctcaagctctacctgcgtcagcttcccgagccgctcatctccttccgcctctaccacgagctcgtagggctggccaaggacagcctgaaggcagaggccgaggccaaggcggcgtcccggggccggcaggacggctcggagagcgaggcagtggcggtggccctggcaggtcggctgcgggagctcctgcgggacctgccgcctgagaaccgggcctcgctgcagtacctgctgcgtcacctacgcaggatcgtggaggtggagcaggacaacaagatgacccccgggaacctgggcatcgtgttcgggcccacgctgcttcggccacggcccaccgaggccaccgtgtccctctcctccctggtggattatccccatcaggcccgcgtcatcgagactctcatcgtccactacggcctggtcttcgaggaggagccggaggagacccccgggggccaggacgagtcatccaaccagcgagctgaggtagtcgtccaggtgccgtacctggaggcgggcgaggcggtggtctacccgctgcaggaggcggcggcggacgggtgcagagaatcccgagttgtgtccaacgattcggactcggacctagaggaggcctccgagctgctgtcctcatcggaggccagtgccctgggccacctcagcttcctggagcagcagcagagcgaggccagcctagaggtggcttctggcagccacagcggcagtgaggagcagctggaggccacagcccgggaggacggggacggggacgaggacggcccggcccagcagctctcaggattcaacaccaaccagtccaacaacgtgctgcaggccccactgccccccatgaggctccgtggcgggcggatgacactgggctcctgcagggaaaggcagccggaattcgtgtgagctggggtggggctgggaccacaggtggcttctctcttgcctgctcctgtccctccagcacgtcccctgcaccacggcatagcttaggtgcgccgtcctggggtcgctgccgagagcgcctggacttcgacgtcccaccagcgggcgcctcctcccagaggcttccaggagcacgagggccttgcggcacaggactgtgccctgtgctgtcccctgcaccccggctcagctgagctggggaacactgctgtcgtgtgaagtcacagtggccttgttggtgcccacagggctgtgtggatggaggaagctgtccctgcccagtgcatcccccaggtcatcacggggacgcaggaggcaggccctgccctgccctctcctcacaggtctgttgcagggactccagaaaccattctgggagccgtggatgggggcggagctggggtttggtgcagtttccagggtgcagtacagcagggcctgaatactggccctggactcccttttccagaacaccaggtgtggccacctggggctcaggtacacagtggggtctctcggaagccaccgtgtggttctttcacaggcacgtttattttgctgaaataaaaagtttttaatcggg

SEQ ID NO: 100997 - DNA, 3060 bp, Artificial Sequence
  derived and/or modified sequence
atgtgcatctgtggcacagcccaccctgtgctggatgagggccctgtgcgctgccgggccggcccccgggacctgctggaggcccggcggccccgggcccatgaatgtctgggggaggccctgcgggtgatgcaccagatcatcagcaagtaccccctgctgaacacagtggagaccctgacagctgctggcaccctgattgccaaggtgaaggccttccactatgagagcaacaatgacctggagaagcaggagtttgagaaggccctggagaccatcgctgtggccttcagcagcacagtgtctgagttcctgatgggagaggtggacagcagcaccctgctggccgtgcccccaggggacagcagccagagcatggagagcctgtatggccctggcagcgagggcaccccacccagcctggaggactgtgatgctggctgcctgcctgctgaggaggtggatgtgctgctgcagagatgtgagggcggcgtggatgctgccctgctgtatgccaagaacatggccaagtacatgaaggacctgatctcctacctggagaagaggaccaccctggagatggagtttgccaagggcctgcagaagatcgcccacaactgccggcagagcgtgatgcaggagccccacatgcccctgctgagcatctacagcctggccctggagcaggacctggagtttggccacagcatggtgcaggccgtgggcaccctgcagacccagaccttcatgcagcccctgaccctgcggcggctggagcacgagaagaggaggaaggagatcaaggaggcctggcaccgggcccagaggaagctgcaggaggccgagagcaacctgaggaaggccaagcagggctacgtgcagagatgtgaagatcatgacaaggcccgcttcctggtggccaaggccgaggaggagcaggccggcagcgcccctggggccggcagcacagccaccaagaccctggacaagagaagaaggctggaggaggaggccaagaacaaggccgaggaggccatggccacctaccgcacctgtgtggctgatgccaagacccagaagcaggagctggaggacaccaaggtgacagccctgcggcagatccaggaggtgatccggcagagcgaccagaccatcaagagcgccaccatctcctactaccagatgatgcacatgcagacagcccccctgcctgtgcacttccagatgctgtgtgagagcagcaagctgtatgaccccggccagcagtatgccagccacgtgcggcagctgcagagggaccaggagccagatgtgcactatgactttgagccccacgtgtctgccaatgcctggagccctgtgatgagggccaggaagagcagcttcaacgtgtctgatgtggcccggcctgaggccgccggcagccccccagaggagggcggctgcacagagggcaccccagccaaggaccacagagctggccggggccaccaggtgcacaagtcctggcccctgagcatcagtgacagcgacagcggcctggaccccggccctggggccggggacttcaagaagtttgagaggaccagcagcagcggcaccatgagcagcacagaggagctggtggaccctgatggaggagctggggccagcgcctttgagcaggccgacctgaatggcatgaccccagagctgcctgtggccgtgcccagcggccccttcagacatgagggcctgagcaaggccgcccggacccaccggctgaggaagctgcggaccccagccaagtgccgggagtgcaacagctatgtgtacttccagggcgcagaatgtgaggagtgctgcctggcctgccacaagaagtgcctggagaccctggccatccagtgtggccacaagaagctgcagggccgcctgcagctgtttggccaggacttcagccatgctgcccggagcgccccagatggagtgcccttcatcgtgaagaagtgtgtgtgtgaaattgaaagaagagccctgcggaccaagggcatctacagagtgaatggagtgaagaccagggtggagaagctgtgccaggcctttgaaaatggcaaggagctggtggagctgagccaggccagcccccatgacatcagcaatgtgctgaagctgtacctgcggcagctgcctgagcccctcatctccttccggctgtaccacgagctggtgggcctggccaaggacagcctgaaggccgaggccgaggccaaggccgccagccggggccggcaggacggcagcgagagcgaggccgtggccgtggccctggccggccgcctgcgggagctgctgcgggacctgcccccagagaacagagccagcctgcagtacctgctgcggcacctgcggagaattgtggaggtggagcaggacaacaagatgaccccaggcaacctgggcatcgtgtttggccccaccctgctgcggccccggcccacagaggccaccgtgtccctgagcagcctggtggactacccccaccaggcccgggtcatcgagaccctcatcgtgcactacggcctggtgtttgaggaggagcctgaggagaccccaggcggccaggatgagagcagcaaccagagagctgaggtggtggtgcaggtgccctacctggaggccggggaggccgtggtgtaccccctgcaggaggccgctgctgatggctgccgggagagccgggtggtgtccaatgacagcgacagcgacctggaggaggccagcgagctgctgagcagcagcgaggccagcgccctgggccacctgtccttcctggagcagcagcagagcgaggccagcctggaggtggccagcggcagccacagcggcagcgaggagcagctggaggccacagccagagaagatggagatggagatgaagatggccctgcccagcagctgagcggcttcaacaccaaccagagcaacaacgtgctgcaggcccccctgccccccatgaggctgcggggcggccgcatgaccctgggcagctgccgggagcggcagcctgagtttgtgtag

SEQ ID NO: 100998 - DNA, 3060 bp, Artificial Sequence
  derived and/or modified sequence
atgtgcatctgcggcaccgcccaccccgtgctggacgagggccccgtgaggtgtagggccggcccaagagacctacttgaggcccggcggccccgagctcacgagtgtcttggagaagcactgcgcgtaatgcaccagatcatctcgaagtaccccctcctgaatactgtggagactttgaccgctgccggaacactgattgcgaaagtgaaggcctttcactacgagtctaataatgatctagaaaaacaggagttcgaaaaggctttagagacaatcgccgtggccttctcctccaccgtgagcgagttcctgatgggagaggtcgacagctctaccctcctggccgtgccaccgggcgacagcagtcaatccatggaaagcctgtatgggcccgggagtgaaggcacccctccttcactcgaggattgcgatgccgggtgcctgccagctgaagaggtagatgtgctgctgcaacggtgtgaaggaggggtggacgccgctctgctgtatgctaagaacatggcaaagtatatgaaggatctcatctcatacctggagaaacgtacaaccttagaaatggagtttgctaaaggcctgcaaaaaatagcacacaattgtagacagtccgttatgcaggagccgcatatgcccctactgtctatatacagcctagctctggagcaggacctggagttcgggcacagcatggtgcaggcagtgggaaccctccagacacagacattcatgcagccattgaccctgagaaggttggaacacgaaaagcggaggaaagagataaaggaagcttggcacagggcgcaaaggaaactgcaagaggccgaatctaacctgcggaaggcaaagcagggatacgttcaacggtgcgaagaccacgataaggcacgcttcctagtagccaaagccgaggaagaacaggcagggtccgcccctggtgccggatccacagctacaaaaacgctcgataagcgacgaaggctggaggaggaggctaagaacaaagccgaagaagctatggccacatacagaacctgtgtggctgacgcgaaaacccaaaagcaggaactcgaagatactaaagtgaccgctctgcggcagatccaggaagtaatccggcagagtgaccagaccatcaagtcagcgacgatcagttactaccagatgatgcatatgcagactgcccctttgcctgttcatttccagatgctgtgcgaaagcagcaaactgtacgaccctggtcagcagtacgcttctcacgtccggcagctgcagagagaccaggagcctgacgtgcactacgacttcgaacctcacgtcagtgccaacgcttggtcccctgtgatgcgggcccggaaatctagctttaacgtgagcgacgtggcacgcccagaggctgcaggttcaccaccggaagaagggggttgcacagagggcactcctgctaaggatcaccgagccggccgtggtcaccaggtgcacaaaagctggccactcagcatcagcgactccgattccggcctggacccaggccccggagctggcgactttaagaagtttgagcgaacatccagcagcggcaccatgtctagcacggaagaactggtagatcccgacggcggagcaggagcaagcgctttcgagcaagccgacctgaacggaatgacaccagaactgccagtcgccgtgccaagcggtcctttccgacatgaagggctgagcaaagccgctaggacacaccgactgcgcaaactgaggaccccagccaaatgcagggagtgtaactcatacgtgtactttcagggtgccgagtgcgaagaatgctgtttggcttgccacaaaaagtgcctagaaacactggccattcagtgtggacacaagaagttgcaagggcgcctacagttgttcgggcaagatttcagccacgccgcccggagcgcacccgatggcgtacccttcattgtgaagaaatgcgtgtgtgagatcgaacgtagagccctgcggacgaagggaatctaccgagtgaacggagtgaaaacacgagttgagaaactatgtcaggcttttgagaacggtaaggagctcgtcgagctttcacaggcttctccacacgatatctccaatgttctgaagttgtacctgagacagctaccagagcctctcatcagtttcaggctgtaccacgaactggtgggcttagccaaggactcactgaaagctgaggccgaggcaaaagcagcttctaggggtcgtcaggacgggtctgagtctgaggccgtcgccgtggcattggccggacggctgagggaattgctgcgcgacttgccgccagaaaatcgggcatctctgcaatatcttctccgccacctgcgacggatcgttgaggtggagcaggataataaaatgacaccaggaaacttggggattgtgttcgggccaaccctgctgcgtccgcgtccaactgaggccactgtctctctgagttctctagtggactacccccatcaggcccgggtgatcgagaccctgatagtgcattacggtctggtgtttgaagaagagcctgaggagacacccggcggccaagatgaaagcagcaaccagcgggctgaggtcgttgtgcaggtaccttacctggaagccggagaggctgtggtgtaccccctccaggaggcagctgccgatgggtgccgcgaatcccgagtggtttcaaacgactcagacagtgatctggaggaggcctccgaactgttatcttcttctgaagcctcagcccttggacatctctcgttcctcgagcagcagcagtcagaggctagcttggaggtggccagcggctcacacagtggctctgaggagcagcttgaggcaaccgcaagggaagacggcgatggcgacgaggatgggccggctcagcagctgtcaggttttaataccaaccagagcaataacgtgctccaggctccgcttcctccaatgcgactgcggggtggtcgaatgacactgggcagttgtcgagagcggcagcccgaatttgtttag

SEQ ID NO: 100999 - DNA, 3060 bp, Artificial Sequence
  derived and/or modified sequence
atgtgcatttgtggcaccgcgcatccagttctggacgaaggccctgtgcgttgtcgcgctgggcctagagatctccttgaggccaggcgacctagagctcatgaatgtcttggcgaggccctgcgggtgatgcatcagattatctctaaatatcctctcctgaacacagttgagactcttactgccgctggcacgttgatagctaaggtgaaggcatttcactacgagagtaacaacgacctagagaaacaggaatttgagaaggctctcgagaccatcgcagtggccttctcctctacggttagcgagttcttgatgggtgaagttgattcctccacactcttggcggtccccccaggcgattcatctcagagcatggaaagtctgtacggccctggcagtgaggggacgccccctagtcttgaagattgtgatgcaggctgcctgccagctgaggaggtggacgtgctgctgcagcgctgtgaagggggagttgacgctgcactgctgtacgccaaaaatatggccaagtatatgaaagatcttattagctacctggagaaacgtaccacgctggagatggaattcgctaagggcctgcaaaagatcgcacacaactgccgtcaatccgtcatgcaggagccacatatgcctctactgtctatctactcccttgcattggagcaggatctcgagtttggacatagtatggtgcaagcggtcggcacgctacagacacagaccttcatgcagcctctgaccctgcgccgtctagagcacgagaaacgccgaaaggagattaaggaggcatggcatcgagcccagcgtaaactccaagaagcagaaagtaatctcagaaaggccaaacaggggtatgttcagcggtgcgaggatcacgacaaggcacgctttctggtcgctaaggccgaggaagaacaggcaggctccgcaccgggagccggatccacagcgactaagaccctcgataagagaagacggctggaggaggaggctaaaaacaaagccgaggaggctatggctacgtaccgcacatgtgtggccgatgccaagacccaaaagcaggagctggaggacactaaagttacagcgctccgccagattcaggaggtgattaggcagagcgaccagactatcaagtccgctactatctcttattaccaaatgatgcacatgcagacagctcctctcccggtgcattttcagatgctttgtgaaagtagcaaactgtacgaccctggccaacaatatgcttcccacgtccggcagttacagagggaccaagagcctgatgtgcattatgatttcgagccccatgtgtctgccaacgcctggagcccagtgatgagagctcggaagtccagctttaacgtgtctgacgtcgcccgacccgaagctgctggttccccaccagaagaaggtgggtgcaccgaggggacccctgccaaggaccacagagctgggaggggccaccaggtgcacaaaagctggccgctgagcatcagtgactccgatagcggtcttgatcccggtcctggggctggtgacttcaaaaaattcgagagaactagttctagcggcactatgtccagcacagaggaacttgtggaccccgatgggggagccggagcgtctgcctttgaacaggcggacttgaatggaatgacaccggagttacctgtggcagtcccaagtggcccattccggcacgaaggcttaagtaaagccgctcgcacacaccgcctgcgaaagctgagaaccccagccaagtgccgagagtgcaattcttacgtttactttcagggggctgagtgtgaggagtgctgcttagcttgtcataagaaatgccttgagacgctcgcaatccaatgcggccacaaaaagcttcagggacggcttcaactcttcgggcaggatttcagtcacgccgctcgctccgccccagacggggtgccattcattgtgaagaagtgcgtgtgcgagatcgaaaggagggcactgcggacaaaaggcatttatcgggtgaacggggtaaagacaagggtggagaagctgtgtcaggcctttgagaacggcaaagagcttgtcgagctctcacaagcttcaccgcacgacatttcaaacgtcctgaaattatacttacgccagctgcctgaacctttgatttcatttcggctgtaccacgagctggtcggtctggctaaagattcacttaaagctgaagcagaagccaaggcggcttccaggggacgccaggatggtagtgagagtgaagcagtagcggtggccctggccggtagactgagagagctgctacgggacctcccaccagaaaaccgggcatctctccagtatttgctccgacacctccgaaggatcgtggaagtcgagcaagacaacaaaatgacccccggtaacctcggtattgtgtttggacctactttgttacgccctcgacctacggaagcaacggtgtcgctctccagcctcgtcgattatccacaccaggcacgtgttatcgagaccttaatcgtgcactacgggctcgtgttcgaggaagaaccagaggagacacccggtggtcaggatgaaagcagtaaccagcgcgctgaggtggtggtgcaggttccttacctggaggctggggaagccgttgtgtatcccttgcaagaggctgcagccgacggctgtcgtgaaagtcgggtggtgtctaacgattctgactctgacttagaagaagcatccgagcttctttcaagttcagaggcctctgcactgggtcaccttagtttcctcgagcagcagcagagcgaggcctcactcgaagtggcgtctggcagccacagcggatctgaggagcagctggaggccacagcaagggaggacggtgatggcgatgaggacggtcccgcacagcaactctctggcttcaatactaaccagtctaacaacgtgcttcaggcgccacttcctcctatgcggctgagggggggaagaatgactttggggtcatgccgagagcgccagcctgagtttgtgtag

SEQ ID NO: 101000 - DNA, 3060 bp, Artificial Sequence
  derived and/or modified sequence
atgtgcatctgcggcaccgcccaccccgtgctggacgagggccccgtgagatgcagagccggccccagagacctgctggaggccagaagacccagagcccacgagtgcctgggcgaggccctgagagtgatgcaccagatcatcagcaagtaccccctgctgaacaccgtggagaccctgaccgccgccggcaccctgatcgccaaggtgaaggccttccactacgagagcaacaacgacctggagaagcaggagttcgagaaggccctggagaccatcgccgtggccttcagcagcaccgtgagcgagttcctgatgggcgaggtggacagcagcaccctgctggccgtgccccccggcgacagcagccagagcatggagagcctgtacggccccggcagcgagggcaccccccccagcctggaggactgcgacgccggctgcctgcccgccgaggaggtggacgtgctgctgcagagatgcgagggcggcgtggacgccgccctgctgtacgccaagaacatggccaagtacatgaaggacctgatcagctacctggagaagagaaccaccctggagatggagttcgccaagggcctgcagaagatcgcccacaactgcagacagagcgtgatgcaggagccccacatgcccctgctgagcatctacagcctggccctggagcaggacctggagttcggccacagcatggtgcaggccgtgggcaccctgcagacccagaccttcatgcagcccctgaccctgagaagactggagcacgagaagagaagaaaggagatcaaggaggcctggcacagagcccagagaaagctgcaggaggccgagagcaacctgagaaaggccaagcagggctacgtgcagagatgcgaggaccacgacaaggccagattcctggtggccaaggccgaggaggagcaggccggcagcgcccccggcgccggcagcaccgccaccaagaccctggacaagagaagaagactggaggaggaggccaagaacaaggccgaggaggccatggccacctacagaacctgcgtggccgacgccaagacccagaagcaggagctggaggacaccaaggtgaccgccctgagacagatccaggaggtgatcagacagagcgaccagaccatcaagagcgccaccatcagctactaccagatgatgcacatgcagaccgcccccctgcccgtgcacttccagatgctgtgcgagagcagcaagctgtacgaccccggccagcagtacgccagccacgtgagacagctgcagagagaccaggagcccgacgtgcactacgacttcgagccccacgtgagcgccaacgcctggagccccgtgatgagagccagaaagagcagcttcaacgtgagcgacgtggccagacccgaggccgccggcagcccccccgaggagggcggctgcaccgagggcacccccgccaaggaccacagagccggcagaggccaccaggtgcacaagagctggcccctgagcatcagcgacagcgacagcggcctggaccccggccccggcgccggcgacttcaagaagttcgagagaaccagcagcagcggcaccatgagcagcaccgaggagctggtggaccccgacggcggcgccggcgccagcgccttcgagcaggccgacctgaacggcatgacccccgagctgcccgtggccgtgcccagcggccccttcagacacgagggcctgagcaaggccgccagaacccacagactgagaaagctgagaacccccgccaagtgcagagagtgcaacagctacgtgtacttccagggcgccgagtgcgaggagtgctgcctggcctgccacaagaagtgcctggagaccctggccatccagtgcggccacaagaagctgcagggcagactgcagctgttcggccaggacttcagccacgccgccagaagcgcccccgacggcgtgcccttcatcgtgaagaagtgcgtgtgcgagatcgagagaagagccctgagaaccaagggcatctacagagtgaacggcgtgaagaccagagtggagaagctgtgccaggccttcgagaacggcaaggagctggtggagctgagccaggccagcccccacgacatcagcaacgtgctgaagctgtacctgagacagctgcccgagcccctgatcagcttcagactgtaccacgagctggtgggcctggccaaggacagcctgaaggccgaggccgaggccaaggccgccagcagaggcagacaggacggcagcgagagcgaggccgtggccgtggccctggccggcagactgagagagctgctgagagacctgccccccgagaacagagccagcctgcagtacctgctgagacacctgagaagaatcgtggaggtggagcaggacaacaagatgacccccggcaacctgggcatcgtgttcggccccaccctgctgagacccagacccaccgaggccaccgtgagcctgagcagcctggtggactacccccaccaggccagagtgatcgagaccctgatcgtgcactacggcctggtgttcgaggaggagcccgaggagacccccggcggccaggacgagagcagcaaccagagagccgaggtggtggtgcaggtgccctacctggaggccggcgaggccgtggtgtaccccctgcaggaggccgccgccgacggctgcagagagagcagagtggtgagcaacgacagcgacagcgacctggaggaggccagcgagctgctgagcagcagcgaggccagcgccctgggccacctgagcttcctggagcagcagcagagcgaggccagcctggaggtggccagcggcagccacagcggcagcgaggagcagctggaggccaccgccagagaggacggcgacggcgacgaggacggccccgcccagcagctgagcggcttcaacaccaaccagagcaacaacgtgctgcaggcccccctgccccccatgagactgagaggcggcagaatgaccctgggcagctgcagagagagacagcccgagttcgtgtag

SEQ ID NO: 101001 - protein, 594 aa, Artificial Sequence
  derived and/or modified sequence
MPLPGYKVREIIQKLMLDGDRNKDGKISFDEFVYIFQEVKSSDIAKTFRKAINRKEGICALGGTSELSSEGTQHSYSEEEKYAFVNWINKALENDPDCRHVIPMNPNTDDLFKAVGDGIVLCKMINLSVPDTIDERAINKKKLTPFIIQENLNLALNSASAIGCHVVNIGAEDLRAGKPHLVLGLLWQIIKIGLFADIELSRNEALAALLRDGETLEELMKLSPEELLLRWANFHLENSGWQKINNFSADIKLIDFSNSVKDSKAYFHLLNQIAPKGQKEGEPRIDINMSGFNETDDLKRAESMLQQADKLGCRQFVTPADVVSGNPKLNLAFVANLFNKYPALTKPENQDIDWTLLEGETREERTFRNWMNSLGVNPHVNHLYADLQDALVILQLYERIKVPVDWSKVNKPPYPKLGANMKKLENCNYAVELGKHPAKFSLVGIGGQDLNDGNQTLTLALVWQLMRRYTLNVLEDLGDGQKANDDIIVNWVNRTLSEAGKSTSIQSFKDKTISSSLAVVDLIDAIQPGCINYDLVKSGNLTEDDKHNNAKYAVSMARRIGARVYALPEDLVEVKPKMVMTVFACLMGRGMKRV

SEQ ID NO: 101002 - protein, 617 aa, Artificial Sequence
  derived and/or modified sequence
MEDLNSNGFICDYELHELFKEANMPLPGYKVREIIQKLMLDGDRNKDGKISFDEFVYIFQEVKSSDIAKTFRKAINRKEGICALGGTSELSSEGTQHSYSEEEKYAFVNWINKALENDPDCRHVIPMNPNTDDLFKAVGDGIVLCKMINLSVPDTIDERAINKKKLTPFIIQENLNLALNSASAIGCHVVNIGAEDLRAGKPHLVLGLLWQIIKIGLFADIELSRNEALAALLRDGETLEELMKLSPEELLLRWANFHLENSGWQKINNFSADIKLIDFSNSVKDSKAYFHLLNQIAPKGQKEGEPRIDINMSGFNETDDLKRAESMLQQADKLGCRQFVTPADVVSGNPKLNLAFVANLFNKYPALTKPENQDIDWTLLEGETREERTFRNWMNSLGVNPHVNHLYADLQDALVILQLYERIKVPVDWSKVNKPPYPKLGANMKKLENCNYAVELGKHPAKFSLVGIGGQDLNDGNQTLTLALVWQLMRRYTLNVLEDLGDGQKANDDIIVNWVNRTLSEAGKSTSIQSFKDKTISSSLAVVDLIDAIQPGCINYDLVKSGNLTEDDKHNNAKYAVSMARRIGARVYALPEDLVEVKPKMVMTVFACLMGRGMKRV

SEQ ID NO: 101003 - DNA, 1785 bp, Artificial Sequence
  derived and/or modified sequence
atgccgctgcctggatacaaggttagagaaataattcagaaactcatgctggatggcgatcgcaataaggacggcaaaatttccttcgatgaattcgtctatatttttcaagaagtgaaatcaagcgatatcgccaagaccttccggaaggcaataaaccgcaaggaggggatctgtgctctgggcggcacttcagagctcagcagtgaaggtacccagcattcgtatagtgaagaagaaaaatacgcctttgtaaactggataaataaggcgctcgagaatgaccctgattgtcggcacgtgatccctatgaacccgaataccgacgacctgtttaaggcggtgggagatggcatcgtgctctgtaagatgattaacctgtctgtaccagatactatcgatgaacgcgctattaataagaaaaagttgacccctttcatcatccaggaaaatctaaacctagcactgaacagcgcatctgccatagggtgtcatgtggtcaatataggggccgaggacctcagagccggaaaacctcatctagtgttgggcctgctgtggcagattattaaaatcggacttttcgccgatattgaactgtcacgaaacgaagcactggcagctttgcttagagacggggagactttggaagaattgatgaagctatcaccagaggaattgcttctgaggtgggcaaattttcatctggagaattccgggtggcagaagattaacaacttttcggcggacatcaaactcatcgacttcagcaatagtgtcaaagactcaaaggcctattttcacttgcttaatcagattgctcctaaaggacagaaagaaggtgaacctcgaatcgatattaacatgtctgggtttaatgagaccgacgaccttaagcgcgccgaaagtatgctgcagcaggcagacaagctcgggtgcaggcagttcgttacgcccgctgatgttgtgtccgggaacccaaaactgaacctcgctttcgtcgccaacctcttcaataaatatcctgcactaacaaagcctgaaaaccaggacattgactggacactacttgagggagagactagagaggagcggacattccgaaactggatgaatagcctaggcgtgaatccacacgtaaatcacctgtacgctgacttgcaggacgcacttgtgatattgcagctctatgagaggattaaggtacccgtggactggagtaaggtaaacaaacctccctatcctaaactgggagccaatatgaaaaagctcgagaattgcaactatgccgtggagctcgggaagcaccccgctaagttctccttagtgggcatcggcggtcaggacttaaatgacggtaaccaaacgctgactctcgcccttgtgtggcagctcatgagaagatacacgttaaacgtgctggaggatctgggagacggccagaaggctaatgacgacatcatcgtcaattgggttaatcggacgttgagtgaggccgggaaaagcacgtctatccagtcattcaaagacaaaactatatcctcctctttggcagtggttgatttaatagatgcaatccaaccaggatgtattaattatgaccttgtgaaaagcgggaatttaactgaggacgacaaacataacaacgcaaaatacgcggtgagcatggcacgtcgcattggggccagagtgtatgcccttccagaggatctggtggaagtgaagccaaagatggtcatgactgtttttgcgtgcctgatgggacgtgggatgaagagggtctag

SEQ ID NO: 101004 - DNA, 1854 bp, Artificial Sequence
  derived and/or modified sequence
atggaagacctgaattcaaatggttttatctgtgactacgaactgcacgagctgtttaaggaagctaacatgcctctacctgggtataaggtcagagagattatacagaagctgatgctggacggggaccgaaacaaggacggcaaaatatccttcgacgaatttgtctatatctttcaggaggtgaagtcaagcgatatcgccaagacctttagaaaggccatcaacaggaaggagggaatatgtgcactcggcggcaccagcgaattgtccagcgagggcactcagcactcctacagtgaggaggaaaagtacgcctttgtgaattggatcaataaggccctggagaatgacccagactgtcgacatgtcatacccatgaaccccaacactgacgatcttttcaaagccgtgggcgatggtattgtgctgtgcaagatgataaacttgtccgtgccagacacgatcgacgaacgcgctattaacaaaaaaaagttaactccgtttatcatccaggaaaacctgaacctcgcattgaattcagcatcagcaatagggtgtcatgtcgtgaacatcggcgctgaggatcttcgcgctggaaaacctcatctggtactgggcctcctttggcagattatcaaaatcgggctgttcgcggacatagaactctcccgcaatgaagcccttgccgccttgctcagggatggagagacccttgaggaactgatgaaattgtcaccagaagagctgttgctccggtgggcaaattttcatctagagaattccggttggcagaaaattaataacttctcagccgacataaagttaatcgatttctctaattcagtgaaagattcaaaggcttactttcaccttttaaaccagatcgcccccaagggtcagaaagagggtgagccaaggattgacattaatatgtccggttttaacgagacagacgacctgaagcgggcagaaagcatgcttcaacaggcggacaagttgggctgtcggcagttcgtcacacccgctgatgtcgtgagcgggaaccctaagcttaacctggctttcgtcgcaaatcttttcaataaatatcccgcactgacaaaaccggaaaaccaggatatcgactggaccctcttagaaggggagaccagagaggaaaggacatttaggaattggatgaattctctcggagtcaatcctcacgtcaaccatctgtacgccgacctgcaggatgcccttgtcatcttacagctttacgagaggatcaaggtcccagtggactggagcaaagtcaacaagccaccatatcctaagctgggcgcgaacatgaagaagctggaaaactgcaactacgcggtagaacttgggaaacaccctgcaaagttctccctggtgggcatcggaggacaggatctgaacgatggcaaccagactttaactctggccctcgtttggcagttaatgagaagatacacgctgaacgtgctcgaagatctgggcgatggccagaaagccaacgacgacattatcgtcaattgggtgaatagaaccctgtctgaggccgggaaatcgacgtcaatccagtcattcaaggacaaaaccatatcctcttctctggccgttgtggatcttatagacgcaatccagccggggtgtataaattatgatctggttaaaagcggtaatctaacagaagatgataagcacaacaacgctaaatacgccgtctcgatggctcggcgcataggggctagagtttacgccctcccagaagatctggtggaggtgaaaccgaagatggtgatgacggttttcgcatgtttaatgggcagaggcatgaaaagggtttag

SEQ ID NO: 101005 - DNA, 1785 bp, Artificial Sequence
  derived and/or modified sequence
atgcccctgcccggctacaaggtgcgggagatcatccagaagctgatgctggatggagacaggaacaaggatggcaagatcagctttgatgaatttgtgtacatcttccaggaggtgaagagcagtgacatcgccaagaccttcaggaaggccatcaacaggaaggagggcatctgtgccctgggcggcaccagcgagctgagcagcgagggcacccagcacagctacagcgaggaggagaagtatgcctttgtgaactggatcaacaaggccctggagaatgaccctgactgccgccacgtgatccccatgaaccccaacacagatgacctcttcaaggctgtgggagatggcatcgtgctgtgcaagatgatcaacctgtctgtgcctgacaccattgatgagcgggccatcaacaagaagaagctgacccccttcatcatccaggagaacctgaacctggccctgaacagcgccagcgccatcggctgccacgtggtgaacattggagctgaggacctgcgggccggcaagccccacctggtgctgggcctgctgtggcagatcatcaagattggcctgtttgctgacatcgagctgagcagaaatgaggccctggccgccctgctgagagatggagagaccctggaggagctgatgaagctgagccctgaggagctgctgctgcgctgggccaacttccacctggagaacagcggctggcagaagatcaacaacttctctgctgacatcaagctgattgacttcagcaacagcgtgaaggacagcaaggcctacttccacctgctgaaccagatcgcccccaagggccagaaggagggggagcccagaattgacatcaacatgagcggcttcaatgaaacagatgacctgaagagagctgagagcatgctgcagcaggccgacaagctgggctgccggcagtttgtgaccccagcagatgtggtgtctggcaaccccaagctgaacctggcctttgtggccaacctcttcaacaagtacccagccctgaccaagccagagaaccaggacatcgactggaccctgctggagggggagacccgggaggagaggaccttcaggaactggatgaacagcctgggcgtgaacccccacgtgaaccacctgtatgctgacctgcaggatgccctggtgatcctgcagctgtatgagcgcatcaaggtgcctgtggactggagcaaggtgaacaagccaccctaccccaagctgggcgccaacatgaagaagctggagaactgcaactatgctgtggagctgggcaagcacccagccaagttcagcctggtgggcattggaggccaggacctgaatgatggcaaccagaccctgaccctggccctggtgtggcagctgatgaggcgctacaccctgaatgtgctggaggacctgggagatggccagaaggccaatgatgacatcatcgtgaactgggtgaacagaaccctgtctgaggccggcaagagcaccagcatccagagcttcaaggacaagaccatcagcagcagcctggccgtggtggacctgattgatgccatccagcccggctgcatcaactatgacctggtgaagagcggcaacctgacagaagatgacaagcacaacaatgccaagtatgctgtgtccatggcccggcgcatcggggcccgggtgtatgccctgcctgaggacctggtggaggtgaagcccaagatggtgatgacagtgtttgcctgcctgatgggccggggcatgaagagggtgtag

SEQ ID NO: 101006 - DNA, 1854 bp, Artificial Sequence
  derived and/or modified sequence
atggaggacctgaacagcaatggcttcatctgtgactatgagctgcacgagctgttcaaggaggccaacatgcccctgcccggctacaaggtgcgggagatcatccagaagctgatgctggatggagacaggaacaaggatggcaagatcagctttgatgaatttgtgtacatcttccaggaggtgaagagcagtgacatcgccaagaccttcaggaaggccatcaacaggaaggagggcatctgtgccctgggcggcaccagcgagctgagcagcgagggcacccagcacagctacagcgaggaggagaagtatgcctttgtgaactggatcaacaaggccctggagaatgaccctgactgcagacatgtgatccccatgaaccccaacacagatgacctcttcaaggctgtgggagatggcatcgtgctgtgcaagatgatcaacctgtctgtgcctgacaccattgatgagcgggccatcaacaagaagaagctgacccccttcatcatccaggagaacctgaacctggccctgaacagcgccagcgccatcggctgccacgtggtgaacatcggggctgaggacctgcgggccggcaagccccacctggtgctgggcctgctgtggcagatcatcaagattggcctgtttgctgacatcgagctgagcagaaatgaggccctggccgccctgctgagagatggagagaccctggaggagctgatgaagctgagccctgaggagctgctgctgcgctgggccaacttccacctggagaacagcggctggcagaagatcaacaacttctctgctgacatcaagctgattgacttcagcaacagcgtgaaggacagcaaggcctacttccacctgctgaaccagatcgcccccaagggccagaaggagggggagcccagaattgacatcaacatgagcggcttcaatgaaacagatgacctgaagagagctgagagcatgctgcagcaggccgacaagctgggctgccggcagtttgtgaccccagcagatgtggtgtctggcaaccccaagctgaacctggcctttgtggccaacctcttcaacaagtacccagccctgaccaagccagagaaccaggacatcgactggaccctgctggagggggagacccgggaggagaggaccttcaggaactggatgaacagcctgggcgtgaacccccacgtgaaccacctgtatgctgacctgcaggatgccctggtgatcctgcagctgtatgaaagaatcaaggtgcctgtggactggagcaaggtgaacaagccaccctaccccaagctgggcgccaacatgaagaagctggagaactgcaactatgctgtggagctgggcaagcacccagccaagttcagcctggtgggcatcggcggccaggacctgaatgatggcaaccagaccctgaccctggccctggtgtggcagctgatgaggcgctacaccctgaatgtgctggaggacctgggagatggccagaaggccaatgatgacatcatcgtgaactgggtgaacagaaccctgtctgaggccggcaagagcaccagcatccagagcttcaaggacaagaccatcagcagcagcctggccgtggtggacctgattgatgccatccagcccggctgcatcaactatgacctggtgaagagcggcaacctgacagaagatgacaagcacaacaatgccaagtatgctgtgtccatggccaggagaattggagcccgggtgtatgccctgcctgaggacctggtggaggtgaagcccaagatggtgatgacagtgtttgcctgcctgatgggccggggcatgaagagggtgtag

SEQ ID NO: 101007 - DNA, 1785 bp, Artificial Sequence
  derived and/or modified sequence
atgcccctgcccggctacaaggtgcgggagatcatccagaagctgatgctggatggcgacaggaataaagacgggaagatctcatttgatgaattcgtctacatttttcaggaggtcaagtcgtcagacatagctaaaaccttcagaaaggcaataaaccgcaaagaggggatttgcgcgctgggaggcacttctgagctctcatccgaaggcacgcagcacagttacagcgaagaagagaaatatgcattcgtgaattggatcaacaaagccctggagaacgaccccgactgccgccatgtcatccctatgaaccccaatacagacgatctctttaaagcagtaggcgacggaattgtcctctgcaagatgattaacttatcagtacctgataccatcgatgagagagcaattaacaaaaaaaaactgacgccgttcatcatacaggagaaccttaatttggctctgaactccgcaagcgcaataggatgtcatgtcgtgaacataggggctgaggacttgcgggccggcaaaccccacctagtactgggacttctgtggcagattatcaagattgggctcttcgcggatatcgagctgtctagaaatgaagcactcgccgcactgttgcgcgatggggagaccctcgaagagctgatgaagctgagtccggaggagctgcttcttaggtgggccaatttccatctggaaaactcaggttggcagaaaatcaacaacttctctgctgatattaaattaattgatttttctaactccgttaaggatagtaaggcatatttccacctcttgaaccagatagctccaaagggccaaaaggaaggtgagccccggatcgacattaacatgagtggctttaacgagaccgacgatctgaaacgggccgaaagcatgctgcagcaggcagacaaactaggctgccgccagtttgtgactcctgctgatgtcgtgtctggtaacccaaaattgaatcttgcgttcgtggccaacctgttcaataagtaccccgctcttactaaacccgagaaccaggacattgactggacgttactggaaggagagactagagaggagcggacctttaggaattggatgaattcacttggagtgaatccgcatgttaaccacctctacgcggacttacaggacgcactggtgatccttcagctttatgagcgcatcaaggtgcccgtggactggtctaaagtgaacaagcctccctatcccaagttaggcgctaacatgaagaagcttgaaaattgtaattatgccgttgagttgggcaagcaccccgcaaagttctcacttgtgggcatcggggggcaggatcttaacgacggtaatcagactctgacattggctcttgtctggcaactcatgaggcgctataccctgaacgtgctcgaggacctgggggatggtcagaaagctaacgatgacataattgtcaattgggtgaatcggactctttccgaggccggtaaatccacatcaatacaatcatttaaagacaaaacgatctcgtcctcattggcggtagtggacttgatcgacgctatccagcccggttgtattaactacgatctggtgaagtccggaaacctcaccgaggacgacaaacacaataacgctaagtacgcagtttccatggctagacggatcggagcgagggtatacgcccttcccgaagacctggtcgaagtcaaacctaaaatggtcatgaccgtattcgcttgcctgatgggaagagggatgaagcgtgtctag

SEQ ID NO: 101008 - DNA, 1854 bp, Artificial Sequence
  derived and/or modified sequence
atggaggacctgaacagcaacggcttcatctgcgactacgagctgcacgaactgtttaaggaggccaacatgccactgccaggttataaggtgagagaaatcattcagaagctgatgctcgatggcgataggaacaaggatggcaaaatatcctttgatgagttcgtgtatatctttcaggaggtcaaatcatcagacatcgcgaagaccttccgtaaggccatcaaccgtaaggaggggatctgcgcactgggcggcacgtccgaactgagttcggagggcacacagcactcttatagtgaggaggaaaagtatgccttcgtgaattggatcaataaagcccttgagaacgacccagattgtcggcacgtaatccctatgaatcccaatacggacgatctgttcaaggcagtgggagacggaatcgtcctttgcaagatgatcaatctgtccgtgccagataccatcgacgaaagggctatcaataaaaagaagctgactcccttcatcatacaagagaacctgaacctcgccctgaatagtgccagtgccattgggtgtcatgtggttaatattggggccgaggacctgcgggctgggaaaccccacttggtacttggactcctgtggcaaattatcaagatcgggcttttcgcagacatcgaactgagtcgcaatgaggccctggccgcactgctgagggacggggaaactctagaggaactgatgaagctgtcccctgaggaactactcttgcgatgggcaaacttccacctcgaaaactccggatggcagaaaataaataatttttccgccgatatcaaactcatcgactttagtaactccgtgaaagattccaaagcttattttcatctgctcaatcaaatagcaccgaaagggcagaaagagggggaaccaaggattgatattaacatgtctggattcaatgagacggatgacttgaaaagagccgagtcaatgttgcagcaggcagacaagctgggctgtagacagttcgtgaccccggccgatgttgtctcaggaaaccccaagttaaatctggcattcgtggccaacctcttcaataagtatcccgcgctgactaagcctgagaatcaagatatcgattggaccctcctggagggggaaactcgagaagagcgtacgttccggaattggatgaacagcctgggagtgaaccctcacgtcaaccacctctatgcagatctgcaagatgccctggttatcttacagctgtacgaacgcattaaagtgccagtggactggtcaaaagtgaataagccaccctatcccaaacttggggctaacatgaaaaaactggagaactgcaattatgctgtcgaacttggaaaacaccctgccaagttcagtctcgtcgggatagggggccaggacctcaatgacggaaatcagacccttacactcgcactggtgtggcaactgatgcgccggtacacccttaacgtgctggaggacctgggtgacggacagaaggctaacgatgacatcatcgtgaattgggtaaacagaactctcagtgaggccggcaaaagcacgagcattcaatcctttaaggacaagactatctcaagttctctcgcagtagttgatctgattgacgccatccagcctgggtgcatcaactatgatttagtaaagagtgggaatctgaccgaagatgacaaacataataacgctaagtatgcagtatcaatggcacgaagaattggagctcgggtttatgcgctacccgaagacttggtggaggtgaaaccaaaaatggtgatgactgtatttgcctgtctcatgggaaggggaatgaagcgagtctag

SEQ ID NO: 101009 - DNA, 2250 bp, Artificial Sequence
  derived and/or modified sequence
ctttacatctttaaatggatgagatggctaccactcagatttccaaagatgagcttgatgaactcaaagaggcctttgcaaaagttgatcgttctacctcgccacgttaaattatagcttcagtataagatgagaaggcatagcatgctatttgatttatcctttatcatcatataacatgccttacaattgagcagctatggaagatctcaacagcaacggattcatttgtgactatgaacttcatgagctcttcaaggaagctaatatgccattaccaggatataaagtgagagaaattattcagaaactcatgctggatggtgacaggaataaagatgggaaaataagttttgacgaatttgtttatatttttcaagaggtaaaaagtagtgatattgccaagaccttccgcaaagcaatcaacaggaaagaaggtatttgtgctctgggtggaacttcagagttgtccagcgaaggaacacagcattcttactcagaggaagaaaaatatgcttttgttaactggataaacaaagctttggaaaatgatcctgattgtagacatgttataccaatgaaccctaacaccgatgacctgttcaaagctgttggtgatggaattgtgctttgtaaaatgattaacctttcagttcctgataccattgatgaaagagcaatcaacaagaagaaacttacacccttcatcattcaggaaaacttgaacttggcactgaactctgcttctgccattgggtgtcatgttgtgaacattggtgcagaagatttgagggctgggaaacctcatctggttttgggactgctttggcagatcattaagatcggtttgttcgctgacattgaattaagcaggaatgaagccttggctgctttactccgagatggtgagactttggaggaacttatgaaattgtctccagaagagcttctgcttagatgggcaaactttcatttggaaaactcgggctggcaaaaaattaacaactttagtgctgacatcaagcttattgacttcagtaattcagtgaaggattccaaagcctatttccatcttctcaatcaaatcgcaccaaaaggacaaaaggaaggtgaaccacggatagatattaacatgtcaggtttcaatgaaacagatgatttgaagagagctgagagtatgcttcaacaagcagataaattaggttgcagacagtttgttacccctgctgatgttgtcagtggaaaccccaaactcaacttagctttcgtggctaacctgtttaataaatacccagcactaactaagccagagaaccaggatattgactggactctattagaaggagaaactcgtgaagaaagaaccttccgtaactggatgaactctcttggtgtcaatcctcacgtaaaccatctctatgctgacctgcaagatgccctggtaatcttacagttatatgaacgaattaaagttcctgttgactggagtaaggttaataaacctccatacccgaaactgggagccaacatgaaaaagctagaaaactgcaactatgctgttgaattagggaagcatcctgctaaattctccctggttggcattggagggcaagacctgaatgatgggaaccaaaccctgactttagctttagtctggcagctgatgagaagatataccctcaatgtcctggaagatcttggagatggtcagaaagccaatgacgacatcattgtgaactgggtgaacagaacgttgagtgaagctggaaaatcaacttccattcagagttttaaggacaagacgatcagctccagtttggcagttgtggatttaattgatgccatccagccaggctgtataaactatgaccttgtgaagagtggcaatctaacagaagatgacaagcacaataatgccaagtatgcagtgtcaatggctagaagaatcggagccagagtgtatgctctccctgaagaccttgtggaagtaaagcccaagatggtcatgactgtgtttgcatgtttgatgggcaggggaatgaagagagtgtaaaataaccaatctgaataaaacagccatgctcccaggtgcatgattcgcaggtcagctatttccaggtgaagtgcttatggcttaaggaactcttggccattcaaaggacttttcattttgattaacaggactagcttatcatgagagccctcaggggaaagggtttaagaaaaacaactcctctttcccatagtcag

SEQ ID NO: 101010 - DNA, 2277 bp, Artificial Sequence
  derived and/or modified sequence
agtcgggccagacccaggactctgcgactttacatctttaaatggatgagatggctaccactcagatttccaaagatgagcttgatgaactcaaagaggcctttgcaaaagttgatcgttctacctcgccacgttaaattatagcttcagtataagatgagaaggcatagcatgctatttgatttatcctttatcatcatataacatgccttacaattgagcagctatggaagatctcaacagcaacggattcatttgtgactatgaacttcatgagctcttcaaggaagctaatatgccattaccaggatataaagtgagagaaattattcagaaactcatgctggatggtgacaggaataaagatgggaaaataagttttgacgaatttgtttatatttttcaagaggtaaaaagtagtgatattgccaagaccttccgcaaagcaatcaacaggaaagaaggtatttgtgctctgggtggaacttcagagttgtccagcgaaggaacacagcattcttactcagaggaagaaaaatatgcttttgttaactggataaacaaagctttggaaaatgatcctgattgtagacatgttataccaatgaaccctaacaccgatgacctgttcaaagctgttggtgatggaattgtgctttgtaaaatgattaacctttcagttcctgataccattgatgaaagagcaatcaacaagaagaaacttacacccttcatcattcaggaaaacttgaacttggcactgaactctgcttctgccattgggtgtcatgttgtgaacattggtgcagaagatttgagggctgggaaacctcatctggttttgggactgctttggcagatcattaagatcggtttgttcgctgacattgaattaagcaggaatgaagccttggctgctttactccgagatggtgagactttggaggaacttatgaaattgtctccagaagagcttctgcttagatgggcaaactttcatttggaaaactcgggctggcaaaaaattaacaactttagtgctgacatcaagcttattgacttcagtaattcagtgaaggattccaaagcctatttccatcttctcaatcaaatcgcaccaaaaggacaaaaggaaggtgaaccacggatagatattaacatgtcaggtttcaatgaaacagatgatttgaagagagctgagagtatgcttcaacaagcagataaattaggttgcagacagtttgttacccctgctgatgttgtcagtggaaaccccaaactcaacttagctttcgtggctaacctgtttaataaatacccagcactaactaagccagagaaccaggatattgactggactctattagaaggagaaactcgtgaagaaagaaccttccgtaactggatgaactctcttggtgtcaatcctcacgtaaaccatctctatgctgacctgcaagatgccctggtaatcttacagttatatgaacgaattaaagttcctgttgactggagtaaggttaataaacctccatacccgaaactgggagccaacatgaaaaagctagaaaactgcaactatgctgttgaattagggaagcatcctgctaaattctccctggttggcattggagggcaagacctgaatgatgggaaccaaaccctgactttagctttagtctggcagctgatgagaagatataccctcaatgtcctggaagatcttggagatggtcagaaagccaatgacgacatcattgtgaactgggtgaacagaacgttgagtgaagctggaaaatcaacttccattcagagttttaaggacaagacgatcagctccagtttggcagttgtggatttaattgatgccatccagccaggctgtataaactatgaccttgtgaagagtggcaatctaacagaagatgacaagcacaataatgccaagtatgcagtgtcaatggctagaagaatcggagccagagtgtatgctctccctgaagaccttgtggaagtaaagcccaagatggtcatgactgtgtttgcatgtttgatgggcaggggaatgaagagagtgtaaaataaccaatctgaataaaacagccatgctcccaggtgcatgattcgcaggtcagctatttccaggtgaagtgcttatggcttaaggaactcttggccattcaaaggacttttcattttgattaacaggactagcttatcatgagagccctcaggggaaagggtttaagaaaaacaactcctctttcccatagtcag

SEQ ID NO: 101011 - DNA, 1785 bp, Artificial Sequence
  derived and/or modified sequence
atgcctctccctggatataaggtacgggaaatcattcagaaactcatgttggatggtgacaggaataaggacggtaagatctccttcgacgaattcgtctacatcttccaggaggtcaagtcctctgatattgccaagacttttcgcaaagccataaatagaaaagaaggcatttgtgcactcggaggaacttcagagctttctagtgagggcactcagcattcatacagcgaagaggagaaatacgcttttgtaaactggatcaataaagcgctggaaaatgatccggactgtagacatgtcatcccgatgaacccaaacacagacgacctttttaaggccgtcggggacgggatcgtgctttgtaaaatgatcaatctctccgtccctgacaccatcgacgaaagagccatcaataaaaagaaactgaccccatttattatacaggaaaatctcaatctggccttaaattccgcatccgctattggttgccacgttgtgaacatcggggctgaggatctgagagccggtaagccacacctggttctcggtctgctttggcagatcataaagatcggactattcgccgacatagagctgagtaggaacgaagctctcgccgcactactgcgggatggggaaaccctggaagaacttatgaaattatccccagaggaactgctcctgaggtgggccaactttcaccttgagaattccggatggcagaagatcaacaatttctctgccgacataaaactcatcgatttctccaacagtgtcaaggattccaaagcctactttcatcttttgaatcagattgctcctaagggccagaaggagggagaaccgagaatcgacatcaacatgtccgggtttaatgagaccgatgacctcaagcgcgctgaatctatgctgcagcaggccgataaacttggttgtagacagtttgttacaccggcagacgtggtctctggcaaccctaagctgaacctagcctttgtcgctaatctcttcaataaatatccagccctcacaaaacctgaaaatcaggacattgattggaccctcttggaaggagagacaagagaggaacgcaccttcagaaattggatgaactctcttggggttaacccacacgtgaaccatctatacgcagatttgcaggacgccttggtaattctccagttgtatgagcgcatcaaggtgcccgtcgactggtctaaggtgaataagcccccatacccaaagctaggcgctaacatgaaaaaactggaaaactgtaactatgcagttgaactgggcaagcatccagccaagtttagcctggtgggcatcgggggacaagatctgaacgacggaaatcaaacgctgaccctggcactggtgtggcaattgatgcgtaggtacactctgaatgtgctcgaagacctcggtgatgggcaaaaagcgaacgacgacataattgtgaactgggtgaaccgaaccctgagtgaagctggcaaatcaacaagcattcaatctttcaaggacaagacgatcagcagctctctcgccgttgttgatttaattgatgctattcaaccgggttgtattaattatgatctggtaaaatcaggtaatctgacagaggatgataagcacaataacgctaagtacgctgtgtctatggctagacgtattggcgcaagggtttacgctctgcctgaagaccttgtagaagtaaagcctaagatggtgatgaccgtattcgcctgtctgatgggacgaggcatgaagcgcgtctag

SEQ ID NO: 101012 - DNA, 1854 bp, Artificial Sequence
  derived and/or modified sequence
atggaggacctcaattccaatggcttcatatgtgactacgaactccacgaactctttaaggaggcaaacatgcccctgcccggatacaaggtgcgagaaattatccaaaagttaatgttagatggagaccgcaacaaagacggcaagatttcttttgacgaattcgtgtatatttttcaggaagtaaaatcttcagatatcgcaaaaacttttcgcaaggctatcaatcgcaaagaggggatatgcgccctcgggggaaccagtgagctcagctcagagggcacacagcatagttactcggaagaggaaaaatacgccttcgtcaactggatcaataaggcattagagaatgatccggattgtaggcatgtcattccaatgaatccaaacacagatgacctgtttaaggcggtcggggacggaatcgtgctttgtaaaatgatcaacttaagcgtgcccgatactatcgatgaacgggctatcaacaagaagaaactgactccttttatcatacaggagaatctgaacctggccctgaactcggcaagtgccataggatgtcacgtcgtgaacattggagcggaggacctgcgcgctggaaaacctcacctggtactggggctgctctggcaaattatcaagatcggcttatttgccgacatagaactgagccggaacgaggcattagccgcattactccgtgatggggagaccctcgaggaactgatgaagctgagtcctgaggagttactgctgcgatgggcaaacttccacctcgagaactctggttggcagaagatcaacaatttcagtgccgacatcaagctgatcgatttcagcaacagcgttaaagactctaaggcctactttcacctcctgaatcagattgcaccaaaaggccagaaagagggcgaaccacgcatcgatattaatatgagcggctttaacgagaccgacgacctaaagcgtgcagagtctatgctccagcaggctgacaagctgggctgccgtcagtttgtgacaccagccgatgtggtgtctggcaaccccaagctgaaccttgcctttgtagccaaccttttcaataagtatcctgccctgaccaaacctgagaaccaggatatagactggacattgctcgaaggagagaccagagaggagcgtaccttccgaaactggatgaacagtctgggtgtcaatccgcacgtcaatcacctctacgctgacttgcaggatgctttagtgattctacagctctacgagcgtatcaaggtgcctgtggactggagcaaagtaaataagcctccttatccaaagcttggcgcaaatatgaagaagctagaaaactgcaactacgccgttgaattgggcaaacatcccgctaaattttcgctggtcggcatcgggggacaggatctgaacgatgggaaccagacactgactctcgccctggtctggcagctgatgcgacggtacaccctgaacgtgcttgaagatctcggagacggccagaaggcaaacgatgacatcatcgtcaattgggttaaccgaaccctgtctgaggccggtaaaagtacctctattcagagctttaaagacaagacaatatcctctagcctagcggtagttgatttaattgacgctattcaacctggttgcatcaactacgatctggtaaaaagtggcaatctaaccgaagatgataagcacaataacgccaagtacgcggtgagcatggcgaggcggatcggtgcccgagtgtacgccctgccggaggacctcgtggaagtcaagcctaagatggtgatgaccgtgttcgcctgtctgatgggcagggggatgaagcgggtctag

SEQ ID NO: 101013 - DNA, 1785 bp, Artificial Sequence
  derived and/or modified sequence
atgcccctgcccggctacaaggtgagagagatcatccagaagctgatgctggacggcgacagaaacaaggacggcaagatcagcttcgacgagttcgtgtacatcttccaggaggtgaagagcagcgacatcgccaagaccttcagaaaggccatcaacagaaaggagggcatctgcgccctgggcggcaccagcgagctgagcagcgagggcacccagcacagctacagcgaggaggagaagtacgccttcgtgaactggatcaacaaggccctggagaacgaccccgactgcagacacgtgatccccatgaaccccaacaccgacgacctgttcaaggccgtgggcgacggcatcgtgctgtgcaagatgatcaacctgagcgtgcccgacaccatcgacgagagagccatcaacaagaagaagctgacccccttcatcatccaggagaacctgaacctggccctgaacagcgccagcgccatcggctgccacgtggtgaacatcggcgccgaggacctgagagccggcaagccccacctggtgctgggcctgctgtggcagatcatcaagatcggcctgttcgccgacatcgagctgagcagaaacgaggccctggccgccctgctgagagacggcgagaccctggaggagctgatgaagctgagccccgaggagctgctgctgagatgggccaacttccacctggagaacagcggctggcagaagatcaacaacttcagcgccgacatcaagctgatcgacttcagcaacagcgtgaaggacagcaaggcctacttccacctgctgaaccagatcgcccccaagggccagaaggagggcgagcccagaatcgacatcaacatgagcggcttcaacgagaccgacgacctgaagagagccgagagcatgctgcagcaggccgacaagctgggctgcagacagttcgtgacccccgccgacgtggtgagcggcaaccccaagctgaacctggccttcgtggccaacctgttcaacaagtaccccgccctgaccaagcccgagaaccaggacatcgactggaccctgctggagggcgagaccagagaggagagaaccttcagaaactggatgaacagcctgggcgtgaacccccacgtgaaccacctgtacgccgacctgcaggacgccctggtgatcctgcagctgtacgagagaatcaaggtgcccgtggactggagcaaggtgaacaagcccccctaccccaagctgggcgccaacatgaagaagctggagaactgcaactacgccgtggagctgggcaagcaccccgccaagttcagcctggtgggcatcggcggccaggacctgaacgacggcaaccagaccctgaccctggccctggtgtggcagctgatgagaagatacaccctgaacgtgctggaggacctgggcgacggccagaaggccaacgacgacatcatcgtgaactgggtgaacagaaccctgagcgaggccggcaagagcaccagcatccagagcttcaaggacaagaccatcagcagcagcctggccgtggtggacctgatcgacgccatccagcccggctgcatcaactacgacctggtgaagagcggcaacctgaccgaggacgacaagcacaacaacgccaagtacgccgtgagcatggccagaagaatcggcgccagagtgtacgccctgcccgaggacctggtggaggtgaagcccaagatggtgatgaccgtgttcgcctgcctgatgggcagaggcatgaagagagtgtag

SEQ ID NO: 101014 - DNA, 1854 bp, Artificial Sequence
  derived and/or modified sequence
atggaggacctgaacagcaacggcttcatctgcgactacgagctgcacgagctgttcaaggaggccaacatgcccctgcccggctacaaggtgagagagatcatccagaagctgatgctggacggcgacagaaacaaggacggcaagatcagcttcgacgagttcgtgtacatcttccaggaggtgaagagcagcgacatcgccaagaccttcagaaaggccatcaacagaaaggagggcatctgcgccctgggcggcaccagcgagctgagcagcgagggcacccagcacagctacagcgaggaggagaagtacgccttcgtgaactggatcaacaaggccctggagaacgaccccgactgcagacacgtgatccccatgaaccccaacaccgacgacctgttcaaggccgtgggcgacggcatcgtgctgtgcaagatgatcaacctgagcgtgcccgacaccatcgacgagagagccatcaacaagaagaagctgacccccttcatcatccaggagaacctgaacctggccctgaacagcgccagcgccatcggctgccacgtggtgaacatcggcgccgaggacctgagagccggcaagccccacctggtgctgggcctgctgtggcagatcatcaagatcggcctgttcgccgacatcgagctgagcagaaacgaggccctggccgccctgctgagagacggcgagaccctggaggagctgatgaagctgagccccgaggagctgctgctgagatgggccaacttccacctggagaacagcggctggcagaagatcaacaacttcagcgccgacatcaagctgatcgacttcagcaacagcgtgaaggacagcaaggcctacttccacctgctgaaccagatcgcccccaagggccagaaggagggcgagcccagaatcgacatcaacatgagcggcttcaacgagaccgacgacctgaagagagccgagagcatgctgcagcaggccgacaagctgggctgcagacagttcgtgacccccgccgacgtggtgagcggcaaccccaagctgaacctggccttcgtggccaacctgttcaacaagtaccccgccctgaccaagcccgagaaccaggacatcgactggaccctgctggagggcgagaccagagaggagagaaccttcagaaactggatgaacagcctgggcgtgaacccccacgtgaaccacctgtacgccgacctgcaggacgccctggtgatcctgcagctgtacgagagaatcaaggtgcccgtggactggagcaaggtgaacaagcccccctaccccaagctgggcgccaacatgaagaagctggagaactgcaactacgccgtggagctgggcaagcaccccgccaagttcagcctggtgggcatcggcggccaggacctgaacgacggcaaccagaccctgaccctggccctggtgtggcagctgatgagaagatacaccctgaacgtgctggaggacctgggcgacggccagaaggccaacgacgacatcatcgtgaactgggtgaacagaaccctgagcgaggccggcaagagcaccagcatccagagcttcaaggacaagaccatcagcagcagcctggccgtggtggacctgatcgacgccatccagcccggctgcatcaactacgacctggtgaagagcggcaacctgaccgaggacgacaagcacaacaacgccaagtacgccgtgagcatggccagaagaatcggcgccagagtgtacgccctgcccgaggacctggtggaggtgaagcccaagatggtgatgaccgtgttcgcctgcctgatgggcagaggcatgaagagagtgtag

SEQ ID NO: 101015 - DNA, 1758 bp, Artificial Sequence
  derived and/or modified sequence
atgccactgccaggctataaggtgagagaaattatccagaagctgatgctggacggtgatagaaacaaagatggcaaaatctcttttgacgaattcgtctacattttccaggaggtcaagtcaagcgacattgccaagaccttcaggaaggctatcaaccgaaaagaaggcatctgcgctctagggggcacctctgagctgtcctctgagggcactcaacacagctattctgaggaggagaagtacgcgttcgttaattggattaacaaagccctggaaaatgacccggactgccggcacgttattcctatgaatccgaacacggatgatttgttcaaggccgtgggtgatgggatcgttttgtgtaagatgatcaatctttctgtgccggacacaatcgacgagagagctattaacaagaagaaactaaccccatttatcattcaggagaacctgaacctggctcttaactctgcatccgctattgggtgccacgttgtgaacataggagcagaggatctgagggccgggaaaccacatctggttctgggcctgctatggcagatcattaaaattggccttttcgccgatatcgaactgtcacgtaatgaggccctggcagcactgttgagagatggggaaactctcgaagaactcatgaagctgtcccccgaggagctgctgctgagatgggccaattttcacctggaaaactctgggtggcagaagattaacaacttcagtgcagacattaaagactctaaggcctactttcacctgctgaaccagattgctcccaagggacagaaagagggagagcctagaatcgatatcaacatgtcgggattcaacgagactgatgatctcaagagggctgagtctatgttgcagcaggccgataaactcggctgtagacagtttgtcactccagcagacgttgtatcaggaaacccaaagttgaacctggcttttgtcgcgaatctctttaacaagtacccggcccttacaaagccagagaatcaggacatcgactggaccctgctggagggcgaaactagagaggagcgcacttttcgcaattggatgaacagtttaggtgtgaatcctcatgtgaatcatctctatgccgacctgcaggatgccctggtgatcttacagttatatgaacgaatcaaagttccggtggactggtcaaaggtaaacaaacccccatacccaaaactaggggctaacatgaagaagctcgaaaactgtaactacgctgtggaactggggaaacatcctgctaagttcagcctagtggggatcggtggccaagacttgaatgacgggaaccagacacttacgctggccttagtgtggcagctgatgagaaggtacacactgaacgtgctggaggacctgggtgacggtcagaaagccaatgatgatattatcgtgaactgggtaaatcgcaccttaagtgaagccggaaagagcacctccatccagtcttttaaagataaaacaatctctagttcccttgccgtggtcgatctgatagacgccatccagccggggtgcatcaattatgacctggtgaaatctggcaatctcaccgaagacgacaagcataacaatgcaaagtacgctgtctctatggccaggagaataggtgcaagggtgtacgccttgcccgaggatctggtggaggtcaagcctaaaatggtgatgacggtctttgcctgccttatggggagaggtatgaaacgcgtctag

SEQ ID NO: 101016 - DNA, 675 bp, Artificial Sequence
  derived and/or modified sequence
atgaattccctaggggttaatcctcacgtcaaccacctgtacgcggatctgcaagatgccttggtgatcctccagctgtacgaacgcatcaaagtgcctgtggactggtccaaggttaacaagcccccataccccaagttaggcgccaatatgaaaaagttggaaaactgcaactatgcggtcgagttaggcaaacatccagctaaattcagcctggtggggatcggtggacaggatttgaacgatgggaaccagacacttacactcgccctggtgtggcaactaatgcgaaggtacaccctcaacgtcctcgaggacctgggagacggacagaaggccaacgatgacattatagtgaactgggtgaaccgcactctttctgaagctgggaaatctacttctatccagtcatttaaggacaaaaccatcagcagctccctagcggtggtcgatctaatcgacgcaattcagccgggatgtataaactacgacctggtgaagagtggtaatctgactgaggacgataagcacaacaatgccaaatatgcagtgtcaatggctagacgcattggcgccagggtttacgccttgcctgaagacctcgtggaagttaaacctaagatggtgatgacagtgtttgcctgtcttatggggagaggaatgaaacgggtctag

SEQ ID NO: 101017 - DNA, 1758 bp, Artificial Sequence
  derived and/or modified sequence
atgcccctgcccggctacaaggtgcgggagatcatccagaagctgatgctggatggagacaggaacaaggatggcaagatcagctttgatgaatttgtgtacatcttccaggaggtgaagagcagtgacatcgccaagaccttcaggaaggccatcaacaggaaggagggcatctgtgccctgggcggcaccagcgagctgagcagcgagggcacccagcacagctacagcgaggaggagaagtatgcctttgtgaactggatcaacaaggccctggagaatgaccctgactgccgccacgtgatccccatgaaccccaacacagatgacctcttcaaggctgtgggagatggcatcgtgctgtgcaagatgatcaacctgtctgtgcctgacaccattgatgagcgggccatcaacaagaagaagctgacccccttcatcatccaggagaacctgaacctggccctgaacagcgccagcgccatcggctgccacgtggtgaacattggagctgaggacctgcgggccggcaagccccacctggtgctgggcctgctgtggcagatcatcaagattggcctgtttgctgacatcgagctgagcagaaatgaggccctggccgccctgctgagagatggagagaccctggaggagctgatgaagctgagccctgaggagctgctgctgcgctgggccaacttccacctggagaacagcggctggcagaagatcaacaacttctctgctgacatcaaggacagcaaggcctacttccacctgctgaaccagatcgcccccaagggccagaaggagggggagcccagaattgacatcaacatgagcggcttcaatgaaacagatgacctgaagagagctgagagcatgctgcagcaggccgacaagctgggctgccggcagtttgtgaccccagcagatgtggtgtctggcaaccccaagctgaacctggcctttgtggccaacctcttcaacaagtacccagccctgaccaagccagagaaccaggacatcgactggaccctgctggagggggagacccgggaggagaggaccttcaggaactggatgaacagcctgggcgtgaacccccacgtgaaccacctgtatgctgacctgcaggatgccctggtgatcctgcagctgtatgaaagaatcaaggtgcctgtggactggagcaaggtgaacaagccaccctaccccaagctgggcgccaacatgaagaagctggagaactgcaactatgctgtggagctgggcaagcacccagccaagttcagcctggtgggcatcggcggccaggacctgaatgatggcaaccagaccctgaccctggccctggtgtggcagctgatgaggcgctacaccctgaatgtgctggaggacctgggagatggccagaaggccaatgatgacatcatcgtgaactgggtgaacagaaccctgtctgaggccggcaagagcaccagcatccagagcttcaaggacaagaccatcagcagcagcctggccgtggtggacctgattgatgccatccagcccggctgcatcaactatgacctggtgaagagcggcaacctgacagaagatgacaagcacaacaatgccaagtatgctgtgtccatggccaggagaattggagcccgggtgtatgccctgcctgaggacctggtggaggtgaagcccaagatggtgatgacagtgtttgcctgcctgatgggccggggcatgaagagggtgtag

SEQ ID NO: 101018 - DNA, 675 bp, Artificial Sequence
  derived and/or modified sequence
atgaacagcctgggcgtgaacccccacgtgaaccacctgtatgctgacctgcaggatgccctggtgatcctgcagctgtatgagcgcatcaaggtgcctgtggactggagcaaggtgaacaagccaccctaccccaagctgggcgccaacatgaagaagctggagaactgcaactatgctgtggagctgggcaagcacccagccaagttcagcctggtgggcattggaggccaggacctgaatgatggcaaccagaccctgaccctggccctggtgtggcagctgatgaggcgctacaccctgaatgtgctggaggacctgggagatggccagaaggccaatgatgacatcatcgtgaactgggtgaacagaaccctgtctgaggccggcaagagcaccagcatccagagcttcaaggacaagaccatcagcagcagcctggccgtggtggacctgattgatgccatccagcccggctgcatcaactatgacctggtgaagagcggcaacctgacagaagatgacaagcacaacaatgccaagtatgctgtgtccatggcccggcgcatcggggcccgggtgtatgccctgcctgaggacctggtggaggtgaagcccaagatggtgatgacagtgtttgcctgcctgatgggccggggcatgaagagggtgtag

SEQ ID NO: 101019 - DNA, 1758 bp, Artificial Sequence
  derived and/or modified sequence
atgcccctgcccggctacaaggtgcgggagatcatccagaagctgatgctggacggcgacagaaacaaggacggaaaaatctccttcgacgaatttgtttacatcttccaggaggtgaagagctctgacatcgctaaaacattcaggaaagcaataaacagaaaagaaggaatttgtgccttgggtggtacttccgagctgagtagcgagggcacgcagcactcctactctgaggaagaaaagtacgcctttgttaattggataaacaaagccctggaaaatgatcccgactgtaggcacgtgattcccatgaatcctaatacggacgatttatttaaggccgtcggcgatggtattgtgctgtgcaagatgatcaacctctccgtccccgatacgatcgatgagcgggctatcaacaagaaaaaactgacaccattcattattcaagaaaacctgaacctggccttgaactcagccagcgcaattggctgccacgtggttaacatcggggctgaagacctgcgtgcgggtaagccacatcttgtcctggggctcctgtggcagatcataaaaattggcctgttcgccgatatcgagttgtctcggaatgaagctctcgccgccctgttgcgcgacggagaaactctggaggaactgatgaaactgtctccggaagaactcctgctgcgctgggctaatttccatctcgaaaactcaggatggcagaagatcaataacttttcagccgatataaaggactccaaggcatatttccacttgctcaaccagatagcacccaaagggcagaaggagggtgagcctaggatcgatatcaacatgtctgggttcaacgaaactgacgacctcaaacgggcagagagtatgctacagcaggctgataaactgggctgtaggcagtttgttacacccgcggatgtagtatccggtaaccccaaactgaatctcgcctttgtcgccaatcttttcaacaagtatccagcacttacaaagcctgagaaccaggacatcgactggacccttcttgagggggagacccgcgaggaaaggacattccgcaattggatgaacagcctaggtgtcaacccccacgtgaatcatctttatgccgatttgcaagatgctctggtaatcctccagttatacgaaaggataaaggtgcccgtggactggtctaaggtgaataaacctccttatccgaaactcggcgcgaacatgaagaaactcgaaaattgcaactatgctgtggaacttggcaaacatcctgcgaaattctcactggtgggtatcgggggccaagacctcaacgacggaaaccagacactcactcttgctttggtgtggcaactgatgcggagatatactctcaacgtactggaggatttaggcgacggacagaaggctaacgacgatattatagttaactgggtgaatcgaaccctgtcagaggcaggcaaatcaaccagtatacagagcttcaaagataaaacaatcagttcatcccttgcggtagtagatctgatagatgccattcaacctgggtgcatcaactatgacctggtcaaatctgggaatctaacagaagatgataagcacaataacgccaagtacgcggtgtctatggctcggagaataggagcccgggtctacgccctaccagaggaccttgtagaggtcaagccgaaaatggtgatgacggtattcgcctgtttgatgggtagaggcatgaagcgcgtctag

SEQ ID NO: 101020 - DNA, 675 bp, Artificial Sequence
  derived and/or modified sequence
atgaacagcctgggcgtgaacccccacgtgaaccacctgtacgccgatctgcaggatgctctggtgatcctacagctgtacgaacgcatcaaagtcccagttgactggagtaaggtgaacaaaccgccttacccaaaactcggagcgaatatgaaaaagctggaaaattgcaattacgctgtggaactgggcaaacatccagctaaattctctttggtcggcatcggtggccaggatcttaatgatggcaatcaaactctgaccctggctctggtgtggcaactcatgcgaaggtatactctgaacgtgctagaggacttgggcgatggacagaaggccaacgatgacatcatcgttaactgggtcaatcggaccctgtcggaggctggcaaatctacatctatccagagctttaaagacaagaccatttctagttcactggcagtggtcgatttgattgatgccatccagccaggatgcatcaactatgacctggtaaaaagtggcaacctcacagaagacgataaacacaataatgcaaagtacgcagtgtcgatggctagaaggatcggagctcgtgtgtatgctttaccagaggatctggtggaggttaagcccaaaatggtgatgaccgtctttgcgtgtctcatgggcaggggcatgaagagagtgtag

SEQ ID NO: 101021 - DNA, 916 bp, Artificial Sequence
  derived and/or modified sequence
aaatcgcaccaaaaggacaaaaggaaggtgaaccacggatagatattaacatgtcaggtttcaatgagaaactcgtgaagaaagaaccttccgtaactggatgaactctcttggtgtcaatcctcacgtaaaccatctctatgctgacctgcaagatgccctggtaatcttacagttatatgaacgaattaaagttcctgttgactggagtaaggttaataaacctccatacccgaaactgggagccaacatgaaaaagctagaaaactgcaactatgctgttgaattagggaagcatcctgctaaattctccctggttggcattggagggcaagacctgaatgatgggaaccaaaccctgactttagctttagtctggcagctgatgagaagatataccctcaatgtcctggaagatcttggagatggtcagaaagccaatgacgacatcattgtgaactgggtgaacagaacgttgagtgaagctggaaaatcaacttccattcagagttttaaggacaagacgatcagctccagtttggcagttgtggatttaattgatgccatccagccaggctgtataaactatgaccttgtgaagagtggcaatctaacagaagatgacaagcacaataatgccaagtatgcagtgtcaatggctagaagaatcggagccagagtgtatgctctccctgaagaccttgtggaagtaaagcccaagatggtcatgactgtgtttgcatgtttgatgggcaggggaatgaagagagtgtaaaataaccaatctgaataaaacagccatgctcccaggtgcatgattcgcaggtcagctatttccaggtgaagtgcttatggcttaaggaactcttggccattcaaaggacttttcattttgattaacaggactagcttatca

SEQ ID NO: 101022 - DNA, 1758 bp, Artificial Sequence
  derived and/or modified sequence
atgccattgccgggttataaggtcagggagatcattcagaaactgatgctggatggagatcggaataaagacggtaaaatctccttcgatgagtttgtgtatatttttcaggaggttaagtccagcgatatcgctaaaacattccgaaaagctatcaaccggaaggaagggatctgcgccctcggcggaacttccgagctgtcgtccgaggggacccagcactcttacagcgaggaagagaaatacgcgttcgtgaactggatcaataaagcattagaaaatgacccggactgtcgccatgtcatcccaatgaaccccaatacggacgatttgttcaaagccgtcggagatgggattgttctgtgcaagatgataaacctatctgtccccgataccatcgacgaaagagccatcaataagaaaaaactgactcccttcataatccaggagaacctgaatctagctctcaacagcgcttcagctatcggatgtcacgtagtgaatataggcgcagaggatctccgggctgggaagccgcatctcgtgctggggctgttatggcagattataaaaatcggcctcttcgctgacattgaactgagcagaaatgaagcacttgctgcccttttacgagacggagaaactttagaagaactgatgaagctttctcctgaggaattgctgctgcggtgggcaaactttcacctcgagaattcaggctggcagaagatcaacaatttttctgccgatattaaggactccaaggcctattttcacctccttaatcagatagcgcctaaggggcaaaaagagggggaaccacgtattgatataaacatgtctggcttcaatgagactgatgatctgaagagagccgaatcaatgttgcagcaagccgacaaactgggttgtagacagtttgtgactcctgccgacgtggtgagcggcaatcccaagctgaatctcgccttcgtggccaatttgtttaacaagtatccagccctgacaaaacccgaaaatcaagatattgactggaccctgcttgagggtgaaacaagggaggagaggacattccgaaattggatgaactcactgggggtgaatcctcacgtcaatcacctctatgctgacctccaggacgccctggtgattctccagctgtatgagcggattaaggtgccagtggattggtccaaggtgaacaagcccccataccctaagctcggcgcaaacatgaagaagctagaaaactgcaattatgcagtggagttgggaaagcaccccgcaaagttttccctggtggggatcggaggacaggacttgaatgacgggaaccaaaccctgacattagcactggtctggcaactgatgcggagatataccctcaacgtgctggaggacttgggcgacggacagaaggccaacgatgatattatcgtaaattgggttaatagaacactgtcggaggccggtaaaagtacatctattcagtcctttaaggacaagacgatcagctcctctctggcggttgttgatctgattgatgccatccagcccggatgcatcaattacgatttggtcaagtcgggtaacttaaccgaggacgacaaacacaacaacgccaagtatgccgtgagcatggctcgtcggatcggagcccgagtgtacgctctgcccgaagacctcgtcgaagtgaagcccaagatggtgatgaccgtgtttgcatgcttaatgggtagggggatgaaaagggtgtag

SEQ ID NO: 101023 - DNA, 675 bp, Artificial Sequence
  derived and/or modified sequence
atgaattcgctcggggtgaatcctcatgtaaaccatctctacgctgacctccaggacgcgctcgtgatcctccagttatacgagcgtattaaagtgcccgttgattggtccaaggtcaataagcctccatatccgaagctcggcgctaatatgaagaaactcgagaactgtaattatgcagtggaactgggtaaacaccctgctaaatttagtctggtgggcattgggggacaggacctaaacgatggtaatcagaccctaaccctagctttagtgtggcagctgatgcgtcggtacaccctgaacgtccttgaggaccttggagacgggcagaaagccaacgacgatatcatcgttaactgggtcaatcgcaccctgagcgaggccggtaaaagtacctcgatccagtcatttaaagacaagacaatctcttccagcctagccgttgtggacttgatcgatgcaattcagccaggatgcatcaactatgatcttgtgaaaagcggaaatctcactgaggatgataagcacaacaacgccaaatacgccgtctctatggcgcgacggataggggcacgtgtctatgcgttgccggaggatttggtcgaggtgaaaccaaaaatggtaatgacagtatttgcatgcctgatgggacggggaatgaagagggtgtag

SEQ ID NO: 101024 - DNA, 1758 bp, Artificial Sequence
  derived and/or modified sequence
atgcccctgcccggctacaaggtgagagagatcatccagaagctgatgctggacggcgacagaaacaaggacggcaagatcagcttcgacgagttcgtgtacatcttccaggaggtgaagagcagcgacatcgccaagaccttcagaaaggccatcaacagaaaggagggcatctgcgccctgggcggcaccagcgagctgagcagcgagggcacccagcacagctacagcgaggaggagaagtacgccttcgtgaactggatcaacaaggccctggagaacgaccccgactgcagacacgtgatccccatgaaccccaacaccgacgacctgttcaaggccgtgggcgacggcatcgtgctgtgcaagatgatcaacctgagcgtgcccgacaccatcgacgagagagccatcaacaagaagaagctgacccccttcatcatccaggagaacctgaacctggccctgaacagcgccagcgccatcggctgccacgtggtgaacatcggcgccgaggacctgagagccggcaagccccacctggtgctgggcctgctgtggcagatcatcaagatcggcctgttcgccgacatcgagctgagcagaaacgaggccctggccgccctgctgagagacggcgagaccctggaggagctgatgaagctgagccccgaggagctgctgctgagatgggccaacttccacctggagaacagcggctggcagaagatcaacaacttcagcgccgacatcaaggacagcaaggcctacttccacctgctgaaccagatcgcccccaagggccagaaggagggcgagcccagaatcgacatcaacatgagcggcttcaacgagaccgacgacctgaagagagccgagagcatgctgcagcaggccgacaagctgggctgcagacagttcgtgacccccgccgacgtggtgagcggcaaccccaagctgaacctggccttcgtggccaacctgttcaacaagtaccccgccctgaccaagcccgagaaccaggacatcgactggaccctgctggagggcgagaccagagaggagagaaccttcagaaactggatgaacagcctgggcgtgaacccccacgtgaaccacctgtacgccgacctgcaggacgccctggtgatcctgcagctgtacgagagaatcaaggtgcccgtggactggagcaaggtgaacaagcccccctaccccaagctgggcgccaacatgaagaagctggagaactgcaactacgccgtggagctgggcaagcaccccgccaagttcagcctggtgggcatcggcggccaggacctgaacgacggcaaccagaccctgaccctggccctggtgtggcagctgatgagaagatacaccctgaacgtgctggaggacctgggcgacggccagaaggccaacgacgacatcatcgtgaactgggtgaacagaaccctgagcgaggccggcaagagcaccagcatccagagcttcaaggacaagaccatcagcagcagcctggccgtggtggacctgatcgacgccatccagcccggctgcatcaactacgacctggtgaagagcggcaacctgaccgaggacgacaagcacaacaacgccaagtacgccgtgagcatggccagaagaatcggcgccagagtgtacgccctgcccgaggacctggtggaggtgaagcccaagatggtgatgaccgtgttcgcctgcctgatgggcagaggcatgaagagagtgtag

SEQ ID NO: 101025 - DNA, 675 bp, Artificial Sequence
  derived and/or modified sequence
atgaacagcctgggcgtgaacccccacgtgaaccacctgtacgccgacctgcaggacgccctggtgatcctgcagctgtacgagagaatcaaggtgcccgtggactggagcaaggtgaacaagcccccctaccccaagctgggcgccaacatgaagaagctggagaactgcaactacgccgtggagctgggcaagcaccccgccaagttcagcctggtgggcatcggcggccaggacctgaacgacggcaaccagaccctgaccctggccctggtgtggcagctgatgagaagatacaccctgaacgtgctggaggacctgggcgacggccagaaggccaacgacgacatcatcgtgaactgggtgaacagaaccctgagcgaggccggcaagagcaccagcatccagagcttcaaggacaagaccatcagcagcagcctggccgtggtggacctgatcgacgccatccagcccggctgcatcaactacgacctggtgaagagcggcaacctgaccgaggacgacaagcacaacaacgccaagtacgccgtgagcatggccagaagaatcggcgccagagtgtacgccctgcccgaggacctggtggaggtgaagcccaagatggtgatgaccgtgttcgcctgcctgatgggcagaggcatgaagagagtgtag

SEQ ID NO: 101026 - protein, 282 aa, Artificial Sequence
  derived and/or modified sequence
MALVLILQLLTLWPLCHTDITPSVPPASYHPKPWLGAQPATVVTPGVNVTLRCRAPQPAWRFGLFKPGEIAPLLFRDVSSELAEFFLEEVTPAQGGIYRCCYRRPDWGPGVWSQPSDVLELLVTEELPRPSLVALPGPVVGPGANVSLRCAGRLRNMSFVLYREGVAAPLQYRHSAQPWADFTLLGARAPGTYSCYYHTPSAPYVLSQRSEVLVISWEGEGPEARPASSAPGMQAPGPPPSDPGAQAPSLSSFRPRGLVLQPLLPQTQDSWDPAPPPSDPGV

SEQ ID NO: 101027 - DNA, 849 bp, Artificial Sequence
  derived and/or modified sequence
atggccctggtgctgatccttcagctgcttacattatggcctctgtgccacaccgacatcaccccgagtgtgccccctgcgtcctatcaccctaagccatggctcggcgctcagcctgctaccgtggtgactcctggagtgaacgtgaccctgcgctgtcgggcgccacagcccgcctggaggttcgggctgttcaaacctggggagatcgcccctctgcttttccgggacgtttcctcggaactggcagaattttttctcgaggaggttactcctgctcaaggcgggatatatcgttgttgttacaggaggccagattggggccctggggtatggagccagccttccgatgtcctcgaattacttgtcaccgaggaactgcctcggccatcactggtggcccttcctggccccgtcgtgggccccggggcgaacgtctccctgaggtgtgctggaagattacgaaacatgtctttcgtgctctatcgcgaaggagtcgcagcgccactgcagtatcgacattctgcccagccatgggctgacttcacccttctcggagcacgcgctccaggtacgtattcatgttattaccacacgccgagtgccccttacgtgttgtcacaacgatcagaggtgctggtgatcagttgggagggagagggccctgaagctcgtcctgcctcctcggcccctggtatgcaggctcctggccctcctccttctgacccaggtgctcaggctccgagtcttagctccttccgtcctcgggggctggtccttcagcctctcttgccacagacccaggattcatgggacccagctcctcctccatccgaccctggagtgtag

SEQ ID NO: 101028 - DNA, 849 bp, Artificial Sequence
  derived and/or modified sequence
atggccctggtgctgatcctgcagctgctgaccctgtggcccctgtgccacacagacatcaccccatctgtgcccccagccagctaccaccccaagccctggctgggcgcccagcctgccaccgtggtgaccccaggagtgaatgtgaccctgcgctgccgggccccccagcctgcctggaggtttggcctcttcaagccaggagagatcgcccccctgctcttcagagatgtgagcagcgagctggccgagttcttcctggaggaggtgaccccagcccagggcggcatctaccgctgctgctacagaagaccagactggggccctggggtgtggagccagcccagtgatgtgctggagctgctggtgacagaggagctgccccggcccagcctggtggccctgcccggccctgtggtgggccctggggccaacgtgtccctgcgctgtgccggccgcctgaggaacatgagctttgtgctgtaccgggagggcgtggccgcccccctgcagtaccgccacagcgcccagccctgggccgacttcaccctgctgggcgcccgggcccctggcacctacagctgctactaccacaccccatctgccccctacgtgctgagccagaggtctgaggtgctggtgatctcctgggagggggagggccctgaggcccggcctgccagcagcgcccctggcatgcaggcccctggccccccacccagcgaccccggggcccaggcccccagcctgagcagcttccggccccggggcctggtgctgcagcccctgctgccccagacccaggacagctgggaccctgcccccccacccagcgaccccggggtgtag

SEQ ID NO: 101029 - DNA, 849 bp, Artificial Sequence
  derived and/or modified sequence
atggccctggtgctgatcctgcagctgctgaccctgtggcccctgtgtcataccgatattactccaagcgtcccacctgcttcataccatccgaagccctggctgggggcgcagccggccactgtggttactccaggcgttaacgttactctccggtgccgggctccccagcctgcttggcggtttggattattcaagcctggagagatagcacccttgctgttccgagacgttagctccgaacttgccgaattcttcctagaagaagtgacgcctgcccagggagggatctaccgctgttgctacagacgccccgactggggtcccggggtttggagccagccaagcgatgttctcgagctcctcgtaacagaagaattgccccgccccagcttagtggctttgccaggccccgtggtcggccctggggccaatgtctccttgcgctgcgccgggagactgcgaaatatgagtttcgttctctatagagaaggggtcgccgcccccttacaatatcggcactccgcccaaccatgggctgactttacactcttgggagccagagcacctggcacgtactcctgttactaccatacaccttcagctccatatgtcctgtcacagaggtctgaagtgttggtgatcagctgggagggcgagggacctgaggcaagacccgcaagcagtgcacctgggatgcaggcacctggacccccgccgagcgaccccggcgcccaggcgccatctctgagcagtttcaggccaaggggactcgttcttcagccgctactgccccagacccaggactcttgggacccggctccccctccttccgacccaggagtgtag

SEQ ID NO: 101030 - DNA, 849 bp, Artificial Sequence
  derived and/or modified sequence
atggcgctcgtcctcatcttgcaactgctgactctttggccactttgccacacagacataactccttctgttccaccggctagctatcatcccaagccttggctgggcgcacaacctgccacggtggtaacgccaggtgttaatgtcacgctgcgctgcagagccccacagccagcatggcgctttgggctatttaagcctggggagatcgctcctctactgttccgggatgtgtcttcagagctggccgagttcttcctggaggaagtgacacccgcacaggggggaatatacagatgctgctacagacgccctgactggggcccaggggtttggtcccagcccagtgacgtgttagaactgctggtgactgaggagctgcccaggccatctctcgttgcacttcctggccctgtggtaggcccaggcgctaacgtctcccttcgttgtgccggtcgactacggaacatgtctttcgtattatatcgtgaaggcgtggcagccccactccagtatcgccatagcgcacagccgtgggctgatttcactctcctgggcgctagggccccagggacatattcctgctactaccatacgcccagtgctccatatgtgttaagccaaagaagcgaagttctcgtgatatcatgggaaggcgagggcccagaggcccgacctgccagttccgcgccaggaatgcaagctccgggtccccctccaagcgatcctggcgctcaggctccttccctgtcaagttttcgccctcgtggacttgtcttgcaacccttacttccccagactcaagacagctgggaccctgcacctccaccctctgatcctggcgtctag

SEQ ID NO: 101031 - DNA, 849 bp, Artificial Sequence
  derived and/or modified sequence
atggctctagtgctgattctccaactactgacactgtggcccctgtgtcacacagacattactccctctgtccctcctgcatcttaccatccaaaaccctggttaggcgcccagccagccaccgtggtgactcccggtgtgaatgtcactttacggtgtcgtgcaccccagcctgcttggcgattcggtctcttcaagcctggcgaaattgccccactgcttttcagggatgtttctagtgagcttgctgagttctttttggaggaagtcacacccgcccagggcggcatctatcggtgctgctacagacggccagactggggtcctggtgtctggagccagcctagcgatgtcctggaactgctggtaactgaagagttgcctcgtccttccctggtggcactgccgggtcctgttgtggggccgggtgcaaacgtgtcgctgaggtgcgctggccggctccggaacatgtccttcgtgttatacagagaaggagtcgcagcccctctgcaatatcgacactcagctcagccctgggccgatttcacactgcttggagctcgcgcacccggaacttactcctgttattatcacaccccctccgcgccctacgtcttgagccagagaagcgaggtactggtgatctcgtgggagggggaaggaccagaagcgagaccagctagcagcgctccaggaatgcaagccccaggcccgccaccttctgatcccggtgcacaggccccctcactgtcaagcttccggccacgaggactcgtcctgcagcccctgttgccccagacacaggattcttgggatcccgccccaccacctagcgatcctggagtttag

SEQ ID NO: 101032 - DNA, 849 bp, Artificial Sequence
  derived and/or modified sequence
atggccctcgttctcatcctgcagcttttgaccctttggcccttatgccacacggacatcacccccagtgtacccccagcttcatatcacccaaaaccctggcttggcgctcagcccgcaacagtggtcacacctggtgtgaacgtgacattgaggtgtcgcgcacctcagcctgcctggcggtttggcttgtttaaacccggagaaatcgcccccctactcttccgggacgtctcttctgagcttgccgaattttttctggaagaggtgacccccgcacagggcggaatataccggtgttgctatcgacgaccagactggggtcctggagtttggtcgcagccgagcgacgtcctggaactgctcgtcaccgaggaactgccaaggccaagcctcgttgctctgcccggcccagttgtgggccctggagcaaacgtatctctgcgctgcgctggacgcctgcggaacatgagttttgtactatatagagaaggggttgctgcaccattacagtaccggcatagcgcccagccctgggcagacttcacattactgggcgctcgggctcccggaacttattcgtgttattatcacacaccttctgctccatacgttctaagccagcgctccgaggtactcgtgatttcctgggaaggtgaaggccctgaagcaaggcccgcctctagtgctccgggaatgcaggctcctggcccgcctccttctgatccaggggcccaggccccatctttatctagcttcagaccccgcggactggtactacagccactcttgccccagacacaagactcatgggaccccgccccccctccatccgatcctggcgtctag

SEQ ID NO: 101033 - DNA, 849 bp, Artificial Sequence
  derived and/or modified sequence
atggccctggtgctgatcctgcagctgctgaccctgtggcccctgtgccacaccgacatcacccccagcgtgccccccgccagctaccaccccaagccctggctgggcgcccagcccgccaccgtggtgacccccggcgtgaacgtgaccctgagatgcagagccccccagcccgcctggagattcggcctgttcaagcccggcgagatcgcccccctgctgttcagagacgtgagcagcgagctggccgagttcttcctggaggaggtgacccccgcccagggcggcatctacagatgctgctacagaagacccgactggggccccggcgtgtggagccagcccagcgacgtgctggagctgctggtgaccgaggagctgcccagacccagcctggtggccctgcccggccccgtggtgggccccggcgccaacgtgagcctgagatgcgccggcagactgagaaacatgagcttcgtgctgtacagagagggcgtggccgcccccctgcagtacagacacagcgcccagccctgggccgacttcaccctgctgggcgccagagcccccggcacctacagctgctactaccacacccccagcgccccctacgtgctgagccagagaagcgaggtgctggtgatcagctgggagggcgagggccccgaggccagacccgccagcagcgcccccggcatgcaggcccccggccccccccccagcgaccccggcgcccaggcccccagcctgagcagcttcagacccagaggcctggtgctgcagcccctgctgccccagacccaggacagctgggaccccgcccccccccccagcgaccccggcgtgtag

SEQ ID NO: 101034 - protein, 783 aa, Artificial Sequence
  derived and/or modified sequence
MVAKPPVMSFHFAQDLWPEQNIKDSFQKVTLRRYGKCEYENLQLRKGCKHVDECTGHKGGHNTVNQCLTATPSKIFQCNKYVKVFDKFSNSNRYKRRHTGNKHFKCKECSKSFCVLSQLTQHRRIHTRVNSYKCEECGKAFNWFSTLTKHKRIHTGEKPYKCEECGKAFNQSSQLTRHKIIHTEEKPNKCEECGKAFKQASHLTIHKIIHTGEKPYKYEECGKVFSQSSHLTTQKILHTGENLYKCKECGKAFNLFSNLTNHKRIHAGEKPYKCKECGRAFNISSNLNKQEKIHTGGKLNKCEECDKAFNRSLKLTAHKKILMEEKPYKCEECGKVFNQFSTLTRHKIIHTGEKPYKCKECGKAFNQSSNLTEHKKIHTAEKSYKCEECGKAFNQHSNLINHRKIYSGEKPYKCEECGKAFNRSSTLTRHKKIHTGEKPYKCEECDRAFSQSSNLTEHKKIHTGEKPYKCEECGKAFNRFSTLTKHKRIHTGEKPYKCEECGKAFNQSYQLTRHKIVHTKEKLNKCEEFGKAFKQSSHRTIHKIIHTGEKPYKCEEHGKVFNQSSNLTTQKIIHTGENLYKFEEHGKAFNLFSNITNHKIIYTGEKPHKCEECGKAYNRFSNLTIHKRIHTGEKPYQCAECGKAFNCSSTLNRHKIIHTGEKPYKCKECGKAFNLSSTLTAHKKIHTGEKPYKCEECGKAFNQSSNLTTHKKIHTSEKPYKCEECGKSFNQFSSLNIHKIIHTGEKPYKCGDYGRAFNLSSNLTTHKKIHTGEKPYKCEYGKT

SEQ ID NO: 101035 - DNA, 5508 bp, Artificial Sequence
  derived and/or modified sequence
gcctttgtctctggctgcagccggagctcctgctctcctcctcactgctcagtgtcctctgctcctagaggcccagcctctgtgtccctgtgacctgcagatattgggagatccacagctaagacgccgggactccctggaaacctagaaatgatggagtctcgctctgttgctcaggctgaagggcagtggtgcgatctcggctcactgaaacctccgccttccgggctcaagcaattctcctgcctcaacctcgcaagtagctgggattacaggcatgcaccaccatgcccagactgtgccataacacacatttgatgctgaaatccgggataggggaactcctttgggagtcgtgtcccttaaccccttcccccgacttcttgaagagacccacccgcgacctcggtacctcggaccagctctgtaaaagccccgcctctgccttcggataggtctggccccaccctggagtcttgcctcacagaactgattagaagagatcagagttttggctggtgcctttccggagtggttgctaacaattcccgaattccacaaggagataaatgggaaaaaaaggaaccactgacatttaaagatgtcgccatagaattctctctggaggagtggcaatgcctggatactgcacagcgggatttatataggaatgtgttgttagagaactacagaaacctggtctttttgggtattgctgtctctaagccatatctgatcacctgtctggagcaaaaaaaagagccctggaatataaaaagacatgagatggtagccaaacccccagtaatgtcttttcattttgcccaagacctttggccagagcagaacataaaagattctttccagaaagtgacactgagaagatacggaaaatgtgaatatgagaatttacagttaagaaaaggctgtaaacatgtggatgagtgtacggggcacaaaggaggtcataatacagttaaccaatgtttgacagctaccccaagcaaaatattccagtgtaataaatatgtgaaagtctttgataaattttcaaattcaaatagatataagagaagacatacaggaaacaaacacttcaaatgtaaagaatgtagcaaatcattttgcgtgctttcacaactaactcagcatagaagaattcatactagagtgaattcctacaaatgtgaagaatgtggaaaagcctttaactggttctcaactcttactaaacataagagaattcatactggagaaaagccctacaaatgtgaagaatgtggcaaagcctttaaccagtcctcacaacttactaggcataagataattcatactgaagagaaacccaacaaatgtgaagaatgtggcaaggcctttaaacaggcctcacaccttactatacataaaataattcatactggagaaaaaccttacaaatatgaagaatgtggcaaagtctttagccagtcctcacaccttactacacaaaagatacttcacactggagagaacctctacaagtgtaaagaatgtggaaaagcttttaacctattctcaaatcttactaaccataagagaattcatgctggggagaaaccctacaaatgtaaagaatgtggcagagcttttaacatatcctcaaaccttaataaacaggagaaaattcatactggagggaaactcaacaaatgtgaagaatgtgacaaagcttttaaccgatccttaaaacttactgcacataagaaaattctaatggaagagaaaccctacaaatgtgaagaatgtggcaaagtctttaaccagttctcaactcttactagacataagataattcatactggagagaaaccctacaaatgtaaagaatgtggcaaagcttttaaccaatcttcaaaccttactgaacataagaaaattcatactgcagagaaatcctataaatgtgaagaatgtggcaaagcttttaaccaacactcaaacctaattaaccataggaaaatttattctggagagaaaccatacaaatgtgaagaatgtggaaaagcttttaatcgatcctcaacccttactagacataagaaaattcatactggagagaaaccctacaaatgtgaagaatgtgacagagcttttagccagtcttcaaaccttactgaacataagaaaattcatactggagagaaaccctataaatgtgaggaatgtggcaaagcttttaaccgattctcaacccttactaaacataagagaattcatactggagaaaaaccctataaatgtgaagaatgtggaaaagcctttaatcaatcctatcaacttactagacataagatagttcatactaaagagaaactcaacaaatgtgaagaatttggcaaggcctttaaacagtcctcacaccgtactatacataaaattattcatactggagagaaaccctacaaatgtgaagaacatggcaaagtttttaaccagtcctcaaaccttactacacaaaagataattcatactggagagaacctctacaaatttgaagaacatggaaaagcttttaacctattctcaaacattactaaccataagataatttatactggagagaaaccccacaaatgtgaagaatgtggaaaagcttataaccgattctcaaacctaactatacataagagaattcatacgggagagaaaccttaccaatgtgcagaatgtggcaaagcctttaactgctcctcaacccttaatagacataagataattcatactggagagaaaccttacaaatgtaaagaatgtggcaaagcttttaacctatcctcaacccttactgcacataagaaaattcatactggagagaaaccctataaatgtgaagaatgtggcaaagcttttaaccaatcctcaaaccttactacacataagaaaattcatacttcagagaaaccctacaaatgtgaagaatgtggcaaatcctttaaccagttctcatctcttaatatacataagataattcatactggagagaaaccctacaaatgtggagattatggcagagctttcaacctatcctcaaatcttactacacataagaaaattcatactggagagaaaccctacaaatgtgaatatggcaaaacttaattgatcctacaagcttactacacataagaaaattcatactggagagaaactacaaatgtgaagaatgtgttaaagcctttaacaagtcttcaactttttctgcacacacgaggtattttatactggtgagaaaccttacaatgtaaagaatgtggcacagcttttaactaatcttcaaaccttactgaaagttgagaaaattcgtactggagagaatcctacaaatgtgaaaaatgtggcaaatcctttaactgatcctcaacttttactaaacataaggtaattcatactggagaaaagccatacaaatgagaagaatgtggcaatgcctttaatcagtcctcacacctttctacacataagataatttatactggagaggaactctatagttgtgaagaatgtggcaaagcttttaaccaatcctcataccttactatacagaaattcatactggagagaaagcctacaattgtgaagaatgtggcaaagcttttaaccttccttaacccttaactgtagataagaaaattcatactggaaagaaaccctacaaatgtgaagtctgtggcaaagcttttaactgattctcaactcttactacatgtaagagtatttatactggaaagaaaccctacaaatgtaaaaaacgtggcaatgcctttaactggtcctcacaccttgctacatataagacagtttatactttgagagaaaccctgcaaatgtgaataatgtggcaatactttaaaccaatcctcaaacctcactaaacataagataatactgaaaactttacaaacctgaatgatgtgacaataattttgacaacacctcgaactttctaacataaatcatactggtgaaaaatcctagaaatgtgaaaaatatcacaaagcctttaaatggttgtcacacttgattgtaggtaagaatccatactgaagaaaactcctggaagtgtaaaaaatgtggcaacacttttaataaatgctcaccccttattgcacaggaaagcatttatacttcagaaagattgtacaaatacaaggaatgtggaaaagccattattatctgctcagattttactcaacattagagagttagtacgtaataaaagcattataaatgcaatttttgtcaagagatctttcagaaaatataagcctttaaagtgaagaagaggagccagttgtgctggctcacatctgtaatgccagcactttgggaggccaaggtgggtggatcacctgagggcaggagtctgagaccagcctggccaacatagcaaaaccccatctctattaaaaattttacaaaaattagctgcgtgtggtggcaggcccctgtaatcccagctaattgggaggctgaagcaggagaattgctcaaacctgggaggcgaagattgcagtgagctgaaatcacaccactacactccagccaaagcaacaagagcaaaaacttcgtctcaaaaacaaaacaaaaaaagagtattcattgtgaggacaaacaatacaaatacgaagagggttgtagtacctttacttgtatcacagatacttttgtacccattttgcactagaggaaaaccatgaagcagttgctcaaatgttgttcaacaccagaaaatttatattggagaaaagcactgtaaatgtaatgcatttgtgaaaacattttttaaaaaactacagcttagaaaataccagaggcctcatactaaaatatatttttgcaagtgaagtaaatataaaaataatttaatccaaaattaagtctatataaatatcagagaattcacagtagaaatatctaaggtactgacacttcagacattgctgagtatagaatcagaatgctgagtatagaaaataatttaaaactaaagttggtaggtaaataatgtgtatataactttaaaagaagtagaatttttttgtagatgtataattacattcaaattatattttttcttgaaaaattagtttttgaaaagcaaatgatgtaattcaactcaaattcatgctcttcattcctattgtattcacatgtgaaagcatgtgattaatttttcatgcatcaaagatatgagaaatcatttctgttaggtcggtattatttatgacactttctatgaaagaataaggacattaaaatgtaagatgcatgatgaaaacctgagtgaagaggctgtttgtgtttaacttataatattgagtgatccatgaagtaggttttcagagcaatattcttctgcattatagtaagagaaaaccatttttaatcttagttaaaattaaagtgaattagtagtatatcattttactatttgtacttttatgtaataaaatgcaatgtgtttaaaaa

SEQ ID NO: 101036 - DNA, 2352 bp, Artificial Sequence
  derived and/or modified sequence
atggtggccaagccccccgtgatgagcttccacttcgcccaggacctgtggcccgagcagaacatcaaggacagcttccagaaggtgaccctgagaagatacggcaagtgcgagtacgagaacctgcagctgagaaagggctgcaagcacgtggacgagtgcaccggccacaagggcggccacaacaccgtgaaccagtgcctgaccgccacccccagcaagatcttccagtgcaacaagtacgtgaaggtgttcgacaagttcagcaacagcaacagatacaagagaagacacaccggcaacaagcacttcaagtgcaaggagtgcagcaagagcttctgcgtgctgagccagctgacccagcacagaagaatccacaccagagtgaacagctacaagtgcgaggagtgcggcaaggccttcaactggttcagcaccctgaccaagcacaagagaatccacaccggcgagaagccctacaagtgcgaggagtgcggcaaggccttcaaccagagcagccagctgaccagacacaagatcatccacaccgaggagaagcccaacaagtgcgaggagtgcggcaaggccttcaagcaggccagccacctgaccatccacaagatcatccacaccggcgagaagccctacaagtacgaggagtgcggcaaggtgttcagccagagcagccacctgaccacccagaagatcctgcacaccggcgagaacctgtacaagtgcaaggagtgcggcaaggccttcaacctgttcagcaacctgaccaaccacaagagaatccacgccggcgagaagccctacaagtgcaaggagtgcggcagagccttcaacatcagcagcaacctgaacaagcaggagaagatccacaccggcggcaagctgaacaagtgcgaggagtgcgacaaggccttcaacagaagcctgaagctgaccgcccacaagaagatcctgatggaggagaagccctacaagtgcgaggagtgcggcaaggtgttcaaccagttcagcaccctgaccagacacaagatcatccacaccggcgagaagccctacaagtgcaaggagtgcggcaaggccttcaaccagagcagcaacctgaccgagcacaagaagatccacaccgccgagaagagctacaagtgcgaggagtgcggcaaggccttcaaccagcacagcaacctgatcaaccacagaaagatctacagcggcgagaagccctacaagtgcgaggagtgcggcaaggccttcaacagaagcagcaccctgaccagacacaagaagatccacaccggcgagaagccctacaagtgcgaggagtgcgacagagccttcagccagagcagcaacctgaccgagcacaagaagatccacaccggcgagaagccctacaagtgcgaggagtgcggcaaggccttcaacagattcagcaccctgaccaagcacaagagaatccacaccggcgagaagccctacaagtgcgaggagtgcggcaaggccttcaaccagagctaccagctgaccagacacaagatcgtgcacaccaaggagaagctgaacaagtgcgaggagttcggcaaggccttcaagcagagcagccacagaaccatccacaagatcatccacaccggcgagaagccctacaagtgcgaggagcacggcaaggtgttcaaccagagcagcaacctgaccacccagaagatcatccacaccggcgagaacctgtacaagttcgaggagcacggcaaggccttcaacctgttcagcaacatcaccaaccacaagatcatctacaccggcgagaagccccacaagtgcgaggagtgcggcaaggcctacaacagattcagcaacctgaccatccacaagagaatccacaccggcgagaagccctaccagtgcgccgagtgcggcaaggccttcaactgcagcagcaccctgaacagacacaagatcatccacaccggcgagaagccctacaagtgcaaggagtgcggcaaggccttcaacctgagcagcaccctgaccgcccacaagaagatccacaccggcgagaagccctacaagtgcgaggagtgcggcaaggccttcaaccagagcagcaacctgaccacccacaagaagatccacaccagcgagaagccctacaagtgcgaggagtgcggcaagagcttcaaccagttcagcagcctgaacatccacaagatcatccacaccggcgagaagccctacaagtgcggcgactacggcagagccttcaacctgagcagcaacctgaccacccacaagaagatccacaccggcgagaagccctacaagtgcgagtacggcaagacctag

SEQ ID NO: 101037 - DNA, 2352 bp, Artificial Sequence
  derived and/or modified sequence
atggtggctaaacctcccgttatgtcctttcattttgctcaggatctgtggcctgaacagaatattaaagatagctttcaaaaggttaccctgcggcgctatgggaaatgcgaatacgagaacctgcagctgcggaaggggtgtaaacatgtcgatgaatgtacaggtcacaaaggtggccacaacaccgtgaatcagtgcctgactgcaactccctcaaagatatttcagtgtaataagtatgtcaaggtgttcgacaagttttccaatagcaaccgatacaagagacggcacaccggcaacaaacattttaagtgcaaggaatgttccaaaagtttctgtgtgttgtcccagctaacacaacatcgcagaatccacacgagggtcaatagttataaatgcgaggagtgcggcaaagccttcaactggttctcaacactgacaaaacacaagcgaatacacacaggcgagaagccctataagtgtgaagagtgtgggaaagcctttaaccaaagtagccagctgaccagacacaagatcattcacacagaggaaaaacctaataagtgcgaggagtgtgggaaggcttttaaacaggcaagccatcttactatccacaaaattattcacaccggggagaagccatacaaatatgaggagtgtggtaaggtgttcagtcagagttcacacctcacaactcagaagatattacacacaggggaaaacctttacaagtgtaaggagtgtggaaaggcgtttaatctgtttagtaacctgaccaaccacaaaaggatacacgccggtgagaaaccctataagtgtaaagagtgtggaagagcttttaatattagctctaacttgaacaagcaggaaaagatacatacaggtggcaagctaaataagtgtgaggagtgcgacaaagctttcaatagaagcctcaaactgactgcccacaaaaagatcctgatggaggaaaagccctacaaatgcgaggagtgtggcaaagtgttcaaccagttttccacacttacacgtcataagatcattcacactggcgaaaagccctacaaatgcaaggagtgcgggaaggcttttaatcagagtagtaacctcacagaacacaagaagatccatacggccgaaaaatcttataaatgcgaagaatgtggcaaggccttcaaccagcactctaaccttatcaaccaccggaaaatctactctggcgaaaagccatataaatgtgaggagtgcggcaaggcattcaatagatcttcaacactgactcgccacaagaagattcatacaggtgagaagccatacaaatgcgaagagtgtgatagggctttctctcaatcaagcaacctcacggagcacaaaaagatccacacaggcgaaaagccatacaaatgtgaggagtgtggtaaggctttcaaccggttctctaccctgaccaagcataagaggatccacacgggagagaaaccatataaatgcgaggagtgtggtaaagctttcaaccagagctatcaactgactcgccacaaaattgtgcacaccaaagaaaagttaaacaagtgtgaagaattcggaaaggccttcaagcagtcatcacacagaactatacacaagatcattcataccggcgaaaagccatataaatgcgaagaacatgggaaggtgtttaaccagagttctaatctgacaacacagaaaatcatccatactggagagaatctgtataaatttgaggagcacggaaaagccttcaatctatttagcaatataacaaaccacaaaataatctatacaggagaaaaaccacacaaatgtgaggaatgtgggaaagcgtataaccgcttttccaacctgaccatccataaaagaattcacactggcgaaaagccctatcagtgcgccgagtgtgggaaggcatttaattgctcttctacactgaaccggcacaagatcattcatacaggcgaaaagccctacaaatgcaaagagtgcggaaaggccttcaacctgtcatccacactgactgcccacaagaaaatacatactggcgagaagccctacaaatgcgaggaatgtggcaaagctttcaaccagagttcgaacctgacaacccacaagaaaatacatacttccgaaaaaccatataagtgcgaagagtgcggtaagagctttaaccaattctcatccctcaatatacacaaaattatacacactggcgagaaaccctacaaatgcggtgattacggacgtgccttcaatctgagtagcaacttaacgacacataaaaagattcacacaggagagaaaccgtataaatgtgagtacggaaagacctag

SEQ ID NO: 101038 - DNA, 2352 bp, Artificial Sequence
  derived and/or modified sequence
atggtcgcaaaacctcccgtcatgtctttccacttcgcccaggatctgtggcctgagcagaatatcaaagatagtttccagaaggttactctgcgccggtacggcaagtgtgagtacgagaatcttcagctccgcaaggggtgtaaacacgttgatgaatgcactggccataaaggcggtcacaataccgtgaaccagtgtctgactgcgactccttcgaaaatttttcagtgcaataaatacgtgaaggtgttcgacaaattttctaacagtaatcgttataaacggcgccacactggtaacaagcacttcaaatgtaaggagtgcagtaagtccttctgcgtgctttcacaactaacacagcacaggcgaatccacaccagggtgaacagctataaatgtgaagagtgcggcaaggccttcaactggtttagcacccttaccaagcacaagcggattcataccggggaaaagccctataagtgcgaggaatgcggcaaggctttcaatcagtcttctcagctgacccgtcacaaaatcatccacacggaagagaagcccaacaagtgcgaggaatgcggtaaggccttcaagcaagcatcccatctgacaatccacaaaatcatccatacaggtgaaaagccctataaatacgaggagtgtgggaaggtcttcagtcagagctcacatctgactacccagaagatactgcacacgggggagaacctgtataaatgcaaagagtgtggcaaggccttcaatctatttagcaatttaaccaatcataagcgtatccacgccggcgagaaaccctacaaatgcaaggagtgcggcagagcatttaatatttcatctaacctgaataagcaagaaaagatccacacaggtgggaagttaaacaaatgcgaggaatgtgacaaagccttcaatcgctccttgaagctaacagcacacaagaagatccttatggaggagaaaccctacaagtgtgaagagtgtggcaaagtgttcaaccagttttccactctcacacgacataaaatcattcataccggggagaaaccctacaagtgtaaggagtgtgggaaggccttcaatcagtctagcaatttaaccgagcacaaaaagatccatacagctgaaaaatcatacaagtgtgaagagtgcggcaaggccttcaatcaacattctaatctgatcaatcataggaaaatttattccggagagaagccctacaaatgtgaggagtgcggtaaggcatttaacaggtcatccactctcaccagacataagaaaattcacaccggagagaagccctataagtgcgaagagtgtgaccgagcgttttcccagagcagtaatcttaccgagcacaagaaaatccacacgggagagaaaccatacaagtgcgaagagtgtggcaaagctttcaacaggttctcaacacttactaaacacaagaggatacacaccggtgaaaaaccatacaaatgcgaggagtgcggaaaagcttttaatcagtcttatcagttgacacgccataaaattgtgcataccaaggagaagctgaacaaatgcgaagaatttggaaaggcctttaaacagtctagccatcggactattcacaagatcatccacaccggcgaaaaaccgtataagtgcgaggaacatggaaaggtttttaatcagtccagtaatctcaccacgcaaaaaatcattcacaccggggaaaatctgtataaatttgaagaacacgggaaagctttcaacctgttttcgaacatcaccaatcacaagatcatttatactggcgagaagcctcataaatgcgaggaatgtggtaaggcgtacaataggttttctaatttgacaattcataaaagaatccacaccggggagaagccctaccagtgcgccgagtgtggcaaggcctttaattgttcttctacactcaacaggcacaaaatcattcatacaggtgagaaaccttataaatgcaaggaatgtggcaaggcttttaacctgtctagtacacttaccgcccataaaaaaatccatacgggggaaaagccatacaagtgcgaagagtgcggcaaagccttcaaccagagctcgaatctgacgacgcacaagaagatccacacaagcgagaaaccatacaaatgtgaggagtgtggtaaatccttcaaccaatttagtagcttaaatatccataaaattattcatacaggggaaaagccctacaaatgtggggattacggtcgggcctttaacctatcttctaacctgaccacgcataagaaaattcatactggcgagaaaccctacaagtgtgagtacgggaagacatag

SEQ ID NO: 101039 - DNA, 2352 bp, Artificial Sequence
  derived and/or modified sequence
atggtggccaagccccccgttatgagttttcacttcgcccaggatttatggcctgagcagaatattaaggacagctttcagaaagtaactttacggagatatggcaagtgcgaatatgaaaatctgcagctgcgtaagggatgcaagcatgtagacgaatgcactggccacaaaggagggcacaacacagtcaatcagtgtctgaccgctaccccctctaaaatatttcagtgtaacaaatacgtgaaagtgttcgataagttttcaaatagcaaccgctacaaaaggagacatactgggaacaagcattttaaatgcaaggagtgcagcaagtctttttgtgtgctgtctcagcttacacagcataggcgcattcacaccagagtcaactcttataagtgcgaggagtgcggtaaagctttcaactggtttagtaccctaacaaagcacaaacgcatacacaccggtgagaagccttacaagtgtgaggagtgcggtaaagccttcaatcaaagctcgcagttgacaaggcacaaaatcattcataccgaggaaaaacctaataagtgtgaggagtgcggtaaagcttttaagcaggccagccacctgaccatccacaaaataatccatactggggagaagccttacaaatacgaagagtgtggcaaggttttcagtcaaagctcgcacctcacaacccagaagattctgcataccggggagaacctctacaagtgtaaagagtgtggcaaagctttcaacctgtttagcaacttgaccaatcacaagaggatacatgccggagaaaaaccatacaagtgtaaagagtgcggacgagctttcaatatctcctccaacctgaataaacaggagaagatacatacgggaggcaaacttaacaagtgcgaagaatgtgataaggcattcaatcgatcgctcaagttgacagcccataagaaaattctgatggaggaaaaaccctataaatgcgaagagtgcggtaaagtgtttaaccagttcagtaccctgacacggcataagataatacacactggggagaaaccatataaatgtaaagaatgtggcaaggctttcaatcagtcaagcaatcttacagagcacaaaaaaatacataccgccgaaaagagctataagtgtgaggaatgcggtaaggcctttaatcaacacagcaatctgattaaccatcggaaaatatactcaggagaaaagccttacaaatgcgaagagtgtggcaaagcatttaatagaagttccacactgacccggcacaaaaagatccacactggagagaagccttataaatgcgaggagtgtgatagagccttttctcagtccagcaatctgacggagcacaaaaagatacacactggggaaaagccgtacaaatgcgaagagtgcggcaaggccttcaatagattttctacactgaccaaacacaagagaatccacactggggaaaaaccgtataagtgcgaggagtgcggtaaggccttcaatcagtcttaccagttgacgcgccataagatagtccacacgaaagaaaaactgaataagtgtgaggaattcggcaaggccttcaaacagtcatcccacagaaccatccacaaaattatacatacgggtgagaagccctacaaatgtgaggaacatggtaaggtttttaatcagagtagcaacctgacaacccaaaagatcatacacacaggagaaaatctctataagtttgaggaacacggaaaagcctttaatctattcagcaacattaccaaccataagattatatacacaggagaaaagccacacaaatgcgaggaatgtggaaaagcgtacaaccgattctccaaccttactatccataagcgtatccatactggggaaaaaccttaccaatgcgccgaatgcggaaaggctttcaattgttctagtacgcttaatcggcataagatcatccacacaggtgagaagccatacaaatgtaaggaatgtggaaaagcattcaatctgtcatcaactcttaccgcacacaagaaaatccataccggagagaagccatacaagtgcgaggagtgcggaaaagcctttaatcagtcgagcaacttgaccacccacaagaaaatccataccagcgagaagccatacaagtgcgaagagtgcggaaaaagctttaatcaattctcatcactgaatattcataaaattatccacaccggggagaaaccctataaatgcggagactatggacgcgccttcaacctttcctcaaatttaacgacacataagaagatacataccggtgagaagccttacaagtgtgagtatggaaagacttag

SEQ ID NO: 101040 - DNA, 2352 bp, Artificial Sequence
  derived and/or modified sequence
atggtggccaagccccctgtgatgtccttccactttgcccaggacctgtggccagagcagaacatcaaggacagcttccagaaggtgaccctgcggcgctatggaaaatgtgaatatgagaacctgcagctgaggaagggctgcaagcacgtggatgaatgtacaggccacaagggcggccacaacacagtgaaccagtgcctgacagccacccccagcaagatcttccagtgcaacaagtatgtgaaggtgtttgacaagttcagcaacagcaaccgctacaagaggaggcacactggaaacaagcacttcaagtgcaaggagtgcagcaagagcttctgtgtgctgagccagctgacccagcaccggcgcatccacaccagggtgaacagctacaagtgtgaggagtgtgggaaggccttcaactggttcagcaccctgaccaagcacaagaggatccacactggagagaagccctacaagtgtgaggagtgtgggaaggccttcaaccagagcagccagctgaccaggcacaagatcatccacacagaggagaagcccaacaagtgtgaggagtgtgggaaggccttcaagcaggccagccacctgaccatccacaagatcatccacactggagagaagccctacaagtatgaggagtgtgggaaggtgttcagccagagcagccacctgaccacccagaagatcctgcacactggagaaaatctctacaagtgcaaggaatgtgggaaggccttcaacctcttcagcaacctgaccaaccacaagagaattcatgctggggagaagccctacaagtgcaaggaatgtggccgggccttcaacatcagcagcaacctgaacaagcaggagaagatccacactggaggcaagctgaacaagtgtgaggagtgtgacaaggccttcaacagaagcctgaagctgacagcccacaagaagatcctgatggaggagaagccctacaagtgtgaggagtgtgggaaggtgttcaaccagttcagcaccctgaccaggcacaagatcatccacactggagagaagccctacaagtgcaaggaatgtgggaaggccttcaaccagagcagcaacctgacagagcacaagaagatccacacagctgagaagagctacaagtgtgaggagtgtgggaaggccttcaaccagcacagcaacctgatcaaccacaggaagatctacagcggggagaagccctacaagtgtgaggagtgtgggaaggccttcaacagaagcagcaccctgaccaggcacaagaagatccacactggagagaagccctacaagtgtgaggagtgtgaccgggccttcagccagagcagcaacctgacagagcacaagaagatccacactggagagaagccctacaagtgtgaggagtgtgggaaggccttcaaccgcttcagcaccctgaccaagcacaagaggatccacactggagagaagccctacaagtgtgaggagtgtgggaaggccttcaaccagagctaccagctgaccaggcacaagatcgtgcacaccaaggagaagctgaacaagtgtgaggagtttgggaaggccttcaagcagagcagccacaggaccatccacaagatcatccacactggagagaagccctacaagtgtgaggagcacggcaaggtgttcaaccagagcagcaacctgaccacccagaagatcatccacactggagaaaatctctacaagtttgaggagcacggcaaggccttcaacctcttcagcaacatcaccaaccacaagatcatctacacaggagagaagccccacaagtgtgaggagtgtgggaaggcctacaaccgcttcagcaacctgaccatccacaagaggatccacactggagagaagccctaccagtgtgccgagtgtgggaaggccttcaactgcagcagcaccctgaacagacacaagatcatccacactggagagaagccctacaagtgcaaggaatgtgggaaggccttcaacctgagcagcaccctgacagcccacaagaagatccacactggagagaagccctacaagtgtgaggagtgtgggaaggccttcaaccagagcagcaacctgaccacccacaagaagatccacaccagcgagaagccctacaagtgtgaggagtgtgggaagagcttcaaccagttcagcagcctgaacatccacaagatcatccacactggagagaagccctacaagtgtggggactatggccgggccttcaacctgagcagcaacctgaccacccacaagaagatccacactggagagaagccctacaagtgtgaatatggcaagacctag

SEQ ID NO: 101041 - DNA, 2352 bp, Artificial Sequence
  derived and/or modified sequence
atggtggccaagccccccgtgatgagcttccacttcgcccaggacctgtggcctgagcagaacattaaggactcttttcagaaggtgaccctgcggagatacggtaagtgcgagtacgagaatttacaactccgcaaagggtgtaagcatgtggatgaatgcaccggccacaaagggggccataacaccgtgaatcagtgcctgactgcaactccatctaagatctttcagtgcaataagtacgtgaaggttttcgataaattttcgaattccaatagatataaacgccgtcataccggcaacaaacacttcaagtgcaaagaatgttcgaaatccttttgtgtgttgtcacaattgactcagcaccggcgtatccatacacgggttaatagctacaaatgcgaggaatgcggaaaagctttcaactggttctcaacactgacgaaacataaacgaatccacaccggcgaaaagccttacaagtgcgaggaatgcggcaaagctttcaaccaatcgtcccagctgacgcggcacaaaataatccatacagaagagaagcccaataaatgcgaggagtgtggaaaggccttcaaacaggccagtcacttgaccatccataaaattatccacacaggcgaaaaaccatataagtacgaggaatgtggcaaggttttcagccagtccagtcacctgaccacccagaagatcttacacactggagaaaatctctataagtgcaaggagtgcggaaaggcttttaatctcttctccaatctgaccaaccataaaagaattcacgccggcgaaaagccctacaaatgcaaggagtgcgggcgggcgttcaatatctccagtaacctaaacaaacaagagaaaatacatactggggggaaactgaataaatgtgaggaatgtgacaaagccttcaacagatctcttaagctgaccgctcataaaaagatcctcatggaagaaaaaccttacaaatgcgaagagtgcgggaaggtcttcaatcagttttcaactctgacccggcacaagataatccatacaggagagaagccctacaagtgcaaagagtgtggtaaggcctttaatcagtcttccaacctgactgagcataaaaagatccacactgcggagaagtcctacaagtgcgaggaatgcggcaaagcctttaaccagcactccaatctcattaatcatcgaaagatttatagtggagagaagccatacaagtgcgaagagtgtggaaaagcgtttaataggtcttctaccttaacccgacacaagaaaatccacaccggagagaagccttacaaatgcgaggagtgcgatcgggctttttctcagtccagcaatctgacagaacacaaaaaaattcatactggagagaagccatacaaatgcgaggagtgcggcaaagcttttaatcggttctccaccctgaccaagcacaagagaattcatactggcgagaaaccttataaatgcgaagagtgcggaaaagcttttaaccaaagttaccagctcacacgccacaagatcgtgcatacaaaagaaaaactcaataaatgtgaagagtttggaaaagcgtttaagcaatcctcccaccgaaccatccacaaaatcatccacacgggagagaagccttacaagtgcgaggagcatggcaaggtgttcaatcagagtagcaacttaactacacaaaagattatccatactggggaaaacctctacaaatttgaggagcacggaaaggcgtttaacttgttttccaacattacgaaccataagattatctataccggcgaaaagcctcataagtgcgaagaatgtggcaaggcctacaatcgtttctctaaccttacgatccataagcgaatccacactggagagaagccttatcagtgcgccgaatgtggaaaagcattcaactgcagctctacattgaataggcataagattatccatacgggagagaagccctacaaatgcaaggaatgtggaaaggcctttaacttaagttctaccttgacggcacacaagaaaatccacactggggagaagccctataagtgcgaagagtgtggcaaagcattcaatcagtcctctaacctcacaactcacaagaaaatccatacctctgagaagccatataagtgtgaagaatgcgggaagtcatttaatcagttttcaagcctgaatatccataaaattatccataccggagagaaaccttacaaatgcggggattacggcagagcattcaatttgtcctccaacctgaccacccacaagaaaattcacactggggagaagccatataaatgcgagtatggcaaaacgtag

SEQ ID NO: 101042 - DNA, 2352 bp, Artificial Sequence
  derived and/or modified sequence
atggtggccaagccccccgtgatgagcttccacttcgcccaggacctctggcccgaacagaacattaaggatagcttccaaaaggttacgctgagaaggtacgggaaatgcgagtatgagaatctccagcttaggaaaggctgcaagcatgtcgatgagtgtaccggccacaaaggcggacacaatactgtcaatcagtgcctcactgctacgccaagcaaaatcttccaatgcaacaagtatgttaaagtgttcgacaagttctccaactcgaacaggtacaaacgcagacacaccgggaataaacacttcaagtgcaaggagtgttctaagtctttttgtgtcctgtcacagctgacccagcatcggcggatccatacaagggtcaacagctataaatgcgaggagtgcggcaaagccttcaactggtttagcaccttgaccaaacacaaaagaattcacacaggcgaaaaaccttataagtgcgaagagtgcggaaaagcctttaatcagtcctctcagctgacccgtcacaagatcatccacaccgaagagaaacccaacaagtgtgaggaatgcggaaaggcatttaagcaggccagccatttgaccatccacaaaattatccacactggagaaaaaccctacaaatacgaggaatgcggcaaggtttttagccagtcatcccatctcacaactcagaaaatcctccataccggagagaacctctacaagtgtaaggaatgtggtaaagccttcaacctttttagcaacctgactaatcacaaacggatccacgccggggaaaaaccttacaagtgtaaggagtgcggtagagccttcaacatctcctctaacttgaacaaacaggaaaaaatccataccgggggtaaattgaataagtgcgaggagtgcgacaaggccttcaacaggtctcttaagctgactgctcataagaagattctgatggaggagaagccctacaagtgcgaagaatgtggaaaggtttttaatcaattttccaccttgacccgccataagataatccacaccggcgagaaaccttataaatgtaaagaatgcggcaaagcattcaatcagagcagtaacctgacagagcacaagaagatccacacggcggaaaagagctacaagtgcgaggagtgcgggaaggcgtttaatcagcacagtaacctgatcaaccaccgcaagatctatagtggggagaagccgtacaaatgcgaggaatgtgggaaggcatttaaccgcagcagcaccttgacaaggcacaagaagattcatacgggcgaaaagccatacaaatgcgaggagtgcgacagagcattttcccagtcttccaacctgacggagcacaaaaagattcataccggagaaaagccctataaatgcgaagaatgtggcaaggcctttaatcgattctcaactctaacaaagcataaacgcattcacaccggagagaaaccttacaaatgcgaagagtgcggaaaagcattcaaccagagctatcagctgacccggcataagatagttcacactaaagagaaactcaacaagtgcgaagagtttgggaaggctttcaaacagtccagccatcgtacaatacacaaaattatccacactggcgaaaaaccttacaaatgcgaagaacatggcaaggtgttcaaccaatcgagcaacctgaccactcagaaaatcattcataccggtgaaaatctctacaagtttgaggagcacggtaaagcctttaatctgttctccaacattacgaatcataagattatctatacaggcgagaagccccataaatgcgaagagtgcggcaaagcctataaccgcttttccaacctgacaatccacaagagaattcacactggtgaaaagccctaccagtgcgctgaatgtggtaaggcattcaactgttcttcaaccctcaatcggcacaaaatcatacatacaggcgaaaagccttacaagtgcaaggaatgtggcaaggcattcaacctcagctcaacgctgactgctcataaaaaaattcacactggggaaaagccctataagtgcgaggagtgcgggaaagcgttcaaccagtcaagcaaccttactacccataagaaaatccatacgtctgagaaaccctacaagtgcgaagagtgtggaaaatcatttaatcagttttcaagcctgaacatccacaagatcatacacactggggaaaaaccttacaagtgtggggactacggacgcgcttttaatttgagttctaatttaaccacccataagaaaatacacacaggcgaaaaaccctataagtgcgaatacgggaaaacgtag

SEQ ID NO: 101043 - DNA, 2352 bp, Artificial Sequence
  derived and/or modified sequence
atggtggccaagccccccgtgatgagcttccacttcgcccaggacctgtggccagagcagaatatcaaagattcttttcagaaagtcacactgagacgctatggcaaatgcgaatatgaaaatctacagttaagaaaagggtgcaagcacgttgacgagtgcaccggccacaaagggggccacaacaccgtcaatcagtgcttgactgctaccccctccaaaattttccagtgcaataagtacgttaaagtgttcgacaagttttctaactctaaccgctataagaggcggcatacaggaaacaagcatttcaagtgcaaggagtgtagcaaaagcttctgcgtgttatcccaactcactcaacacaggagaatccatactagggtgaattcatataagtgtgaagaatgcggcaaggccttcaattggttttccacattaaccaagcacaagcgcattcatacaggtgaaaaaccttataaatgtgaagagtgtggcaaggctttcaatcagagttcacaactaactagacacaagataattcacacggaggagaagcctaataaatgcgaggaatgtggcaaagcttttaaacaggcctcacacttgaccattcataagataatccataccggcgagaagccttacaagtacgaagagtgtggaaaggtgtttagccagtcgtctcaccttacaacccagaaaatactgcatacaggtgagaatttatataaatgtaaggaatgtggtaaagctttcaacctgtttagcaatctgacgaaccacaaaaggatccacgctggggaaaaaccctataagtgcaaggaatgtggcagggccttcaacatttcctccaatcttaataagcaggaaaagattcacactggcggcaaactgaacaagtgtgaagaatgtgataaagcattcaatcggagcttgaagttgacagcacacaaaaagatccttatggaagaaaaaccctataagtgcgaggaatgcgggaaggtgtttaatcagtttagcactctgacgcggcacaagattatccacacaggagaaaagccctataagtgcaaagagtgtggcaaggctttcaaccagagcagtaacctaacggagcataaaaagatccacacagccgagaaatcctacaaatgtgaagagtgcgggaaggcgtttaaccaacattccaatctcatcaatcaccgcaaaatttattctggggagaagccctataaatgcgaggagtgcgggaaagctttcaatagaagctccaccctgacacggcacaaaaaaattcacacaggagagaagccatataagtgtgaggagtgcgatagggctttttcccaaagtagcaaccttactgaacataagaagattcatacaggtgagaaaccctacaagtgcgaggaatgtgggaaagcattcaatagattctcaactctgacaaagcacaagagaattcacacgggagagaagccttataaatgcgaagaatgcggcaaagcatttaaccaaagttatcaactaaccagacataaaatcgttcacaccaaggaaaaactcaacaaatgtgaagaatttggtaaagcctttaaacaatctagtcaccggaccattcataagatcatacacacgggggaaaagccctataagtgtgaggagcacggcaaggtcttcaaccagtcgagcaatctgaccacacagaagataattcatactggagaaaacctatataagtttgaggaacacgggaaggcctttaatctcttctctaacatcactaatcacaagataatctatactggagagaaaccccacaaatgtgaggaatgcggaaaagcatataacaggttctcaaatctcactatacacaagcggatccatacaggcgaaaagccgtatcagtgcgccgagtgcggaaaggctttcaattgttcatctactctcaaccggcacaagatcatccacactggggaaaagccctacaaatgcaaggaatgcggtaaagctttcaatttaagctctactctgacggctcataagaagatccacacaggtgaaaagccgtacaagtgtgaagaatgcggcaaggcttttaatcagtctagcaacctcacgacccataaaaaaatacatactagtgagaagccctacaaatgtgaggagtgcgggaagtccttcaatcaattctcaagccttaatattcacaagatcatacacactggagagaaaccctacaagtgtggggattatggaagagcttttaacctgagcagtaacctcacaacccataagaagattcacaccggtgagaaaccttacaaatgtgaatatgggaagacctag

SEQ ID NO: 101044 - DNA, 2352 bp, Artificial Sequence
  derived and/or modified sequence
atggtagctaaacctccagttatgtcatttcatttcgcccaggacctatggccggagcagaacataaaggactcattccagaaggttactctgcggcgttacggaaaatgcgagtatgaaaatctgcagctccggaaaggttgcaaacatgtcgatgagtgcaccggccacaaaggtggccataatacagtgaatcagtgcctgaccgcgaccccatcaaaaatatttcagtgtaataagtatgttaaggtgttcgataagttttccaactctaacagatacaagagaaggcatactgggaataaacacttcaagtgtaaggaatgtagtaagagcttttgtgtcctatcacaactgacccagcaccgcaggatacacaccagagtcaactcatataagtgtgaagaatgtggcaaagccttcaattggttttctaccctcactaaacataagcggattcataccggggagaaaccctacaaatgcgaggaatgtggaaaggctttcaaccaatcttcccagctgaccaggcacaagattatccacaccgaggagaagcctaataaatgtgaggagtgcgggaaggcgttcaagcaggcctcccatcttactatccacaagatcattcacaccggcgaaaagccctataaatacgaagagtgcggtaaagtattcagccagtcatcgcacctgacaacgcaaaaaattttgcacaccggcgaaaatctttacaaatgcaaggagtgcggcaaggcattcaatctgttctctaaccttaccaaccataagaggatccacgccggagaaaagccctacaagtgtaaagaatgtggtagagcttttaatatttcttccaatctcaataagcaagagaaaatccacaccggagggaaactcaacaagtgcgaggagtgcgacaaggctttcaaccgctcccttaaattgacagctcacaaaaagattctgatggaagagaagccatataagtgtgaagagtgcggaaaggtgtttaatcagttctctaccctcacgcgtcacaaaatcatccataccggagaaaaaccatataaatgcaaagagtgcggaaaggctttcaaccagtcctccaatctgaccgagcataagaaaatccacacagccgaaaaatcatacaaatgcgaagagtgcggtaaggcgtttaatcaacacagcaatctgatcaatcacaggaaaatctactccggggagaaaccttacaaatgcgaagagtgcggtaaagcgtttaatcgaagctctacattgaccaggcataagaaaattcacaccggcgaaaagccctacaaatgcgaagaatgtgaccgggctttttcacagagctctaacttaaccgagcacaagaaaatccataccggggagaagccctacaagtgcgaagagtgtggaaaagcatttaaccggttcagcaccttgaccaaacacaagagaatccacaccggagaaaaaccctacaaatgtgaggaatgtggcaaggcctttaatcagtcctatcagctcacccgccacaaaatcgttcatacaaaggaaaagctgaataagtgcgaggagtttggcaaggcattcaagcagtcaagccaccggaccattcataaaattatccacacaggcgaaaaaccttacaagtgcgaagagcatggcaaagtattcaatcaaagcagcaatctaaccacccaaaagatcatacacacaggtgagaacctttataagtttgaggaacacggtaaggcctttaacctgtttagtaatataacaaaccataaaatcatatatactggcgagaagccccacaaatgcgaagagtgtggcaaggcttacaaccggttctcaaaccttacgatccacaaaaggatccataccggggagaaaccctaccaatgtgctgaatgcggtaaggctttcaactgctccagcacactaaatcggcacaaaatcatccacacaggggagaagccttacaagtgtaaagaatgtggaaaggcattcaatctgtcttccacactcactgcacataagaaaattcacacaggcgaaaagccgtacaagtgtgaagaatgcgggaaagcattcaatcaaagtagcaatctcactactcacaaaaagattcatacgagtgagaaaccatataagtgcgaggaatgcgggaaatcttttaatcagttcagctcattgaatatccacaagattatccacacaggggagaaaccctacaagtgtggagattatggtagagctttcaacctatcatccaatttaacaacccacaagaaaatccacacgggcgagaagccctataaatgtgagtatggcaagacgtag

SEQ ID NO: 101045 - DNA, 2352 bp, Artificial Sequence
  derived and/or modified sequence
atggttgcgaagcctcctgtgatgagctttcacttcgcccaagatctttggcccgaacagaatatcaaagatagttttcaaaaagtcacactccggagatacggaaagtgtgagtatgaaaacctccaactccgtaagggctgcaagcacgttgacgagtgcaccggtcataagggcggacataacaccgtcaaccagtgtcttacagcaactcccagcaaaatcttccagtgtaataagtatgtgaaagttttcgacaagttctcgaactcaaaccggtacaagaggaggcatacgggcaacaagcactttaaatgcaaggagtgctctaagtcattctgtgtgctgagccagctcacccagcatcggaggattcacacccgggtaaattcgtataagtgcgaagagtgtgggaaagccttcaactggtttagcacattaactaagcacaaacggattcataccggggagaagccctataagtgtgaggagtgcggcaaagctttcaaccagtcttctcagctcactaggcataagataatccacaccgaagagaagccaaataagtgcgaagagtgcggaaaggcgtttaaacaggcctcacacctcacaatccataagataattcatactggcgagaagccctataaatacgaggagtgcggaaaggtgttcagccagtcgagtcaccttaccacgcagaagatactccatacgggcgagaacctttacaaatgtaaggaatgcgggaaggccttcaatctattcagcaaccttacaaatcacaaacgaatccacgcgggagaaaagccttataagtgcaaagaatgtggtagagcattcaatatttcctccaacttgaacaagcaagaaaaaattcacactgggggaaaacttaacaagtgtgaagagtgcgataaagcattcaatcggtctcttaaactgactgctcacaagaagatactgatggaagagaaaccgtataaatgtgaggagtgcggcaaggtatttaaccagttctctacccttacacggcacaaaattattcatactggtgagaagccctacaaatgcaaagagtgtggcaaggcgttcaaccagtcttccaatctgacggaacataagaagatacacactgctgagaaatcctacaaatgcgaggagtgcggtaaagcattcaatcagcactcaaatctgattaaccatcggaaaatctattccggagaaaagccttataagtgtgaggaatgtggtaaggcctttaatcgctcaagcacactcactagacacaagaagatacataccggcgagaagccctacaaatgtgaagaatgtgatcgggctttcagtcaaagctccaatctgactgaacataaaaagattcatactggggaaaaaccctacaaatgcgaggaatgtgggaaagcctttaaccgcttcagcacacttacaaagcacaaaaggattcacaccggggaaaaaccgtataaatgtgaggagtgcgggaaagcttttaaccagtcatatcagctaaccaggcacaagatcgtgcacacaaaggagaaactcaacaaatgcgaagagtttgggaaagcattcaaacagagttcccaccgcaccatccacaagattatccacaccggagagaagccatacaaatgtgaggagcatggcaaagtcttcaaccagtcttcaaatctcacaactcaaaagatcatccataccggagagaatctgtacaagttcgaggagcacggaaaagcttttaacctctttagcaacattacaaaccacaagatcatttataccggcgagaagcctcataagtgcgaagaatgtggcaaggcctacaatcgcttttcaaatctgactattcacaagaggatccacacaggagagaagccttatcagtgtgcagaatgtggaaaagcttttaactgctccagcaccttgaacagacataagatcatacatacaggtgaaaaaccctacaaatgtaaggaatgcggaaaagcattcaatctcagtagtactctcacagctcacaagaagatacacaccggggaaaagccttacaaatgtgaagagtgtggcaaagcattcaatcagtcctccaaccttacaacccacaaaaagatccacactagtgaaaaaccctacaagtgcgaagagtgtggcaagtccttcaaccagttttcttcgttgaacatccacaaaattatacacacaggcgaaaagccgtataagtgcggagactatggcagagcctttaacctgagctcaaacttgacaactcacaaaaaaatccataccggggaaaaaccctacaaatgtgaatatggtaagacctag

SEQ ID NO: 101046 - DNA, 2352 bp, Artificial Sequence
  derived and/or modified sequence
atggtcgccaaaccacctgtcatgtcgtttcattttgcccaagacctgtggccggaacagaacattaaggactccttccaaaaggtgacacttcgcaggtacggcaagtgtgagtacgagaacttgcaactcagaaaaggctgcaaacatgtggacgaatgtactgggcacaagggaggacataataccgtgaatcagtgtctgaccgctaccccgtcgaagatctttcagtgcaataagtatgtgaaggtgtttgataagttctcaaattcgaacaggtacaagcgcagacacacaggcaataagcatttcaaatgtaaggagtgcagtaagtccttctgcgtgctgagtcaactgactcagcacagacgtatccacacacgcgtgaatagttacaaatgcgaggaatgcggtaaggcattcaattggttctccacactgaccaagcacaaaaggatccacaccggagaaaaaccatataagtgtgaagagtgcggaaaagcctttaatcagagcagccagctgactcgtcacaagattattcatactgaagaaaagccaaacaaatgcgaagagtgcggtaaagcttttaaacaggccagccatctgactattcataaaatcattcacacaggggaaaagccatacaaatatgaagagtgcggcaaggttttcagccaatcttcgcacttaacaacccaaaaaatccttcacaccggggagaacctgtataagtgcaaggaatgcggaaaagcctttaatctgttctctaacctgactaaccataagcgaatccacgccggtgaaaagccctataaatgtaaggagtgcgggagggcattcaacatttctagcaaccttaataaacaggagaagatacacaccggaggtaaacttaataagtgtgaagagtgtgacaaagccttcaatcgttcactaaagcttacagcccacaaaaaaatactgatggaagagaagccatataagtgcgaggagtgcgggaaggtgtttaaccagtttagcacgctgacacggcataaaattatccacactggtgaaaaaccctataagtgtaaagagtgcgggaaggcgtttaaccaaagttcgaacctgacagagcataaaaaaatccatacggccgagaagagttacaaatgtgaagagtgcggcaaggccttcaaccagcactcaaatcttataaatcataggaagatctattccggagagaagccatacaaatgcgaagagtgcggcaaggcctttaataggtcttcgactttgacacggcataagaagattcacacaggcgagaaaccatacaagtgtgaggagtgcgatcgagcattttcgcagtcttcaaacttgaccgaacacaaaaaaatccatactggcgagaagccctacaagtgtgaggaatgtggtaaagcgttcaatcgtttctccacactgacaaagcataagcgaattcatacgggggaaaagccatacaagtgcgaagaatgtggcaaggcattcaatcaatcttaccagctgaccaggcacaaaatcgttcacacaaaggaaaaattaaataagtgcgaggagttcggaaaggcgttcaagcagtcctctcaccggactattcataaaatcattcataccggcgaaaagccctataaatgtgaagaacacggaaaggtattcaaccagtctagcaaccttactacccagaagatcattcatactggagagaacctgtacaaattcgaggagcacgggaaggcgttcaacctctttagcaatataactaatcataagataatttacaccggcgaaaagccccacaagtgcgaggaatgcggcaaagcctacaataggtttagcaacctcaccatacacaaaagaatccatacgggcgagaagccgtaccagtgtgcggagtgtggtaaagccttcaactgcagctctacactgaacagacacaagatcatccataccggagagaagccatacaagtgtaaagaatgcgggaaggccttcaatctcagttcaacccttaccgcacacaaaaaaattcatacaggagagaagccctataagtgcgaagaatgcggaaaggcttttaaccagagcagcaacctgacaacccacaaaaaaattcacacgagtgagaaaccttataaatgcgaagagtgtggtaaatcttttaatcagttttcttcactcaacatccataaaatcattcataccggcgagaagccgtacaagtgcggtgactatggcagggctttcaacctttcctccaacttgacaacccacaagaagattcataccggggaaaaaccttacaagtgcgagtacgggaagacgtag

SEQ ID NO: 101047 - DNA, 5174 bp, Artificial Sequence
  derived and/or modified sequence
tagaggcccagcctctgtgtccctgtgacctgcagatattgggagatccacagctaagacgccgggactccctggaaacctagaaatgactgtgccataacacacatttgatgctgaaatccgggataggggaactcctttgggagtcgtgtcccttaaccccttcccccgacttcttgaagagacccacccgcgacctcggtacctcggaccagctctgtaaaagccccgcctctgccttcggataggaaccactgacatttaaagatgtcgccatagaattctctctggaggagtggcaatgcctggatactgcacagcgggatttatataggaatgtgttgttagagaactacagaaacctggtctttttgggtattgctgtctctaagccatatctgatcacctgtctggagcaaaaaaaagagccctggaatataaaaagacatgagatggtagccaaacccccagtaatgtcttttcattttgcccaagacctttggccagagcagaacataaaagattctttccagaaagtgacactgagaagatacggaaaatgtgaatatgagaatttacagttaagaaaaggctgtaaacatgtggatgagtgtacggggcacaaaggaggtcataatacagttaaccaatgtttgacagctaccccaagcaaaatattccagtgtaataaatatgtgaaagtctttgataaattttcaaattcaaatagatataagagaagacatacaggaaacaaacacttcaaatgtaaagaatgtagcaaatcattttgcgtgctttcacaactaactcagcatagaagaattcatactagagtgaattcctacaaatgtgaagaatgtggaaaagcctttaactggttctcaactcttactaaacataagagaattcatactggagaaaagccctacaaatgtgaagaatgtggcaaagcctttaaccagtcctcacaacttactaggcataagataattcatactgaagagaaacccaacaaatgtgaagaatgtggcaaggcctttaaacaggcctcacaccttactatacataaaataattcatactggagaaaaaccttacaaatatgaagaatgtggcaaagtctttagccagtcctcacaccttactacacaaaagatacttcacactggagagaacctctacaagtgtaaagaatgtggaaaagcttttaacctattctcaaatcttactaaccataagagaattcatgctggggagaaaccctacaaatgtaaagaatgtggcagagcttttaacatatcctcaaaccttaataaacaggagaaaattcatactggagggaaactcaacaaatgtgaagaatgtgacaaagcttttaaccgatccttaaaacttactgcacataagaaaattctaatggaagagaaaccctacaaatgtgaagaatgtggcaaagtctttaaccagttctcaactcttactagacataagataattcatactggagagaaaccctacaaatgtaaagaatgtggcaaagcttttaaccaatcttcaaaccttactgaacataagaaaattcatactgcagagaaatcctataaatgtgaagaatgtggcaaagcttttaaccaacactcaaacctaattaaccataggaaaatttattctggagagaaaccatacaaatgtgaagaatgtggaaaagcttttaatcgatcctcaacccttactagacataagaaaattcatactggagagaaaccctacaaatgtgaagaatgtgacagagcttttagccagtcttcaaaccttactgaacataagaaaattcatactggagagaaaccctataaatgtgaggaatgtggcaaagcttttaaccgattctcaacccttactaaacataagagaattcatactggagaaaaaccctataaatgtgaagaatgtggaaaagcctttaatcaatcctatcaacttactagacataagatagttcatactaaagagaaactcaacaaatgtgaagaatttggcaaggcctttaaacagtcctcacaccgtactatacataaaattattcatactggagagaaaccctacaaatgtgaagaacatggcaaagtttttaaccagtcctcaaaccttactacacaaaagataattcatactggagagaacctctacaaatttgaagaacatggaaaagcttttaacctattctcaaacattactaaccataagataatttatactggagagaaaccccacaaatgtgaagaatgtggaaaagcttataaccgattctcaaacctaactatacataagagaattcatacgggagagaaaccttaccaatgtgcagaatgtggcaaagcctttaactgctcctcaacccttaatagacataagataattcatactggagagaaaccttacaaatgtaaagaatgtggcaaagcttttaacctatcctcaacccttactgcacataagaaaattcatactggagagaaaccctataaatgtgaagaatgtggcaaagcttttaaccaatcctcaaaccttactacacataagaaaattcatacttcagagaaaccctacaaatgtgaagaatgtggcaaatcctttaaccagttctcatctcttaatatacataagataattcatactggagagaaaccctacaaatgtggagattatggcagagctttcaacctatcctcaaatcttactacacataagaaaattcatactggagagaaaccctacaaatgtgagtatggcaaaacttaattgatcctacaagcttactacacataggaaaattcatactggagagaaactacaaatgtgaagaatgtgttaaagcctttaacaagtcttcaactttttctgcacacacgaggtattttatactggtgagaaaccttacaatgtaaagaatgtggcacagcttttaactaatcttcaaaccttactgaaagttgagaaaattcgtactggagagaatcctacaaatgtgaaaaatgtggcaaatcctttaactgatcctcaacttttactaaacataaggtaattcatactggagaaaagccatacaaatgagaagaatgtggcaatgcctttaatcagtcctcacacctttctacacataagataatttatactggagaggaactctatagttgtgaagaatgtggcaaagcttttaaccaatcctcataccttactatacagaaattcatactggagagaaagcctacaattgtgaagaatgtggcaaagcttttaaccttccttaacccttaactgtagataagaaaattcatactggaaagaaaccctacaaatgtgaagtctgtggcaaagcttttaactgattctcaactcttactacatgtaagagtatttatactggaaagaaaccctacaaatgtaaaaaacgtggcaatgcctttaactggtcctcacaccttgctacatataagacagtttatactttgagagaaaccctgcaaatgtgaataatgtggcaatactttaaaccaatcctcaaacctcactaaacataagataatactgaaaactttacaaacctgaatgatgtgacaataattttgacaacacctcgaactttctaacataaatcatactggtgaaaaatcctagaaatgtgaaaaatatcacaaagcctttaaatggttgtcacacttgattgtaggtaagaatccatactgaagaaaactcctggaagtgtaaaaaatgtggcaacacttttaataaatgctcaccccttattgcacaggaaagcatttatacttcagaaagattgtacaaatacaaggaatgtggaaaagccattattatctgctcagattttactcaacattagagagttagtacgtaataaaagcattataaatgcaatttttgtcaagagatctttcagaaaatataagcctttaaagtgaagaagaggagccagttgtgctggctcacatctgtaatgccagcactttgggaggccaaggtgggtggatcacctgagggcaggagtctgagaccagcctggccaacatagcaaaaccccatctctattaaaaattttacaaaaattagctgcgtgtggtggcaggcccctgtaatcccagctaattgggaggctgaagcaggagaattgctcaaacctgggaggcgaagattgcagtgagctgaaatcacaccactacactccagccaaagcaacaagagcaaaaacttcgtctcaaaaacaaaacaaaaaaagagtattcattgtgaggacaaacaatacaaatacgaagagggttgtagtacctttacttgtatcacagatacttttgtacccattttgcactagaggaaaaccatgaagcagttgctcaaatgttgttcaacaccagaaaatttatattggagaaaagcactgtaaatgtaatgcatttgtgaaaacattttttaaaaaactacagcttagaaaataccagaggcctcatactaaaatatatttttgcaagtgaagtaaatataaaaataatttaatccaaaattaagtctatataaatatcagagaattcacagtagaaatatctaaggtactgacacttcagacattgctgagtatagaatcagaatgctgagtatagaaaataatttaaaactaaagttggtaggtaaataatgtgtatataactttaaaagaagtagaatttttttgtagatgtataattacattcaaattatattttttcttgaaaaattagtttttgaaaagcaaatgatgtaattcaactcaaattcatgctcttcattcctattgtattcacatgtgaaagcatgtgattaatttttcatgcatcaaagatatgagaaatcatttctgttaggtcggtattatttatgacactttctatgaaagaataaggacattaaaatgtaagatgcatgatgaaaacctgagtgaagaggctgtttgtgtttaacttataatattgagtgatccatgaagtaggttttcagagcaatattcttctgcattatagtaagagaaaaccatttttaatcttagttaaaattaaagtgaattagtagtatatcattttactatttgtacttttatgtaataaaatgcaatgtgtttaaaaa

SEQ ID NO: 101048 - DNA, 1061 bp, Artificial Sequence
  derived and/or modified sequence
gcctttgtctctggctgcagccggagctcctgctctcctcctcactgctcagtgtcctctgctcctagaggcccagcctctgtgtccctgtgacctgcagatattgggagatccacagctaagacgccgggactccctggaaacctagaaatgatggagtctcgctctgttgctcaggctgaagggcagtggtgcgatctcggctcactgaaacctccgccttccgggctcaagcaattctcctgcctcaacctcgcaagtagctgggattacaggcatgcaccaccatgcccagactgtgccataacacacatttgatgctgaaatccgggataggggaactcctttgggagtcgtgtcccttaaccccttcccccgacttcttgaagagacccacccgcgacctcggtacctcggaccagctctgtaaaagccccgcctctgccttcggataggtctggccccaccctggagtcttgcctcacagaactgattagaagagatcagagttttggctggtgcctttccggagtggttgctaacaattcccgaattccacaaggagataaatgggaaaaaaaggaaccactgacatttaaagatgtcgccatagaattctctctggaggagtggcaatgcctggatactgcacagcgggatttatataggaatgtgttgttagagaactacagaaacctggtctttttgggtattgctgtctctaagccatatctgatcacctgtctggagcaaaaaaaagagccctggaatataaaaagacatgagatggtagccaaacccccagtaatgtcttttcattttgcccaagacctttggccagagcagaacataaaagattctttccagaaagtgacactgagaagatacggaaaatgtgaatatgagaatttacagttaagaaaaggctgtaaacatgtggatgagtgtacggggcacaaaggaggtcataatacagttaaccaatgtttgacagctaccccaagcaaaatattccagtgtaataaatatgtgaaagtctttgataaattttcaaattcaaa

SEQ ID NO: 101049 - DNA, 6094 bp, Artificial Sequence
  derived and/or modified sequence
catcttaaagcttccctttgagagtgttgctcttagaacttttcagatcttgttcagtgacctgctacagttatgtgagaggatccaggtgtaaatagaatctgatgacagattctgtaagcgtaaacaagcatcttaggggtgagagatgaaggccacaaagtatcgagagtcatgatcacaattatacctacccgtaaaatgtaatactggactagagtattttttctttccttttgcccaagagctagctaattaggacccgtaatctggagctccactgtggcagttccactttctatttagaatcagcctgagtctctcctgcctgccttatccttggccatcagcccagggtcactgggaactctctcacaatcacctaggcatctttgagatatttgaggatgtccagagcagaattgtgtcaggttgacaagagtggttaattctgcctctgtctcagtgtaagagaaatgagacatcctgtgtttgctcctcccctcatacaagagatgtctttggttggtatccagttgagagtttcccagtttcctgatagttggatgaaaaacaaggaggaggtctggagactcaagcagataaactaattgctaccatttcatatggcccttagaaaaatagataaagcagtcatggtccctaccatctaggaactgttagtctagactagcaactgaatacgtggttgaattaagcatcatatggttggcaaagtgaatagatgtgtgggaaaacgtgtgggctttatttgggccactttctttatatcgttgtgacttctgaggtcatcatttgaatgaatgtttatgaccacaagagttttaaatatttttatttcttttactttgctaagaatacatatttatcttataataaaattaccctagaaaaccccaggagatttgtttaaatggctaattagtatatttacacagttgatgggttgagcagagtaatatatagggtttactcccagctgcagttctgttcagattcaccctttttggaggctttatttaggtctggccccaccctggagtcttgcctcacagaactgattagaagagatcagagttttggctggtgcctttccggagtggttgctaacaattcccgaattccacaaggagataaatgggaaaaaaaggaaccactgacatttaaagatgtcgccatagaattctctctggaggagtggcaatgcctggatactgcacagcgggatttatataggaatgtgttgttagagaactacagaaacctggtctttttgggtattgctgtctctaagccatatctgatcacctgtctggagcaaaaaaaagagccctggaatataaaaagacatgagatggtagccaaacccccagtaatgtcttttcattttgcccaagacctttggccagagcagaacataaaagattctttccagaaagtgacactgagaagatacggaaaatgtgaatatgagaatttacagttaagaaaaggctgtaaacatgtggatgagtgtacggggcacaaaggaggtcataatacagttaaccaatgtttgacagctaccccaagcaaaatattccagtgtaataaatatgtgaaagtctttgataaattttcaaattcaaatagatataagagaagacatacaggaaacaaacacttcaaatgtaaagaatgtagcaaatcattttgcgtgctttcacaactaactcagcatagaagaattcatactagagtgaattcctacaaatgtgaagaatgtggaaaagcctttaactggttctcaactcttactaaacataagagaattcatactggagaaaagccctacaaatgtgaagaatgtggcaaagcctttaaccagtcctcacaacttactaggcataagataattcatactgaagagaaacccaacaaatgtgaagaatgtggcaaggcctttaaacaggcctcacaccttactatacataaaataattcatactggagaaaaaccttacaaatatgaagaatgtggcaaagtctttagccagtcctcacaccttactacacaaaagatacttcacactggagagaacctctacaagtgtaaagaatgtggaaaagcttttaacctattctcaaatcttactaaccataagagaattcatgctggggagaaaccctacaaatgtaaagaatgtggcagagcttttaacatatcctcaaaccttaataaacaggagaaaattcatactggagggaaactcaacaaatgtgaagaatgtgacaaagcttttaaccgatccttaaaacttactgcacataagaaaattctaatggaagagaaaccctacaaatgtgaagaatgtggcaaagtctttaaccagttctcaactcttactagacataagataattcatactggagagaaaccctacaaatgtaaagaatgtggcaaagcttttaaccaatcttcaaaccttactgaacataagaaaattcatactgcagagaaatcctataaatgtgaagaatgtggcaaagcttttaaccaacactcaaacctaattaaccataggaaaatttattctggagagaaaccatacaaatgtgaagaatgtggaaaagcttttaatcgatcctcaacccttactagacataagaaaattcatactggagagaaaccctacaaatgtgaagaatgtgacagagcttttagccagtcttcaaaccttactgaacataagaaaattcatactggagagaaaccctataaatgtgaggaatgtggcaaagcttttaaccgattctcaacccttactaaacataagagaattcatactggagaaaaaccctataaatgtgaagaatgtggaaaagcctttaatcaatcctatcaacttactagacataagatagttcatactaaagagaaactcaacaaatgtgaagaatttggcaaggcctttaaacagtcctcacaccgtactatacataaaattattcatactggagagaaaccctacaaatgtgaagaacatggcaaagtttttaaccagtcctcaaaccttactacacaaaagataattcatactggagagaacctctacaaatttgaagaacatggaaaagcttttaacctattctcaaacattactaaccataagataatttatactggagagaaaccccacaaatgtgaagaatgtggaaaagcttataaccgattctcaaacctaactatacataagagaattcatacgggagagaaaccttaccaatgtgcagaatgtggcaaagcctttaactgctcctcaacccttaatagacataagataattcatactggagagaaaccttacaaatgtaaagaatgtggcaaagcttttaacctatcctcaacccttactgcacataagaaaattcatactggagagaaaccctataaatgtgaagaatgtggcaaagcttttaaccaatcctcaaaccttactacacataagaaaattcatacttcagagaaaccctacaaatgtgaagaatgtggcaaatcctttaaccagttctcatctcttaatatacataagataattcatactggagagaaaccctacaaatgtggagattatggcagagctttcaacctatcctcaaatcttactacacataagaaaattcatactggagagaaaccctacaaatgtgagtatggcaaaacttaattgatcctacaagcttactacacataggaaaattcatactggagagaaactacaaatgtgaagaatgtgttaaagcctttaacaagtcttcaactttttctgcacacacgaggtattttatactggtgagaaaccttacaatgtaaagaatgtggcacagcttttaactaatcttcaaaccttactgaaagttgagaaaattcgtactggagagaatcctacaaatgtgaaaaatgtggcaaatcctttaactgatcctcaacttttactaaacataaggtaattcatactggagaaaagccatacaaatgagaagaatgtggcaatgcctttaatcagtcctcacacctttctacacataagataatttatactggagaggaactctatagttgtgaagaatgtggcaaagcttttaaccaatcctcataccttactatacagaaattcatactggagagaaagcctacaattgtgaagaatgtggcaaagcttttaaccttccttaacccttaactgtagataagaaaattcatactggaaagaaaccctacaaatgtgaagtctgtggcaaagcttttaactgattctcaactcttactacatgtaagagtatttatactggaaagaaaccctacaaatgtaaaaaacgtggcaatgcctttaactggtcctcacaccttgctacatataagacagtttatactttgagagaaaccctgcaaatgtgaataatgtggcaatactttaaaccaatcctcaaacctcactaaacataagataatactgaaaactttacaaacctgaatgatgtgacaataattttgacaacacctcgaactttctaacataaatcatactggtgaaaaatcctagaaatgtgaaaaatatcacaaagcctttaaatggttgtcacacttgattgtaggtaagaatccatactgaagaaaactcctggaagtgtaaaaaatgtggcaacacttttaataaatgctcaccccttattgcacaggaaagcatttatacttcagaaagattgtacaaatacaaggaatgtggaaaagccattattatctgctcagattttactcaacattagagagttagtacgtaataaaagcattataaatgcaatttttgtcaagagatctttcagaaaatataagcctttaaagtgaagaagaggagccagttgtgctggctcacatctgtaatgccagcactttgggaggccaaggtgggtggatcacctgagggcaggagtctgagaccagcctggccaacatagcaaaaccccatctctattaaaaattttacaaaaattagctgcgtgtggtggcaggcccctgtaatcccagctaattgggaggctgaagcaggagaattgctcaaacctgggaggcgaagattgcagtgagctgaaatcacaccactacactccagccaaagcaacaagagcaaaaacttcgtctcaaaaacaaaacaaaaaaagagtattcattgtgaggacaaacaatacaaatacgaagagggttgtagtacctttacttgtatcacagatacttttgtacccattttgcactagaggaaaaccatgaagcagttgctcaaatgttgttcaacaccagaaaatttatattggagaaaagcactgtaaatgtaatgcatttgtgaaaacattttttaaaaaactacagcttagaaaataccagaggcctcatactaaaatatatttttgcaagtgaagtaaatataaaaataatttaatccaaaattaagtctatataaatatcagagaattcacagtagaaatatctaaggtactgacacttcagacattgctgagtatagaatcagaatgctgagtatagaaaataatttaaaactaaagttggtaggtaaataatgtgtatataactttaaaagaagtagaatttttttgtagatgtataattacattcaaattatattttttcttgaaaaattagtttttgaaaagcaaatgatgtaattcaactcaaattcatgctcttcattcctattgtattcacatgtgaaagcatgtgattaatttttcatgcatcaaagatatgagaaatcatttctgttaggtcggtattatttatgacactttctatgaaagaataaggacattaaaatgtaagatgcatgatgaaaacctgagtgaagaggctgtttgtgtttaacttataatattgagtgatccatgaagtaggttttcagagcaatattcttctgcattatagtaagagaaaaccatttttaatcttagttaaaattaaagtgaattagtagtatatcattttactatttgtacttttatgtaataaaatgcaatgtgtttaa

SEQ ID NO: 101050 - DNA, 5212 bp, Artificial Sequence
  derived and/or modified sequence
ccagactgtgccataacacacatttgatgctgaaatccgggataggggaactcctttgggagtcgtgtcccttaaccccttcccccgacttcttgaagagacccacccgcgacctcggtacctcggaccagctctgtaaaagccccgcctctgccttcggataggtctggccccaccctggagtcttgcctcacagaactgattagaagagatcagagttttggctggtgcctttccggagtggttgctaacaattcccgaattccacaaggagataaatgggaaaaaaaggaaccactgacatttaaagatgtcgccatagaattctctctggaggagtggcaatgcctggatactgcacagcgggatttatataggaatgtgttgttagagaactacagaaacctggtctttttgggtattgctgtctctaagccatatctgatcacctgtctggagcaaaaaaaagagccctggaatataaaaagacatgagatggtagccaaacccccagtaatgtcttttcattttgcccaagacctttggccagagcagaacataaaagattctttccagaaagtgacactgagaagatacggaaaatgtgaatatgagaatttacagttaagaaaaggctgtaaacatgtggatgagtgtacggggcacaaaggaggtcataatacagttaaccaatgtttgacagctaccccaagcaaaatattccagtgtaataaatatgtgaaagtctttgataaattttcaaattcaaatagatataagagaagacatacaggaaacaaacacttcaaatgtaaagaatgtagcaaatcattttgcgtgctttcacaactaactcagcatagaagaattcatactagagtgaattcctacaaatgtgaagaatgtggaaaagcctttaactggttctcaactcttactaaacataagagaattcatactggagaaaagccctacaaatgtgaagaatgtggcaaagcctttaaccagtcctcacaacttactaggcataagataattcatactgaagagaaacccaacaaatgtgaagaatgtggcaaggcctttaaacaggcctcacaccttactatacataaaataattcatactggagaaaaaccttacaaatatgaagaatgtggcaaagtctttagccagtcctcacaccttactacacaaaagatacttcacactggagagaacctctacaagtgtaaagaatgtggaaaagcttttaacctattctcaaatcttactaaccataagagaattcatgctggggagaaaccctacaaatgtaaagaatgtggcagagcttttaacatatcctcaaaccttaataaacaggagaaaattcatactggagggaaactcaacaaatgtgaagaatgtgacaaagcttttaaccgatccttaaaacttactgcacataagaaaattctaatggaagagaaaccctacaaatgtgaagaatgtggcaaagtctttaaccagttctcaactcttactagacataagataattcatactggagagaaaccctacaaatgtaaagaatgtggcaaagcttttaaccaatcttcaaaccttactgaacataagaaaattcatactgcagagaaatcctataaatgtgaagaatgtggcaaagcttttaaccaacactcaaacctaattaaccataggaaaatttattctggagagaaaccatacaaatgtgaagaatgtggaaaagcttttaatcgatcctcaacccttactagacataagaaaattcatactggagagaaaccctacaaatgtgaagaatgtgacagagcttttagccagtcttcaaaccttactgaacataagaaaattcatactggagagaaaccctataaatgtgaggaatgtggcaaagcttttaaccgattctcaacccttactaaacataagagaattcatactggagaaaaaccctataaatgtgaagaatgtggaaaagcctttaatcaatcctatcaacttactagacataagatagttcatactaaagagaaactcaacaaatgtgaagaatttggcaaggcctttaaacagtcctcacaccgtactatacataaaattattcatactggagagaaaccctacaaatgtgaagaacatggcaaagtttttaaccagtcctcaaaccttactacacaaaagataattcatactggagagaacctctacaaatttgaagaacatggaaaagcttttaacctattctcaaacattactaaccataagataatttatactggagagaaaccccacaaatgtgaagaatgtggaaaagcttataaccgattctcaaacctaactatacataagagaattcatacgggagagaaaccttaccaatgtgcagaatgtggcaaagcctttaactgctcctcaacccttaatagacataagataattcatactggagagaaaccttacaaatgtaaagaatgtggcaaagcttttaacctatcctcaacccttactgcacataagaaaattcatactggagagaaaccctataaatgtgaagaatgtggcaaagcttttaaccaatcctcaaaccttactacacataagaaaattcatacttcagagaaaccctacaaatgtgaagaatgtggcaaatcctttaaccagttctcatctcttaatatacataagataattcatactggagagaaaccctacaaatgtggagattatggcagagctttcaacctatcctcaaatcttactacacataagaaaattcatactggagagaaaccctacaaatgtgagtatggcaaaacttaattgatcctacaagcttactacacataggaaaattcatactggagagaaactacaaatgtgaagaatgtgttaaagcctttaacaagtcttcaactttttctgcacacacgaggtattttatactggtgagaaaccttacaatgtaaagaatgtggcacagcttttaactaatcttcaaaccttactgaaagttgagaaaattcgtactggagagaatcctacaaatgtgaaaaatgtggcaaatcctttaactgatcctcaacttttactaaacataaggtaattcatactggagaaaagccatacaaatgagaagaatgtggcaatgcctttaatcagtcctcacacctttctacacataagataatttatactggagaggaactctatagttgtgaagaatgtggcaaagcttttaaccaatcctcataccttactatacagaaattcatactggagagaaagcctacaattgtgaagaatgtggcaaagcttttaaccttccttaacccttaactgtagataagaaaattcatactggaaagaaaccctacaaatgtgaagtctgtggcaaagcttttaactgattctcaactcttactacatgtaagagtatttatactggaaagaaaccctacaaatgtaaaaaacgtggcaatgcctttaactggtcctcacaccttgctacatataagacagtttatactttgagagaaaccctgcaaatgtgaataatgtggcaatactttaaaccaatcctcaaacctcactaaacataagataatactgaaaactttacaaacctgaatgatgtgacaataattttgacaacacctcgaactttctaacataaatcatactggtgaaaaatcctagaaatgtgaaaaatatcacaaagcctttaaatggttgtcacacttgattgtaggtaagaatccatactgaagaaaactcctggaagtgtaaaaaatgtggcaacacttttaataaatgctcaccccttattgcacaggaaagcatttatacttcagaaagattgtacaaatacaaggaatgtggaaaagccattattatctgctcagattttactcaacattagagagttagtacgtaataaaagcattataaatgcaatttttgtcaagagatctttcagaaaatataagcctttaaagtgaagaagaggagccagttgtgctggctcacatctgtaatgccagcactttgggaggccaaggtgggtggatcacctgagggcaggagtctgagaccagcctggccaacatagcaaaaccccatctctattaaaaattttacaaaaattagctgcgtgtggtggcaggcccctgtaatcccagctaattgggaggctgaagcaggagaattgctcaaacctgggaggcgaagattgcagtgagctgaaatcacaccactacactccagccaaagcaacaagagcaaaaacttcgtctcaaaaacaaaacaaaaaaagagtattcattgtgaggacaaacaatacaaatacgaagagggttgtagtacctttacttgtatcacagatacttttgtacccattttgcactagaggaaaaccatgaagcagttgctcaaatgttgttcaacaccagaaaatttatattggagaaaagcactgtaaatgtaatgcatttgtgaaaacattttttaaaaaactacagcttagaaaataccagaggcctcatactaaaatatatttttgcaagtgaagtaaatataaaaataatttaatccaaaattaagtctatataaatatcagagaattcacagtagaaatatctaaggtactgacacttcagacattgctgagtatagaatcagaatgctgagtatagaaaataatttaaaactaaagttggtaggtaaataatgtgtatataactttaaaagaagtagaatttttttgtagatgtataattacattcaaattatattttttcttgaaaaattagtttttgaaaagcaaatgatgtaattcaactcaaattcatgctcttcattcctattgtattcacatgtgaaagcatgtgattaatttttcatgcatcaaagatatgagaaatcatttctgttaggtcggtattatttatgacactttctatgaaagaataaggacattaaaatgtaagatgcatgatgaaaacctgagtgaagaggctgtttgtgtttaacttataatattgagtgatccatgaagtaggttttcagagcaatattcttctgcattatagtaagagaaaaccatttttaatcttagttaaaattaaagtgaattagtagtatatcattttactatttgtacttttatgtaataaaatgcaatgtgttt

SEQ ID NO: 101051 - DNA, 1667 bp, Artificial Sequence
  derived and/or modified sequence
atttggcggggcctttgtctctggctgcagccggagctcctgctctcctcctcactgctcagtgtcctctgctcctagaggcccagcctctgtgtccctgtgacctgcagatattgggagatccacagctaagacgccgggactccctggaaacctagaaatgactgtgccataacacacatttgatgctgaaatccgggataggggaactcctttgggagtcgtgtcccttaaccccttcccccgacttcttgaagagacccacccgcgacctcggtacctcggaccagctctgtaaaagccccgcctctgccttcggataggaaccactgacatttaaagatgtcgccatagaattctctctggaggagtggcaatgcctggatactgcacagcgggatttatataggaatgtgttgttagagaactacagaaacctggtctttttgggtattgctgtctctaagccatatctgatcacctgtctggagcaaaaaaaagagccctggaatataaaaagacatgagatggtagccaaacccccagtaatgtcttttcattttgcccaagacctttggccagagcagaacataaaagattctttccagaaagtgacactgagaagatacggaaaatgtgaatatgagaatttacagttaagaaaaggctgtaaacatgtggatgagtgtacggggcacaaaggaggtcataatacagttaaccaatgtttgacagctaccccaagcaaaatattccagtgtaataaatatgtgaaagtctttgataaattttcaaattcaaatagatataagagaagacatacaggaaacaaacacttcaaatgtaaagaatgtagcaaatcattttgcgtgctttcacaactaactcagcatagaagaattcatactagagtgaattcctacaaatgtgaagaatgtggaaaagccattattatctgctcagattttactcaacattagagagttagtacgtaataaaagcattataaatgcaatttttgtcaagagatctttcagaaaatataagcctttaaagtgaagaagaggagccagttgtgctggctcacatctgtaatgccagcactttgggaggccaaggtgggtggatcacctgagggcaggagtctgagaccagcctggccaacatagcaaaaccccatctctattaaaaattttacaaaaattagctgcgtgtggtggcaggcccctgtaatcccagctaattgggaggctgaagcaggagaattgctcaaacctgggaggcgaagattgcagtgagctgaaatcacaccactacactccagccaaagcaacaagagcaaaaacttcgtctcaaaaacaaaacaaaaaaagagtattcattgtgaggacaaacaatacaaatacgaagagggttgtagtacctttacttgtatcacagatacttttgtacccattttgcactagaggaaaaccatgaagcagttgctcaaatgttgttcaacaccagaaaatttatattggagaaaagcactgtaaatgtaatgcatttgtgaaaacattttttaaaaaactacagcttagaaaataccagaggcctcatactaaaatatatttttgcaagtgaagtaaatataaaaataatttaatccaaaattaagtctatat

SEQ ID NO: 101052 - DNA, 2582 bp, Artificial Sequence
  derived and/or modified sequence
ggacatgacgtcttccgggaggcggcggggtctttgtctcgctgcagcgggtgctgcaggtctggccttcacttttctgcgtcctcttactcctagaggcccagcctctgtggcgctgtgatctggttattgggagattcacagctaagacgccaggatcccccggaagcctagaaatgggaccactgacatttatggatgtggccatagagttctctttggaggagtggcagtgcctggacactgcacagcggaatgtatataggcatgtgatgttagagaactacagaaacctggttttcttggacctgattacctgtctggaacaaggaaaagagccctggaatatgaagagacatgagatggtggtagccaaacattcagctctgtgttctcgttttgcccaagacctttggctagagcagaacataaaagattctttccaaaaagtgacactgagcagatatggaaaatatggacataagaatttacagttaagaaaaggctgtaaaagtgtggatgagtgtaagggacaccaaggaggttttaatggacttaaccaatgtttgaaaattaccacaagcaaaatatttcaatgtaataaatatgtaaaagtcatgcataaattttcaaattcaaatagacacaagataagacatactgaaaataaacatttcagatgtaaagaatgtgacaaatcactttgcatgctttcacgcctaactcaacataaaaaaattcatactagagagaatttctacaaatgtgaagagtgtggaaaaacctttaactggtccacaaacctttctaaacctaagaaaattcatactggagaaaaaccctacaaatgtgaagtatgtggaaaagcctttcaccaatcctcaatccttactaaacataagataattcgtactggagaaaaaccctataaatgtgcacactgtggcaaagcctttaaacagtcctcacaccttactagacataagataattcatactgaagagaaaccctacaaatgtgaacaatgtggcaaggtctttaagcagtccccaacccttactaaacatcagataatttatactggagaggaaccatacaaatgtgaggaatgtggcaaagcttttaacctatcttaacaacttactgaacataagaaaatttacactagagagaaagcctacaaatgtgaagaatgtggcaaagcctttaaccagttttcaacccttattacacataagataattcatagcggagagaaaccccacaaatgtgaagaatgtggcagagcttttaaccagtccgcaaagctcactgaacataagttaattcatactggagaaaaaccctacaaatgtaaagaatgtggaaaagcttttcaccgatactcaatccttagtacacataagaaaattcatactggggagaaaccccacaaatgtggagaatgcggaaaagcctttaactggtcctcaactcttattacacataagataattcacagtggagaaaaaccctacaaatgtgaagaatgtggcaaagcttttaaccagtcctcacaccttatgagacataagaaaattcatagtaaagagaaaccctacaaatgtgaacagtgtggcaaggtctttaagaagtcctcaactcttactgcacataagatcattcatactggagagaaaccttacaaatgtgaggaatgtggcaaaggttttagccaactctcaaaccttactaaacacaagaagattcatactagagagaaaccctacaaatgtgaagaatgtggcatatcttttaaccagttctcacaacttgctatacataagatgattcacacttgaatgaaaccctacaaatgtgaacgatgtggcagttgttttaactagttctcgaactttactatgcataagaaaattcaaactggagagaaactctacaaatgtgaagaatgtggcaaagcttttaaccaagtctcaacacttactatacataagataatttatactggagcaaaaccttggaaattcaaagaatgtggtaaaacttacaatcctcaaaacttcttacacctaaaattcatgcaggagagaaacaccacaaatgtgaaaaatttggtaaattctttaacaagtcttcaaccctttctgcacataatataattcatactggagagaaaccccacaaatatgaagaatgtggtaatgcttttaaccaattctcaaatcttactaaacaaaattaatactgaaaatgttacaaaccagaaaaatgtgaaaatgattttaacaaaaccttcaaatttttctaaacataaaggaaatcatactggtaagaaattataaaaatgtgaagaatgtgacaaagcctttaaatggttgtcacacttgattgtaggtaagataattcatactggcagaaactcccagaagtgtgaagaatatggcaaaactttaattcctataccttattgcacaggaaagcatttatacttcagaaaatgttgtactgatataaagaatgtagaaaagccattaatatgtgcttacatcttattcaacattagagagttagtacttaataaa

SEQ ID NO: 101053 - DNA, 2235 bp, Artificial Sequence
  derived and/or modified sequence
atgaagagacatgagatggtggtagccaaacattcagctctgtgttctcgttttgcccaagacctttggctagagcagaacataaaagattctttccaaaaagtgacactgagcagatatggaaaatatggacataagaatttacagttaagaaaaggctgtaaaagtgtggatgagtgtaagggacaccaaggaggttttaatggacttaaccaatgtttgaaaattaccacaagcaaaatatttcaatgtaataaatatgtaaaagtcatgcataaattttcaaattcaaatagacacaagataagacatactgaaaataaacatttcagatgtaaagaatgtgacaaatcactttgcatgctttcacgcctaactcaacataaaaaaattcatactagagagaatttctacaaatgtgaagagtgtggaaaaacctttaactggtccacaaacctttctaaacctaagaaaattcatactggagaaaaaccctacaaatgtgaagtatgtggaaaagcctttcaccaatcctcaatccttactaaacataagataattcgtactggagaaaaaccctataaatgtgcacactgtggcaaagcctttaaacagtcctcacaccttactagacataagataattcatactgaagagaaaccctacaaatgtgaacaatgtggcaaggtctttaagcagtccccaacccttactaaacatcagataatttatactggagaggaaccatacaaatgtgaggaatgtggcaaagcttttaacctatcttaacaacttactgaacataagaaaatttacactagagagaaagcctacaaatgtgaagaatgtggcaaagcctttaaccagttttcaacccttattacacataagataattcatagcggagagaaaccccacaaatgtgaagaatgtggcagagcttttaaccagtccgcaaagctcactgaacataagttaattcatactggagaaaaaccctacaaatgtaaagaatgtggaaaagcttttcaccgatactcaatccttagtacacataagaaaattcatactggggagaaaccccacaaatgtggagaatgcggaaaagcctttaactggtcctcaactcttattacacataagataattcacagtggagaaaaaccctacaaatgtgaagaatgtggcaaagcttttaaccagtcctcacaccttatgagacataagaaaattcatagtaaagagaaaccctacaaatgtgaacagtgtggcaaggtctttaagaagtcctcaactcttactgcacataagatcattcatactggagagaaaccttacaaatgtgaggaatgtggcaaaggttttagccaactctcaaaccttactaaacacaagaagattcatactagagagaaaccctacaaatgtgaagaatgtggcatatcttttaaccagttctcacaacttgctatacataagatgattcacacttgaatgaaaccctacaaatgtgaacgatgtggcagttgttttaactagttctcgaactttactatgcataagaaaattcaaactggagagaaactctacaaatgtgaagaatgtggcaaagcttttaaccaagtctcaacacttactatacataagataatttatactggagcaaaaccttggaaattcaaagaatgtggtaaaacttacaatcctcaaaacttcttacacctaaaattcatgcaggagagaaacaccacaaatgtgaaaaatttggtaaattctttaacaagtcttcaaccctttctgcacataatataattcatactggagagaaaccccacaaatatgaagaatgtggtaatgcttttaaccaattctcaaatcttactaaacaaaattaatactgaaaatgttacaaaccagaaaaatgtgaaaatgattttaacaaaaccttcaaatttttctaaacataaaggaaatcatactggtaagaaattataaaaatgtgaagaatgtgacaaagcctttaaatggttgtcacacttgattgtaggtaagataattcatactggcagaaactcccagaagtgtgaagaatatggcaaaactttaattcctataccttattgcacaggaaagcatttatacttcagaaaatgttgtactgatataaagaatgtagaaaagccattaatatgtgcttacatcttattcaacattagagagttagtacttaataaa

SEQ ID NO: 101054 - DNA, 2574 bp, Artificial Sequence
  derived and/or modified sequence
gtctcgctgcagcgggtgctgcaggtctggccttcacttttctgcgtcctcttactcctagaggcccagcctctgtggcgctgtgatctggttattgggagattcacagctaagacgccaggatcccccggaagcctagaaatggccagaaaaactgggaaaatcacaggctcttccacttactggatatttaacaagatattcttcttgagccaaaaacattgacattagcgggaccactgacatttatggatgtggccatagagttctctttggaggagtggcagtgcctggacactgcacagcggaatgtatataggcatgtgatgttagagaactacagaaacctggttttcttggctctgtgttctcgttttgcccaagacctttggctagagcagaacataaaagattctttccaaaaagtgacactgagcagatatggaaaatatggacataagaatttacagttaagaaaaggctgtaaaagtgtggatgagtgtaagggacaccaaggaggttttaatggacttaaccaatgtttgaaaattaccacaagcaaaatatttcaatgtaataaatatgtaaaagtcatgcataaattttcaaattcaaatagacacaagataagacatactgaaaataaacatttcagatgtaaagaatgtgacaaatcactttgcatgctttcacgcctaactcaacataaaaaaattcatactagagagaatttctacaaatgtgaagagtgtggaaaaacctttaactggtccacaaacctttctaaacctaagaaaattcatactggagaaaaaccctacaaatgtgaagtatgtggaaaagcctttcaccaatcctcaatccttactaaacataagataattcgtactggagaaaaaccctataaatgtgcacactgtggcaaagcctttaaacagtcctcacaccttactagacataagataattcatactgaagagaaaccctacaaatgtgaacaatgtggcaaggtctttaagcagtccccaacccttactaaacatcagataatttatactggagaggaaccatacaaatgtgaggaatgtggcaaagcttttaacctatcttaacaacttactgaacataagaaaatttacactagagagaaagcctacaaatgtgaagaatgtggcaaagcctttaaccagttttcaacccttattacacataagataattcatagcggagagaaaccccacaaatgtgaagaatgtggcagagcttttaaccagtccgcaaagctcactgaacataagttaattcatactggagaaaaaccctacaaatgtaaagaatgtggaaaagcttttcaccgatactcaatccttagtacacataagaaaattcatactggggagaaaccccacaaatgtggagaatgcggaaaagcctttaactggtcctcaactcttattacacataagataattcacagtggagaaaaaccctacaaatgtgaagaatgtggcaaagcttttaaccagtcctcacaccttatgagacataagaaaattcatagtaaagagaaaccctacaaatgtgaacagtgtggcaaggtctttaagaagtcctcaactcttactgcacataagatcattcatactggagagaaaccttacaaatgtgaggaatgtggcaaaggttttagccaactctcaaaccttactaaacacaagaagattcatactagagagaaaccctacaaatgtgaagaatgtggcatatcttttaaccagttctcacaacttgctatacataagatgattcacacttgaatgaaaccctacaaatgtgaacgatgtggcagttgttttaactagttctcgaactttactatgcataagaaaattcaaactggagagaaactctacaaatgtgaagaatgtggcaaagcttttaaccaagtctcaacacttactatacataagataatttatactggagcaaaaccttggaaattcaaagaatgtggtaaaacttacaatcctcaaaacttcttacacctaaaattcatgcaggagagaaacaccacaaatgtgaaaaatttggtaaattctttaacaagtcttcaaccctttctgcacataatataattcatactggagagaaaccccacaaatatgaagaatgtggtaatgcttttaaccaattctcaaatcttactaaacaaaattaatactgaaaatgttacaaaccagaaaaatgtgaaaatgattttaacaaaaccttcaaatttttctaaacataaaggaaatcatactggtaagaaattataaaaatgtgaagaatgtgacaaagcctttaaatggttgtcacacttgattgtaggtaagataattcatactggcagaaactcccagaagtgtgaagaatatggcaaaactttaattcctataccttattgcacaggaaagcatttatacttcagaaaatgttgtactgatataaagaatgtagaaaagccattaatatgtgcttacatcttattcaacattagagagttagtacttaataaaagcattataaatgcaa

SEQ ID NO: 101055 - protein, 147 aa, Artificial Sequence
  derived and/or modified sequence
MYLETRRAIFVFWIFLQVQGTKVCQEAVWEAYRIFLDRIPDTGEYQDWVSICQQETFCLFDIGKNFSNSQEHLDLLQQRIKQRSFPDRKDEISAEKTLGEPGETIVISTEKNKGKTKPFNILQFGNNHHEHLLPIFCLLSSIIYTYY

SEQ ID NO: 101056 - DNA, 477 bp, Artificial Sequence
  derived and/or modified sequence
gaacggcctaacggaaccagtgcccaacctgcacaggtgaagcccgaattctaccggcaggcagaactgaagccctgtccttggaccgggtccaaccagagacgttgcataacattctgtcctaccccagaccaggcagacccctgtaagttcttggcctgtggggagttcgctcagtgcgtcaaaaatgaacgtacagaggaggctgaatgtcgctgcaagccaggatacgatagccaaggatcattggacggcctggaaccgggactttgtggccccggcactaaggaatgcgaggtattacagggaaagggggccccttgccgccttcccgaccattctgaaaaccaggcatacaagacgtcagtcaagaagtttcaaaatcagcagaacaacaaggtcatttctaaaaggaattcagagttgctgactgtcgagtatgaggaatttaaccatcaagattgggaaggaaactag

SEQ ID NO: 101057 - DNA, 444 bp, Artificial Sequence
  derived and/or modified sequence
atgtaccttgagaccagacgggcgatcttcgttttctggatatttcttcaagtgcagggaacgaaggtctgccaggaggccgtgtgggaagcctaccgcatctttcttgacagaatccccgacactggggagtaccaggattgggtgagtatttgccagcaggagactttctgtctgttcgatataggcaaaaatttcagcaatagccaggagcaccttgacttgctgcagcagcgcataaagcaacggagtttccctgaccggaaggacgagatcagtgctgaaaaaacccttggggaaccaggtgaaaccatcgtgatatcgactgagaaaaacaaaggaaagacaaaacctttcaacatcctgcagtttggcaataaccatcatgagcacttgttgccaatcttttgtttgctgtctagcatcatctacacgtactattag

SEQ ID NO: 101058 - DNA, 835 bp, Artificial Sequence
  derived and/or modified sequence
gagagacccaacgggacctcagcccagccagcccaggtgaagcctgaattttataggcaagctgagctgaaaccttgcccttggacaggatccaatcaaaggagatgtatcactttctgtccaacacctgatcaagcagatccctgcaagttcctggcctgcggcgaatttgcccaatgtgtaaagaacgaacggactgaggaagcggagtgtcgctgcaaaccaggatatgacagccaggggagcctggacggtctggaaccaggcctctgtggccctggcacaaaggaatgcgaggtcctccagggaaagggagctccatgcaggttgccagatcactctgaaaatcaagcatacaaaactagtgttaaaaagttccaaaatcaacaaaataacaaggtaatcagtaaaagaaattctgaattactgaccgtagaatatgaagaatttaaccatcaagattgggaaggaaattaaaaactgaaaatgtacaattatcatttaggctatctcaagagagatgatttgccttctcaaggaaaatggagacaggcatattcatgggtcatcaaaatccagacatacagtcaacactgagaatcagcacacaccatatttcaaatatagaagagtcatgtacttggcaaccagtaaattctgaagaaaaagacacttacttattattaaaaccccaaatgcaatcagcgaaacatatttttactattcttggatgatagtcaaaatgatcataagccaggtttgcttccaccttccctgaaaattttactcacagatcatttgcaacaagcatagcttacttattgtttagggactg

SEQ ID NO: 101059 - DNA, 477 bp, Artificial Sequence
  derived and/or modified sequence
gagcggcccaacggcaccagcgcccagcctgcccaggtgaagccagagttctaccggcaggccgagctgaagccctgcccctggacaggcagcaaccagaggcgctgcatcaccttctgccccaccccagaccaggccgacccctgcaagttcctggcctgtggggagtttgcccagtgtgtgaagaatgaaagaacagaggaggccgagtgccgctgcaagccaggctatgacagccagggcagcctggatggcctggagcccggcctgtgtggccctggcaccaaggaatgtgaggtgctgcagggcaagggggccccctgccgcctgcctgaccacagcgagaaccaggcctacaagacctctgtgaagaagttccagaaccagcagaacaacaaggtgatcagcaagaggaacagcgagctgctgactgtggagtatgaggagttcaaccaccaggactgggagggcaactag

SEQ ID NO: 101060 - DNA, 444 bp, Artificial Sequence
  derived and/or modified sequence
atgtacctggagacccggcgggccatctttgtgttctggatcttcctgcaggtgcagggcaccaaggtgtgccaggaggccgtgtgggaggcctaccgcatcttcctggaccgcatcccagacaccggggagtaccaggactgggtgtccatctgccagcaggagaccttctgcctgtttgacatcggcaagaacttcagcaacagccaggagcacctggacctgctgcagcagaggatcaagcagaggagcttcccagacaggaaggatgagatctctgctgagaagaccctgggggagcctggagagaccatcgtcatcagcacagagaagaacaagggcaagaccaagcccttcaacatcctgcagtttggaaacaaccaccacgagcacctgctgcccatcttctgcctgctgagcagcatcatctacacctactactag

SEQ ID NO: 101061 - DNA, 477 bp, Artificial Sequence
  derived and/or modified sequence
gagcggcccaacggcaccagcgcccagcccgcccaggtgaagcccgaattctatcgtcaagcagagctcaagccctgtccatggacgggatctaaccagcgacgatgcataaccttctgtcctactcctgaccaagccgacccttgtaaattcctcgcatgtggagaattcgcccagtgcgtaaaaaacgaacggaccgaggaggcagagtgccggtgcaagcccggatatgactcgcaaggctcattagacggactcgagccaggcctgtgtggcccaggcactaaagagtgcgaagtcttgcaaggaaagggcgcgccttgccgcctccctgaccatagtgagaatcaagcctataagacatctgtgaagaagtttcagaatcagcagaataataaagtaatctctaagaggaactcagaactcctgactgtggagtacgaagagttcaaccaccaggactgggagggcaattag

SEQ ID NO: 101062 - DNA, 444 bp, Artificial Sequence
  derived and/or modified sequence
atgtacctggagacccggcgggccatcttcgtgttctggatcttcctacaagtgcaaggcacaaaagtatgtcaagaggctgtttgggaagcttatagaattttccttgaccgcattcccgatactggcgagtaccaagattgggtgtcaatttgccagcaggaaacattttgtttgtttgacatcggaaagaatttcagcaatagtcaagagcacctggacctcctgcagcagagaatcaagcagaggtccttccctgataggaaggacgagatttcagccgaaaagaccctgggggaaccaggagagactatcgtgatcagcactgaaaagaacaagggcaaaaccaaacctttcaacattctgcagttcggtaacaatcatcacgagcacttgctgccgatattctgtctgttaagctcaatcatttacacctactattag

SEQ ID NO: 101063 - DNA, 477 bp, Artificial Sequence
  derived and/or modified sequence
gagcgccctaacggaacgtctgctcagccggcacaggtcaagcctgagttttaccggcaggccgagctgaagccatgtccgtggacaggaagcaaccagcggaggtgtatcactttctgtcccacccctgatcaggcagatccctgtaagttcttagcttgtggggagttcgcccagtgcgtcaagaacgaaaggacggaagaggcagaatgccggtgtaagccaggctatgattcccaggggtcactcgacgggctggagcctggcctctgcgggcctggtacaaaagaatgtgaagtactgcaaggaaagggcgctccttgcaggctgccagatcatagtgagaaccaggcttacaagacctctgttaagaaatttcagaaccaacagaataataaggtgataagcaagcggaactctgagctgcttaccgtggagtacgaagagtttaatcatcaagactgggaaggaaactag

SEQ ID NO: 101064 - DNA, 444 bp, Artificial Sequence
  derived and/or modified sequence
atgtacttggaaacaagacgggctattttcgtgttttggatttttcttcaagtgcagggcaccaaagtctgccaggaggctgtctgggaagcatataggatctttctagaccggattccagatacaggagagtaccaggactgggtttcaatctgccagcaggaaactttttgtctgtttgatattggaaagaacttttccaatagccaggaacacctcgaccttctccagcaacggatcaagcaacgctctttccccgatcgaaaagatgaaattagcgctgagaaaaccctaggcgagcctggcgaaacaatcgtgatcagcacagagaagaacaagggcaagacgaaacccttcaatattctgcagttcggcaataaccaccatgaacacctgttaccaatcttctgtcttctgagttccatcatctatacttactactag

SEQ ID NO: 101065 - DNA, 477 bp, Artificial Sequence
  derived and/or modified sequence
gagagacccaacggcaccagcgcccagcccgcccaggtgaagcccgagttctacagacaggccgagctgaagccctgcccctggaccggcagcaaccagagaagatgcatcaccttctgccccacccccgaccaggccgacccctgcaagttcctggcctgcggcgagttcgcccagtgcgtgaagaacgagagaaccgaggaggccgagtgcagatgcaagcccggctacgacagccagggcagcctggacggcctggagcccggcctgtgcggccccggcaccaaggagtgcgaggtgctgcagggcaagggcgccccctgcagactgcccgaccacagcgagaaccaggcctacaagaccagcgtgaagaagttccagaaccagcagaacaacaaggtgatcagcaagagaaacagcgagctgctgaccgtggagtacgaggagttcaaccaccaggactgggagggcaactag

SEQ ID NO: 101066 - DNA, 444 bp, Artificial Sequence
  derived and/or modified sequence
atgtacctggagaccagaagagccatcttcgtgttctggatcttcctgcaggtgcagggcaccaaggtgtgccaggaggccgtgtgggaggcctacagaatcttcctggacagaatccccgacaccggcgagtaccaggactgggtgagcatctgccagcaggagaccttctgcctgttcgacatcggcaagaacttcagcaacagccaggagcacctggacctgctgcagcagagaatcaagcagagaagcttccccgacagaaaggacgagatcagcgccgagaagaccctgggcgagcccggcgagaccatcgtgatcagcaccgagaagaacaagggcaagaccaagcccttcaacatcctgcagttcggcaacaaccaccacgagcacctgctgcccatcttctgcctgctgagcagcatcatctacacctactactag

SEQ ID NO: 101067 - protein, 202 aa, Artificial Sequence
  derived and/or modified sequence
MATLIYVDKENGEPGTRVVAKDGLKLGSGPSIKALDGRSQVSTPRFGKTFDAPPALPKATRKALGTVNRATEKSVKTKGPLKQKQPSFSAKKMTEKTVKAKSSVPASDDAYPEIEKFFPFNPLDFESFDLPEEHQIAHLPLSGVPLMILDEERELEKLFQLGPPSPVKMPSPPWESNLLQSPSSILSTLDVELPPVCCDIDI

SEQ ID NO: 101068 - DNA, 609 bp, Artificial Sequence
  derived and/or modified sequence
atggcaaccctcatttatgtggataaggaaaatggagaacccggtacccgagttgtggcaaaagacggattgaagctggggtctgggccctccattaaggcgctggacggccgttctcaggtgtctacgccccgattcggaaaaaccttcgatgctccaccagcccttccgaaagccactagaaaggctttggggaccgtgaatagagcaacagagaagtccgtgaagactaaggggcctctgaagcagaagcagccctcgttctcagccaaaaaaatgaccgagaagacagtcaaggctaagtcgtcagtcccagcatctgacgacgcctacccagaaatagagaaattctttccattcaaccccctggacttcgaaagctttgacctcccggaggagcaccaaatcgcgcacctgccactttccggcgtgcccctcatgatcctggacgaagagagagaattggaaaaactgtttcaacttggcccaccttcccctgtcaagatgccatcccctccatgggagagcaacctcctgcagagcccaagctcaattctgagtacgctcgatgtcgaacttccgccggtctgctgcgacatcgatatttag

SEQ ID NO: 101069 - DNA, 609 bp, Artificial Sequence
  derived and/or modified sequence
atggctactctcatttacgtggataaggagaatggagagccgggaacgcgggtcgtggctaaagacgggcttaagttgggcagtggtcccagtatcaaagctctcgacgggcgttcacaagtaagcactcccaggtttggcaagacattcgacgcacctccagccttgcctaaagcaacaaggaaggccttgggaacagtgaatcgggccactgaaaaatcagtcaagacaaagggacccctcaagcaaaaacagcccagtttcagtgctaaaaagatgacagaaaaaacggtcaaagccaagtcaagcgtgccagccagcgacgacgcatatccagaaattgagaagttctttccgttcaatcctctcgacttcgagagttttgatctcccagaggagcaccagatcgctcacttacctctttctggggtgcccctgatgattctggacgaggaaagggaactggagaagctctttcagctgggccctccaagccccgtgaagatgccatcacctccatgggaaagtaacctactccaaagtccatcttctattctgtctacccttgacgtggaattacctcccgtctgctgtgacatagatatatag

SEQ ID NO: 101070 - DNA, 609 bp, Artificial Sequence
  derived and/or modified sequence
atggcaaccctgatatacgtcgacaaggaaaatggcgagcctgggactcgtgtagttgccaaggacggcctgaaactggggtcgggcccttccataaaggccctggacggccgaagccaggtttccaccccccgattcggtaaaacttttgatgcaccaccggctctgcccaaggccacacgcaaggccctgggaactgtcaatcgagctacagaaaagagcgtgaagaccaagggccctctcaagcagaaacaaccatctttcagcgcaaagaagatgactgaaaagactgtaaaggcaaaatcctccgtgcctgccagtgatgacgcgtatcctgaaatcgaaaagttcttcccattcaatcccctggacttcgagagctttgacctgccggaggagcaccagatcgctcacctgcccctgagcggcgtccctctgatgatattggatgaggagcgggaactggagaaactttttcagctcggccctccctcaccagtcaaaatgccatcacctccttgggagtctaatctgttgcaaagtccaagctcaatcttatctacattggatgtcgaattgcctcctgtgtgttgtgacatcgatatttag

SEQ ID NO: 101071 - DNA, 609 bp, Artificial Sequence
  derived and/or modified sequence
atggccaccctcatctacgtggacaaggaaaatggagagcccggcaccagggtggtggccaaggatggcctgaagctgggcagcggccccagcatcaaggccctggatggccgcagccaggtgtccacccccaggtttgggaagacctttgatgcccccccagccctgcccaaggccaccaggaaggccctgggcaccgtgaacagagccacagagaagtctgtgaagaccaagggccccctgaagcagaagcagcccagcttcagcgccaagaagatgacagagaagacagtgaaggccaagagctctgtgcctgccagtgatgatgcctacccagaaattgagaagttcttccccttcaaccccctggactttgagagctttgacctgcctgaggagcaccagatcgcccacctgcccctgagcggcgtgcccctgatgatcctggatgaggagcgggagctggagaagctgttccagctgggcccccccagccctgtgaagatgcccagccccccctgggagagcaacctgctgcagagccccagcagcatcctgagcaccctggatgtggagctgccccctgtgtgctgtgacatcgacatctag

SEQ ID NO: 101072 - DNA, 609 bp, Artificial Sequence
  derived and/or modified sequence
atggccaccctgatctacgtggacaaggagaacggcgagcccggcacacgggtagtggccaaagatggactgaagttgggaagcggcccctctatcaaggcactcgatggccgctctcaggtgagcacacctagattcggcaagacttttgacgcaccaccagctctgccgaaggcaacacgcaaagccttgggtaccgtgaaccgagccaccgagaagtccgtgaagacgaaaggccctctgaagcagaaacagccgtcattcagtgccaaaaagatgaccgagaagacagtgaaggctaagtcctcagttcccgcttccgacgacgcgtaccctgaaatcgagaagttcttcccatttaatcctctggatttcgagagctttgatctcccagaggagcaccaaatcgctcacctacccctcagtggcgtgccccttatgattctggatgaggaacgggagctggaaaagctgtttcaactcggacctccatctccagtcaagatgccaagcccgccatgggagtctaacctgttacaatctccctcttctatcctatctaccctggacgtcgagttacctcccgtctgttgcgacattgatatctag

SEQ ID NO: 101073 - DNA, 609 bp, Artificial Sequence
  derived and/or modified sequence
atggccaccctgatctacgtggacaaggagaacggcgagcccggcacacgggtagtagccaaggatgggctgaaactcggctcaggaccatctattaaagctctagatggcaggagccaggtgtccacccccaggtttggtaagacattcgatgcccctcccgcacttcccaaggctacgagaaaggcactgggcacagtgaaccgggccacagagaaaagcgtgaagacgaagggaccgctgaaacagaagcagccatccttcagcgcgaagaagatgaccgagaagacagtgaaagcaaaaagttccgtgcctgcttccgacgatgcttatcctgagatcgaaaaattcttcccgttcaatccgctggactttgagagttttgatctgccagaagagcaccagatcgcccacctaccacttagcggagtgcctctgatgatcctggacgaggagcgggagctggaaaagcttttccaactgggcccacctagccccgtgaagatgcctagccccccatgggaatccaatctgctgcagtcaccaagttccattctgagtactctcgatgtggagttaccgcctgtctgttgtgatatcgatatttag

SEQ ID NO: 101074 - DNA, 609 bp, Artificial Sequence
  derived and/or modified sequence
atggccaccctgatctacgtggacaaggagaacggcgagcccggcacacgcgtggtcgcgaaagatgggctgaagctgggaagtggccctagtattaaagctcttgatggaaggagccaggtctccaccccaaggtttggcaaaactttcgacgccccccccgccctccctaaggcaactcgcaaggctttaggcacagtcaacagggcgaccgaaaagtctgtgaagacaaagggtcccctgaagcagaagcagccaagttttagtgccaagaagatgaccgaaaaaactgtgaaagctaaaagctctgtgcctgccagtgacgatgcataccctgagattgaaaagttctttcccttcaaccctctggattttgaaagtttcgacttacccgaagaacatcagatcgcgcacctcccactaagtggggtgccactcatgattttggatgaagagagagagctagagaaactcttccagttagggccaccctctccagtgaagatgccaagccctccatgggagagcaacttattacaaagtcctagctccattttatcaacgctggatgtggagttgccacctgtgtgctgcgatatagacatatag

SEQ ID NO: 101075 - DNA, 750 bp, Artificial Sequence
  derived and/or modified sequence
gtggtttaaaccaggagtgcgccgcgtccgttcaccgcggcctcagatgaatgcggctgttaagacctgcaataatccagaatggctactctgatctatgttgataaggaaaatggagaaccaggcacccgtgtggttgctaaggatgggctgaagctggggtctggaccttcaatcaaagccttagatgggagatctcaagtttcaacaccacgttttggcaaaacgttcgatgccccaccagccttacctaaagctactagaaaggctttgggaactgtcaacagagctacagaaaagtctgtaaagaccaagggacccctcaaacaaaaacagccaagcttttctgccaaaaagatgactgagaagactgttaaagcaaaaagctctgttcctgcctcagatgatgcctatccagaaatagaaaaattctttcccttcaatcctctagactttgagagttttgacctgcctgaagagcaccagattgcgcacctccccttgagtggagtgcctctcatgatccttgacgaggagagagagcttgaaaagctgtttcagctgggccccccttcacctgtgaagatgccctctccaccatgggaatccaatctgttgcagtctccttcaagcattctgtcgaccctggatgttgaattgccacctgtttgctgtgacatagatatttaaatttcttagtgcttcagagtttgtgtgtatttgtattaataaagcattctttaacagatt

SEQ ID NO: 101076 - DNA, 1070 bp, Artificial Sequence
  derived and/or modified sequence
cgcgggtggttagttgagccggctccggcggggaaggaggcgggctgcggctgcggctggggctgaagctggggctggggttgggggactgcccggggcttagatggctccgagcccgtttgagcgtggtctcggactgctaactggaccaacggcaactgtctgatgagtgccagccccaaaccgcgcgctgctcgggaccttagagcctctgactcaggctggaagatttgagagctggattaagtacttgttggctcacgcccgtgactgttccgctgtttagctcttgttttttgtgtggacactcctaggatagaaagtttggtatgttgctatacctttgcttctcccaccttccccaatatctaatatgtatttctcattcttagaataatccagaatggctactctgatctatgttgataaggaaaatggagaaccaggcacccgtgtggttgctaaggatgggctgaagctggggtctggaccttcaatcaaagccttagatgggagatctcaagtttcaacaccacgttttggcaaaacgttcgatgccccaccagccttacctaaagctactagaaaggctttgggaactgtcaacagagctacagaaaagtctgtaaagaccaagggacccctcaaacaaaaacagccaagcttttctgccaaaaagatgactgagaagactgttaaagcaaaaagctctgttcctgcctcagatgatgcctatccagaaatagaaaaattctttcccttcaatcctctagactttgagagttttgacctgcctgaagagcaccagattgcgcacctccccttgagtggagtgcctctcatgatccttgacgaggagagagagcttgaaaagctgtttcagctgggccccccttcacctgtgaagatgccctctccaccatgggaatccaatctgttgcagtctccttcaagcattctgtcgaccctggatgttgaattgccacctgtttgctgtgacatagatatttaaatttcttagtgcttcagagtttgtgtgtatttgtattaataaagcattctttaacaga

SEQ ID NO: 101077 - DNA, 895 bp, Artificial Sequence
  derived and/or modified sequence
gagggtcgcgggtggttagttgagccggctccggcggggaaggaggcgggctgcggctgcggctggggctgaagctggggctggggttgggggactgcccggggcttagatggctccgagcccgtttgagcgtggtctcggactgctaactggaccaacggcaactgtctgatgagtgccagccccaaaccgcgcgctgctcgggaccttagagcctctgactcaggctggaagatttgagagctggattaaaataatccagaatggctactctgatctatgttgataaggaaaatggagaaccaggcacccgtgtggttgctaaggatgggctgaagctggggtctggaccttcaatcaaagccttagatgggagatctcaagtttcaacaccacgttttggcaaaacgttcgatgccccaccagccttacctaaagctactagaaaggctttgggaactgtcaacagagctacagaaaagtctgtaaagaccaagggacccctcaaacaaaaacagccaagcttttctgccaaaaagatgactgagaagactgttaaagcaaaaagctctgttcctgcctcagatgatgcctatccagaaatagaaaaattctttcccttcaatcctctagactttgagagttttgacctgcctgaagagcaccagattgcgcacctccccttgagtggagtgcctctcatgatccttgacgaggagagagagcttgaaaagctgtttcagctgggccccccttcacctgtgaagatgccctctccaccatgggaatccaatctgttgcagtctccttcaagcattctgtcgaccctggatgttgaattgccacctgtttgctgtgacatagatatttaaatttcttagtgcttcagagtttg

SEQ ID NO: 101078 - DNA, 609 bp, Artificial Sequence
  derived and/or modified sequence
atggcaacgctgatctatgtcgacaaggaaaatggcgagcccggaactagggtagtagccaaggacgggctgaagttaggttctgggccttctattaaggcccttgacggccgatctcaggtgtccacaccgcgatttggcaagacgttcgacgccccacccgcattgccaaaagccaccaggaaggcactagggaccgtcaacagggctactgaaaaatccgtgaagaccaagggccctcttaaacagaagcagccttcgttctcagctaaaaagatgacagagaagacagtgaaagctaagtcttctgtaccggcaagcgacgatgcgtacccagagatcgagaagtttttcccttttaaccctctcgatttcgagtcttttgatttacccgaggagcaccagatcgctcatctgcccctgagtggagtccccctaatgatactcgacgaagagagggagctggaaaaattgtttcaacttgggccaccttcacccgtgaaaatgccatcacccccttgggaaagcaatctgctacaaagcccgtcctccatcctatcaacccttgacgtcgagctgccaccggtctgctgcgatattgacatctag

SEQ ID NO: 101079 - DNA, 609 bp, Artificial Sequence
  derived and/or modified sequence
atggctactctgatttacgtggataaagagaatggagagcctggcactagagtggtcgctaaggacggcctcaaacttgggagtggtccatccataaaagccttagacggccgaagccaagtgtcgacacctcgctttgggaagacgttcgacgcacccccagctctgccgaaggcaacccgaaaggccctgggcaccgtaaatcgcgcaacggagaagagcgtgaaaaccaagggccctctgaaacagaagcagccttccttttccgccaaaaaaatgactgagaaaaccgtcaaggccaagtcaagtgttcccgctagcgacgacgcctaccctgaaatcgagaaattcttcccctttaacccactggatttcgaaagtttcgatctaccagaagagcatcagattgctcacctgccactgtccggtgtccccctgatgatactcgatgaggagcgggaactggagaagctatttcagttggggcctccatctcctgtcaagatgccaagccccccttgggaaagcaacctgttgcagtctccttccagcattctgtccacattggatgtggagcttccccctgtctgctgtgacatcgacatctag

SEQ ID NO: 101080 - DNA, 609 bp, Artificial Sequence
  derived and/or modified sequence
atggctaccctgatctacgtcgataaggaaaatggagagcctggcaccagagtagtggccaaagacggacttaagctcggcagtggaccctcaataaaagccctggacggcagaagtcaggtctcgactccgcgtttcgggaagactttcgatgcaccaccagcactgccgaaggcaaccagaaaggccctgggaactgtgaaccgagcgaccgaaaaaagcgtaaagactaaggggcctctgaaacagaagcaaccctccttttctgcaaagaaaatgaccgagaagacggtcaaggctaagtcaagtgtccctgccagtgacgatgcgtatcctgaaattgagaaattcttcccctttaatcccctcgattttgaaagctttgatcttcccgaggaacaccagattgcccatttacccctgagcggagtgcccctgatgattttagatgaggagcgagaactcgaaaaactctttcagctgggtcccccatctcctgtcaaaatgccctctcccccttgggaatcaaaccttttgcagtctccctcatctatcctaagcacactggacgtggagctgccccctgtttgttgtgatattgacatatag

SEQ ID NO: 101081 - DNA, 609 bp, Artificial Sequence
  derived and/or modified sequence
atggccaccctgatctacgtggacaaggagaacggcgagcccggcaccagagtggtggccaaggacggcctgaagctgggcagcggccccagcatcaaggccctggacggcagaagccaggtgagcacccccagattcggcaagaccttcgacgccccccccgccctgcccaaggccaccagaaaggccctgggcaccgtgaacagagccaccgagaagagcgtgaagaccaagggccccctgaagcagaagcagcccagcttcagcgccaagaagatgaccgagaagaccgtgaaggccaagagcagcgtgcccgccagcgacgacgcctaccccgagatcgagaagttcttccccttcaaccccctggacttcgagagcttcgacctgcccgaggagcaccagatcgcccacctgcccctgagcggcgtgcccctgatgatcctggacgaggagagagagctggagaagctgttccagctgggcccccccagccccgtgaagatgcccagccccccctgggagagcaacctgctgcagagccccagcagcatcctgagcaccctggacgtggagctgccccccgtgtgctgcgacatcgacatctag

SEQ ID NO: 101082 - protein, 414 aa, Artificial Sequence
  derived and/or modified sequence
MSKKISGGSVVEMQGDEMTRIIWELIKEKLIFPYVELDLHSYDLGIENRDATNDQVTKDAAEAIKKHNVGVKCATITPDEKRVEEFKLKQMWKSPNGTIRNILGGTVFREAIICKNIPRLVSGWVKPIIIGRHAYGDQYRATDFVVPGPGKVEITYTPSDGTQKVTYLVHNFEEGGGVAMGMYNQDKSIEDFAHSSFQMALSKGWPLYLSTKNTILKKYDGRFKDIFQEIYDKQYKSQFEAQKIWYEHRLIDDMVAQAMKSEGGFIWACKNYDGDVQSDSVAQGYGSLGMMTSVLVCPDGKTVEAEAAHGTVTRHYRMYQKGQETSTNPIASIFAWTRGLAHRAKLDNNKELAFFANALEEVSIETIEAGFMTKDLAACIKGLPNVQRSDYLNTFEFMDKLGENLKIKLAQAKL

SEQ ID NO: 101083 - protein, 157 aa, Artificial Sequence
  derived and/or modified sequence
MSKKISGGSVVEMQGDEMTRIIWELIKEKLIFPYVELDLHSYDLGIENRDATNDQVTKDAAEAIKKHNVGVKCATITPDEKRVEEFKLKQMWKSPNGTIRNILGGTVFREAIICKNIPRLVSGWVKPIIIGRHAYGDQYRATDFVVPGPGKVEITYT

SEQ ID NO: 101084 - protein, 74 aa, Artificial Sequence
  derived and/or modified sequence
MSKKISGGSVVEMQGDEMTRIIWELIKEKLIFPYVELDLHSYDLGIENRDATNDQVTKDAAEAIKKHNVGVKCA

SEQ ID NO: 101085 - protein, 62 aa, Artificial Sequence
  derived and/or modified sequence
MSKKISGGSVVEMQGDEMTRIIWELIKEKLIFPYVELDLHSYDLGIENRDATNDQVTKDAAE

SEQ ID NO: 101086 - DNA, 1245 bp, Artificial Sequence
  derived and/or modified sequence
atgagcaagaagatcagcggcggcagcgtggtggagatgcagggcgacgagatgaccagaatcatctgggagctgatcaaggagaagctgatcttcccctacgtggagctggacctgcacagctacgacctgggcatcgagaacagagacgccaccaacgaccaggtgaccaaggacgccgccgaggccatcaagaagcacaacgtgggcgtgaagtgcgccaccatcacccccgacgagaagagagtggaggagttcaagctgaagcagatgtggaagagccccaacggcaccatcagaaacatcctgggcggcaccgtgttcagagaggccatcatctgcaagaacatccccagactggtgagcggctgggtgaagcccatcatcatcggcagacacgcctacggcgaccagtacagagccaccgacttcgtggtgcccggccccggcaaggtggagatcacctacacccccagcgacggcacccagaaggtgacctacctggtgcacaacttcgaggagggcggcggcgtggccatgggcatgtacaaccaggacaagagcatcgaggacttcgcccacagcagcttccagatggccctgagcaagggctggcccctgtacctgagcaccaagaacaccatcctgaagaagtacgacggcagattcaaggacatcttccaggagatctacgacaagcagtacaagagccagttcgaggcccagaagatctggtacgagcacagactgatcgacgacatggtggcccaggccatgaagagcgagggcggcttcatctgggcctgcaagaactacgacggcgacgtgcagagcgacagcgtggcccagggctacggcagcctgggcatgatgaccagcgtgctggtgtgccccgacggcaagaccgtggaggccgaggccgcccacggcaccgtgaccagacactacagaatgtaccagaagggccaggagaccagcaccaaccccatcgccagcatcttcgcctggaccagaggcctggcccacagagccaagctggacaacaacaaggagctggccttcttcgccaacgccctggaggaggtgagcatcgagaccatcgaggccggcttcatgaccaaggacctggccgcctgcatcaagggcctgcccaacgtgcagagaagcgactacctgaacaccttcgagttcatggacaagctgggcgagaacctgaagatcaagctggcccaggccaagctgtag

SEQ ID NO: 101087 - DNA, 474 bp, Artificial Sequence
  derived and/or modified sequence
atgagcaagaagatcagcggcggcagcgtggtggagatgcagggcgacgagatgaccagaatcatctgggagctgatcaaggagaagctgatcttcccctacgtggagctggacctgcacagctacgacctgggcatcgagaacagagacgccaccaacgaccaggtgaccaaggacgccgccgaggccatcaagaagcacaacgtgggcgtgaagtgcgccaccatcacccccgacgagaagagagtggaggagttcaagctgaagcagatgtggaagagccccaacggcaccatcagaaacatcctgggcggcaccgtgttcagagaggccatcatctgcaagaacatccccagactggtgagcggctgggtgaagcccatcatcatcggcagacacgcctacggcgaccagtacagagccaccgacttcgtggtgcccggccccggcaaggtggagatcacctacacctag

SEQ ID NO: 101088 - DNA, 225 bp, Artificial Sequence
  derived and/or modified sequence
atgagcaagaagatcagcggcggcagcgtggtggagatgcagggcgacgagatgaccagaatcatctgggagctgatcaaggagaagctgatcttcccctacgtggagctggacctgcacagctacgacctgggcatcgagaacagagacgccaccaacgaccaggtgaccaaggacgccgccgaggccatcaagaagcacaacgtgggcgtgaagtgcgcctag

SEQ ID NO: 101089 - DNA, 189 bp, Artificial Sequence
  derived and/or modified sequence
atgagcaagaagatcagcggcggcagcgtggtggagatgcagggcgacgagatgaccagaatcatctgggagctgatcaaggagaagctgatcttcccctacgtggagctggacctgcacagctacgacctgggcatcgagaacagagacgccaccaacgaccaggtgaccaaggacgccgccgagtag

SEQ ID NO: 101090 - DNA, 1245 bp, Artificial Sequence
  derived and/or modified sequence
atgtcaaaaaagatctccggggggtcagtggtcgagatgcagggtgatgaaatgacacgtatcatctgggagctcataaaggagaagttgattttcccctacgttgagctggatttgcactcctacgacttaggcatcgaaaaccgggacgccactaacgaccaggtgacaaaggatgcggccgaagccatcaaaaagcacaatgtgggcgtcaaatgcgccaccattacaccggacgaaaagcgggtggaggagttcaagctaaagcagatgtggaagagccctaatggcacaattcggaacatcctgggaggcacggtgtttcgggaggccatcatctgcaagaatatcccacgcttggtttccggctgggtgaagcctattattataggtcgtcacgcttacggtgaccagtaccgggcgaccgatttcgtggtgccagggcccgggaaggtcgagatcacctacacccccagtgacgggacccagaaagtcacctatctcgtgcataacttcgaggaaggagggggagtggctatgggcatgtataatcaggacaagtctatcgaggattttgcgcactcatcattccaaatggcgctgagcaaaggttggccgctgtacctgtctaccaagaatacaatactgaaaaaatacgacgggcggttcaaggacatctttcaggagatttacgataagcaatacaagtctcagttcgaagcccagaaaatttggtatgagcaccgcctcatcgacgatatggttgcccaggcaatgaagtcagaggggggattcatttgggcctgcaagaattatgacggtgacgtacaaagcgattccgtcgctcaggggtacggctccctcggtatgatgactagcgtcctcgtttgcccggacggcaagacagtggaggcagaggcggcccatgggacagtgactcggcactaccggatgtatcagaagggccaggagacttctactaatccaattgcaagtattttcgcatggacacgcggactggcccaccgcgccaagctggacaataataaggaactcgccttcttcgctaatgctcttgaggaagtctctatagagaccatcgaggcaggtttcatgaccaaagacttggccgcttgtatcaaggggttgcctaacgtacagaggtctgactatttgaatacgttcgagttcatggataaacttggcgagaatctcaagattaagctggctcaagccaagttgtag

SEQ ID NO: 101091 - DNA, 474 bp, Artificial Sequence
  derived and/or modified sequence
atgtctaaaaagattagcggtggcagtgtggtcgaaatgcaaggcgacgaaatgacacgcatcatttgggaactgatcaaagagaaactcatcttcccctacgtggaactcgacctgcactcctatgatctcggcatagagaaccgcgacgctactaatgatcaagttaccaaggatgctgccgaagctattaagaagcacaatgtgggggttaaatgtgccaccatcacccctgatgaaaagcgggtggaggaattcaaactcaagcagatgtggaagagtccgaacggcactatcagaaatatcctgggaggaacagtctttagagaggcgattatatgcaaaaatattcctaggctcgtatctggttgggtgaagccgattattatcggccgccacgcctacggagaccagtatcgcgcaactgatttcgtggtacccggacctggaaaggttgagataacttatacatag

SEQ ID NO: 101092 - DNA, 1245 bp, Artificial Sequence
  derived and/or modified sequence
atgtcaaaaaaaatctctgggggaagcgtcgtggagatgcaaggggatgaaatgaccaggatcatctgggagctgataaaagagaaattaatctttccatacgttgagcttgacttgcactcatacgacttgggcattgagaatcgggacgcaacaaatgatcaggtaaccaaggatgccgccgaggctataaaaaagcacaatgtcggtgtgaaatgtgccacgatcacccccgacgaaaagagagtggaggaatttaagctgaagcaaatgtggaaaagccctaatgggactatccgcaatatcctgggcgggaccgtgtttcgagaggctattatttgcaagaacattcccagactagtgtctgggtgggtgaaacctatcattataggccggcacgcttacggcgatcagtatcgggcaacagacttcgtggtgccagggcccgggaaagttgagatcacctatacaccctcagatggtacacaaaaggtcacatatctcgtgcacaatttcgaggaggggggcggtgtcgccatgggcatgtacaaccaagacaagagcattgaagatttcgcccacagcagtttccagatggcactgagcaagggctggcccctctatctctctactaaaaatacgatcctcaagaaatatgacgggagattcaaagatattttccaggagatttacgacaaacagtataaaagccagtttgaggctcagaagatttggtatgagcaccggctcatagacgatatggtggcccaggctatgaagtctgaaggggggttcatctgggcatgtaagaattacgacggagacgtgcagtctgactccgttgctcagggctatgggagtcttggcatgatgacatctgtgttagtgtgtccagatggcaagacagtggaggccgaggccgcccatggtactgtgacgcgccactaccggatgtaccagaagggtcaggagacgtcaactaatcccatcgcgtcaatttttgcgtggaccagagggcttgcccacagggcgaaattggataacaataaagaattggcctttttcgccaatgctcttgaggaggtgtcgatcgagacgattgaggctggattcatgacgaaggacctcgctgcatgtatcaaagggttgcccaatgtccaaagaagcgattacctaaacacgttcgaattcatggacaaactgggcgagaacctgaaaattaagcttgctcaggctaaactatag

SEQ ID NO: 101093 - DNA, 225 bp, Artificial Sequence
  derived and/or modified sequence
atgtctaagaaaatatcaggggggagtgtggtcgagatgcagggagatgaaatgactagaattatttgggagctaatcaaggagaaacttatcttcccatacgtggagctcgacctccacagttacgatctgggcatcgagaatcgggacgcaacgaacgaccaggttacgaaggacgcagcagaggcaatcaagaagcacaacgtgggcgtgaaatgcgcatag

SEQ ID NO: 101094 - DNA, 1245 bp, Artificial Sequence
  derived and/or modified sequence
atgtctaagaagatatcaggcggcagtgtggtcgagatgcagggggatgagatgactcgtattatctgggagttgataaaggaaaaactaatcttcccctacgtggagttggacctgcatagttacgacctcggtattgagaatcgggacgccacaaacgaccaggtgactaaggacgccgccgaagccatcaaaaaacataatgtaggcgtaaagtgcgcaaccattacacctgatgagaaacgagttgaagagttcaaactgaagcagatgtggaaatcccccaatggcacaatcagaaacatcctgggcggaacggtgttcagggaagccatcatttgcaaaaacatccctcggctggtatctggatgggtgaagcctatcatcataggtcgtcatgcatatggcgatcagtaccgggccacggacttcgtggtgccagggcccggcaaggttgagattacatacacaccgtccgacggcacccagaaagtgacctatctcgtccacaactttgaggaaggcggaggtgtcgccatggggatgtataatcaggataagagcatcgaagactttgctcattcaagttttcagatggcactctctaagggctggcccctgtatcttagtacaaagaatacgatcctaaaaaagtacgacgggcggtttaaagatatcttccaggagatttacgacaaacagtataaatctcagttcgaggcccagaagatctggtacgagcataggttaatcgacgacatggttgctcaggcgatgaaatccgaggggggatttatttgggcatgcaagaactatgatggggatgtgcagtcagacagcgtggcccagggctatggctcactggggatgatgacctcagtgctggtctgccctgacggcaagaccgttgaagccgaggctgcacatggtaccgttacaagacactatagaatgtatcaaaaaggccaagagacaagtaccaatccaatcgcttctatatttgcctggacccgcggtctcgcccaccgtgctaaattagataacaacaaagagttagcattttttgctaacgcactggaagaggtctccatcgagaccatcgaggccgggttcatgacaaaggacttggcggcgtgtatcaaagggctgccaaacgtgcaacgcagtgactatctgaacaccttcgagtttatggacaaactgggggagaacctcaagatcaagctggcccaggctaaactgtag

SEQ ID NO: 101095 - DNA, 189 bp, Artificial Sequence
  derived and/or modified sequence
atgtcaaaaaagatctcaggtggatccgtggtggaaatgcagggagacgagatgacaaggataatctgggagttaataaaagaaaaacttatttttccatacgtggaattggacctccactcctacgacctggggattgagaatcgcgacgcgacaaacgaccaagtcaccaaggacgccgccgagtag

SEQ ID NO: 101096 - DNA, 1245 bp, Artificial Sequence
  derived and/or modified sequence
atgagcaagaagatcagcggcggctctgtggtggagatgcagggagatgagatgacccgcatcatctgggagctgatcaaggagaagctgatcttcccctacgtggagctggacctgcacagctatgacctgggcattgaaaatagagatgccaccaatgaccaggtgaccaaggatgctgctgaggccatcaagaagcacaacgtgggcgtgaagtgtgccaccatcaccccagatgagaagagggtggaggagttcaagctgaagcagatgtggaagagccccaacggcaccatccggaacatcctgggcggcaccgtcttccgggaggccatcatctgcaagaacatcccccggctggtgtctggctgggtgaagcccatcatcatcggcagacatgcctatggagaccagtaccgggccacagactttgtggtgcccggccctgggaaggtggagatcacctacacccccagtgatggcacccagaaggtgacctacctggtgcacaactttgaggagggcggcggcgtggccatgggcatgtacaaccaggacaagagcattgaggactttgcccacagcagcttccagatggccctgagcaagggctggcccctgtacctgagcaccaagaacaccatcctgaagaagtatgatggccgcttcaaggacatcttccaggagatctatgacaagcagtacaagagccagtttgaggcccagaagatctggtatgagcaccggctgattgatgacatggtggcccaggccatgaagtctgagggcggcttcatctgggcctgcaagaactatgatggagatgtgcagagcgacagcgtggcccagggctacggcagcctgggcatgatgacctctgtgctggtgtgcccagatggcaagacagtggaggccgaggccgcccatggaacagtgaccaggcactacaggatgtaccagaagggccaggagaccagcaccaaccccatcgccagcatctttgcctggacccggggcctggcccaccgggccaagctggacaacaacaaggagctggccttctttgccaatgccctggaggaggtgtccattgagaccattgaagctggcttcatgaccaaggacctggccgcctgcatcaagggcctgcccaacgtgcagaggagtgactacctgaacacctttgagttcatggacaagctgggggagaacctgaagatcaagctggcccaggccaagctgtag

SEQ ID NO: 101097 - DNA, 474 bp, Artificial Sequence
  derived and/or modified sequence
atgagcaagaagatcagcggcggctctgtggtggagatgcagggagatgagatgacccgcatcatctgggagctgatcaaggagaagctgatcttcccctacgtggagctggacctgcacagctatgacctgggcattgaaaatagagatgccaccaatgaccaggtgaccaaggatgctgctgaggccatcaagaagcacaacgtgggcgtgaagtgtgccaccatcaccccagatgagaagagggtggaggagttcaagctgaagcagatgtggaagagccccaacggcaccatccggaacatcctgggcggcaccgtcttccgggaggccatcatctgcaagaacatcccccggctggtgtctggctgggtgaagcccatcatcatcggcagacatgcctatggagaccagtaccgggccacagactttgtggtgcccggccctgggaaggtggagatcacctacacctag

SEQ ID NO: 101098 - DNA, 225 bp, Artificial Sequence
  derived and/or modified sequence
atgagcaagaagatcagcggcggctctgtggtggagatgcagggagatgagatgacccgcatcatctgggagctgatcaaggagaagctgatcttcccctacgtggagctggacctgcacagctatgacctgggcattgaaaatagagatgccaccaatgaccaggtgaccaaggatgctgctgaggccatcaagaagcacaacgtgggcgtgaagtgtgcctag

SEQ ID NO: 101099 - DNA, 189 bp, Artificial Sequence
  derived and/or modified sequence
atgagcaagaagatcagcggcggctctgtggtggagatgcagggagatgagatgacccgcatcatctgggagctgatcaaggagaagctgatcttcccctacgtggagctggacctgcacagctatgacctgggcattgaaaatagagatgccaccaatgaccaggtgaccaaggatgctgctgagtag

SEQ ID NO: 101100 - DNA, 2382 bp, Artificial Sequence
  derived and/or modified sequence
ggcggggcctgggaggggacaaagccgggaagaggaaaagctcggacctaccctgtggtcccgggtttctgcagagtctacttcagaagcggaggcactgggagtccggtttgggattgccaggctgtggttgtgagtctgagcttgtgagcggctgtggcgccccaactcttcgccagcatatcatcccggcaggcgataaactacattcagttgagtctgcaagactgggaggaactggggtgataagaaatctattcactgtcaaggtttattgaagtcaaaatgtccaaaaaaatcagtggcggttctgtggtagagatgcaaggagatgaaatgacacgaatcatttgggaattgattaaagagaaactcatttttccctacgtggaattggatctacatagctatgatttaggcatagagaatcgtgatgccaccaacgaccaagtcaccaaggatgctgcagaagctataaagaagcataatgttggcgtcaaatgtgccactatcactcctgatgagaagagggttgaggagttcaagttgaaacaaatgtggaaatcaccaaatggcaccatacgaaatattctgggtggcacggtcttcagagaagccattatctgcaaaaatatcccccggcttgtgagtggatgggtaaaacctatcatcataggtcgtcatgcttatggggatcaatacagagcaactgattttgttgttcctgggcctggaaaagtagagataacctacacaccaagtgacggaacccaaaaggtgacatacctggtacataactttgaagaaggtggtggtgttgccatggggatgtataatcaagataagtcaattgaagattttgcacacagttccttccaaatggctctgtctaagggttggcctttgtatctgagcaccaaaaacactattctgaagaaatatgatgggcgttttaaagacatctttcaggagatatatgacaagcagtacaagtcccagtttgaagctcaaaagatctggtatgagcataggctcatcgacgacatggtggcccaagctatgaaatcagagggaggcttcatctgggcctgtaaaaactatgatggtgacgtgcagtcggactctgtggcccaagggtatggctctctcggcatgatgaccagcgtgctggtttgtccagatggcaagacagtagaagcagaggctgcccacgggactgtaacccgtcactaccgcatgtaccagaaaggacaggagacgtccaccaatcccattgcttccatttttgcctggaccagagggttagcccacagagcaaagcttgataacaataaagagcttgccttctttgcaaatgctttggaagaagtctctattgagacaattgaggctggcttcatgaccaaggacttggctgcttgcattaaaggtttacccaatgtgcaacgttctgactacttgaatacatttgagttcatggataaacttggagaaaacttgaagatcaaactagctcaggccaaactttaagttcatacctgagctaagaaggataattgtcttttggtaactaggtctacaggtttacatttttctgtgttacactcaaggataaaggcaaaatcaattttgtaatttgtttagaagccagagtttatcttttctataagtttacagcctttttcttatatatacagttattgccacctttgtgaacatggcaagggacttttttacaatttttattttattttctagtaccagcctaggaattcggttagtactcatttgtattcactgtcactttttctcatgttctaattataaatgaccaaaatcaagattgctcaaaagggtaaatgatagccacagtattgctccctaaaatatgcataaagtagaaattcactgccttcccctcctgtccatgaccttgggcacagggaagttctggtgtcatagatatcccgttttgtgaggtagagctgtgcattaaacttgcacatgactggaacgaagtaggagtgcaactcaaatgtgttgaagatactgcagtcatttttgtaaagaccttgctgaatgtttccaatagactaaatactgtttaggccgcaggagagtttggaatccggaataaatactacctggaggtttgtcctctccatttttctctttctcctcctggcctggcctgaatattatactactctaaatagcatatttcatccaagtgcaataatgtaagctgaatcttttttggacttctgctggcctgttttatttcttttatataaatgtgatttctcagaaattgatattaaacactatcttatcttctcctgaactgttgattttaattaaaattaagtgctaattaccatt

SEQ ID NO: 101101 - DNA, 942 bp, Artificial Sequence
  derived and/or modified sequence
ccagcaccagcgaggggaggggaggggaggggcgggcgtggagacctggaaggaggtaccgatccagccttgattgcagccctcttgcacaacggccataaggacgggtgcaggccaagagcaaggacatgcaaaccccaagacctgctaacgggcggcgaagcgggggcacgccctcgcacacgcagagataaattgtgctcccatgacctttatttggaaagtgcctgcgggcctaaaattggcctttgtcccaccgagtacactcagcactgtactttaaaccggataaactgggctgtctggcaggtactaaaaacagctaaattctcctgtgagtgttctgtatgttaacacttttattccttgttttgttttaggcgataaactacattcagttgagtctgcaagactgggaggaactggggtgataagaaatctattcactgtcaaggtttattgaagtcaaaatgtccaaaaaaatcagtggcggttctgtggtagagatgcaaggagatgaaatgacacgaatcatttgggaattgattaaagagaaactcatttttccctacgtggaattggatctacatagctatgatttaggcatagagaatcgtgatgccaccaacgaccaagtcaccaaggatgctgcagaagctataaagaagcataatgttggcgtcaaatgtgccactatcactcctgatgagaagagggttgaggagttcaagttgaaacaaatgtggaaatcaccaaatggcaccatacgaaatattctgggtggcacggtcttcagagaagccattatctgcaaaaatatcccccggcttgtgagtggatgggtaaaacctatcatcataggtcgtcatgcttatggggatcaatacagagcaactgattttgttgttcctgggcctggaaaagtagagataacctacacac

SEQ ID NO: 101102 - DNA, 2441 bp, Artificial Sequence
  derived and/or modified sequence
aggggaggggaggggcgggcgtggagacctggaaggaggtaccgatccagccttgattgcagccctcttgcacaacggccataaggacgggtgcaggccaagagcaaggacatgcaaaccccaagacctgctaacgggcggcgaagcgggggcacgccctcgcacacgcagagataaattgtgctcccatgacctttatttggaaagtgcctgcgggcctaaaattggcctttgtcccaccgagtacactcagcactgtactttaaaccggataaactgggctgtctggcaggcgataaactacattcagttgagtctgcaagactgggaggaactggggtgataagaaatctattcactgtcaaggtttattgaagtcaaaatgtccaaaaaaatcagtggcggttctgtggtagagatgcaaggagatgaaatgacacgaatcatttgggaattgattaaagagaaactcatttttccctacgtggaattggatctacatagctatgatttaggcatagagaatcgtgatgccaccaacgaccaagtcaccaaggatgctgcagaagctataaagaagcataatgttggcgtcaaatgtgccactatcactcctgatgagaagagggttgaggagttcaagttgaaacaaatgtggaaatcaccaaatggcaccatacgaaatattctgggtggcacggtcttcagagaagccattatctgcaaaaatatcccccggcttgtgagtggatgggtaaaacctatcatcataggtcgtcatgcttatggggatcaatacagagcaactgattttgttgttcctgggcctggaaaagtagagataacctacacaccaagtgacggaacccaaaaggtgacatacctggtacataactttgaagaaggtggtggtgttgccatggggatgtataatcaagataagtcaattgaagattttgcacacagttccttccaaatggctctgtctaagggttggcctttgtatctgagcaccaaaaacactattctgaagaaatatgatgggcgttttaaagacatctttcaggagatatatgacaagcagtacaagtcccagtttgaagctcaaaagatctggtatgagcataggctcatcgacgacatggtggcccaagctatgaaatcagagggaggcttcatctgggcctgtaaaaactatgatggtgacgtgcagtcggactctgtggcccaagggtatggctctctcggcatgatgaccagcgtgctggtttgtccagatggcaagacagtagaagcagaggctgcccacgggactgtaacccgtcactaccgcatgtaccagaaaggacaggagacgtccaccaatcccattgcttccatttttgcctggaccagagggttagcccacagagcaaagcttgataacaataaagagcttgccttctttgcaaatgctttggaagaagtctctattgagacaattgaggctggcttcatgaccaaggacttggctgcttgcattaaaggtttacccaatgtgcaacgttctgactacttgaatacatttgagttcatggataaacttggagaaaacttgaagatcaaactagctcaggccaaactttaagttcatacctgagctaagaaggataattgtcttttggtaactaggtctacaggtttacatttttctgtgttacactcaaggataaaggcaaaatcaattttgtaatttgtttagaagccagagtttatcttttctataagtttacagcctttttcttatatatacagttattgccacctttgtgaacatggcaagggacttttttacaatttttattttattttctagtaccagcctaggaattcggttagtactcatttgtattcactgtcactttttctcatgttctaattataaatgaccaaaatcaagattgctcaaaagggtaaatgatagccacagtattgctccctaaaatatgcataaagtagaaattcactgccttcccctcctgtccatgaccttgggcacagggaagttctggtgtcatagatatcccgttttgtgaggtagagctgtgcattaaacttgcacatgactggaacgaagtaggagtgcaactcaaatgtgttgaagatactgcagtcatttttgtaaagaccttgctgaatgtttccaatagactaaatactgtttaggccgcaggagagtttggaatccggaataaatactacctggaggtttgtcctctccatttttctctttctcctcctggcctggcctgaatattatactactctaaatagcatatttcatccaagtgcaataatgtaagctgaatcttttttggacttctgctggcctgttttatttcttttatataaatgtgatttctcagaaattgatattaaacactatcttatcttctcctgaa

SEQ ID NO: 101103 - DNA, 702 bp, Artificial Sequence
  derived and/or modified sequence
cttgagcccaggaagtcaaggctgcagtgagcggtgatcgctccactgcactccagccagggcaacagagcaaggccctgtcttaaaaaagaaaataataagaatcccattcattatcttctaatgcaaacaatcaatggagtttctaaagacctagacataggtggtgtcaggacctgcttctgtaacttttccatcctttgcattaggcagcgcggaaccccctaggcgaccccgcgctggccgggagcactctttcttcagccaaagagtctacttcagaagcggaggcactgggagtccggtttgggattgccaggctgtggttgtgagtctgagcttgtgagcggctgtggcgccccaactcttcgccagcatatcatcccggcaggcgataaactacattcagttgagtctgcaagactgggaggaactggggtgataagaaatctattcactgtcaaggtttattgaagtcaaaatgtccaaaaaaatcagtggcggttctgtggtagagatgcaaggagatgaaatgacacgaatcatttgggaattgattaaagagaaactcatttttccctacgtggaattggatctacatagctatgatttaggcatagagaatcgtgatgccaccaacgaccaagtcaccaaggatgctgcagaagctataaagaagcataatgttggcgtcaaatgtgc

SEQ ID NO: 101104 - DNA, 2298 bp, Artificial Sequence
  derived and/or modified sequence
agggggcgtggaggggcggagctccagcggccttcagaggggtcgctaggccacacggggcgagagggggctgggggaaacacccccgccagttccgggtgcctggagtttaaaaggcgataaactacattcagttgagtctgcaagactgggaggaactggggtgataagaaatctattcactgtcaaggtttattgaagtcaaaatgtccaaaaaaatcagtggcggttctgtggtagagatgcaaggagatgaaatgacacgaatcatttgggaattgattaaagagaaactcatttttccctacgtggaattggatctacatagctatgatttaggcatagagaatcgtgatgccaccaacgaccaagtcaccaaggatgctgcagaagctataaagaagcataatgttggcgtcaaatgtgccactatcactcctgatgagaagagggttgaggagttcaagttgaaacaaatgtggaaatcaccaaatggcaccatacgaaatattctgggtggcacggtcttcagagaagccattatctgcaaaaatatcccccggcttgtgagtggatgggtaaaacctatcatcataggtcgtcatgcttatggggatcaatacagagcaactgattttgttgttcctgggcctggaaaagtagagataacctacacaccaagtgacggaacccaaaaggtgacatacctggtacataactttgaagaaggtggtggtgttgccatggggatgtataatcaagataagtcaattgaagattttgcacacagttccttccaaatggctctgtctaagggttggcctttgtatctgagcaccaaaaacactattctgaagaaatatgatgggcgttttaaagacatctttcaggagatatatgacaagcagtacaagtcccagtttgaagctcaaaagatctggtatgagcataggctcatcgacgacatggtggcccaagctatgaaatcagagggaggcttcatctgggcctgtaaaaactatgatggtgacgtgcagtcggactctgtggcccaagggtatggctctctcggcatgatgaccagcgtgctggtttgtccagatggcaagacagtagaagcagaggctgcccacgggactgtaacccgtcactaccgcatgtaccagaaaggacaggagacgtccaccaatcccattgcttccatttttgcctggaccagagggttagcccacagagcaaagcttgataacaataaagagcttgccttctttgcaaatgctttggaagaagtctctattgagacaattgaggctggcttcatgaccaaggacttggctgcttgcattaaaggtttacccaatgtgcaacgttctgactacttgaatacatttgagttcatggataaacttggagaaaacttgaagatcaaactagctcaggccaaactttaagttcatacctgagctaagaaggataattgtcttttggtaactaggtctacaggtttacatttttctgtgttacactcaaggataaaggcaaaatcaattttgtaatttgtttagaagccagagtttatcttttctataagtttacagcctttttcttatatatacagttattgccacctttgtgaacatggcaagggacttttttacaatttttattttattttctagtaccagcctaggaattcggttagtactcatttgtattcactgtcactttttctcatgttctaattataaatgaccaaaatcaagattgctcaaaagggtaaatgatagccacagtattgctccctaaaatatgcataaagtagaaattcactgccttcccctcctgtccatgaccttgggcacagggaagttctggtgtcatagatatcccgttttgtgaggtagagctgtgcattaaacttgcacatgactggaacgaagtaggagtgcaactcaaatgtgttgaagatactgcagtcatttttgtaaagaccttgctgaatgtttccaatagactaaatactgtttaggccgcaggagagtttggaatccggaataaatactacctggaggtttgtcctctccatttttctctttctcctcctggcctggcctgaatattatactactctaaatagcatatttcatccaagtgcaataatgtaagctgaatcttttttggacttctgctggcctgttttatttcttttatataaatgtgatttctcagaaattgatattaaacactatcttatcttctcctgaactgttgattttaattaaaattaagtgctaatta

SEQ ID NO: 101105 - DNA, 563 bp, Artificial Sequence
  derived and/or modified sequence
aagaagccagggggactgcgcgcgtgagcgtcacgcatgcggggtcaacggatgggtgcttggtgctctgggcactgcaggggtgctggctggactgcggttaccgcagcgcggaaccccctaggcgaccccgcgctggccgggagcactctttcttcagccaaagagtctacttcagaagcggaggcactgggagtccggtttgggattgccaggctgtggttgtgagtctgagcttgtgagcggctgtggcgccccaactcttcgccagcatatcatcccggcaggcgataaactacattcagttgagtctgcaagactgggaggaactggggtgataagaaatctattcactgtcaaggtttattgaagtcaaaatgtccaaaaaaatcagtggcggttctgtggtagagatgcaaggagatgaaatgacacgaatcatttgggaattgattaaagagaaactcatttttccctacgtggaattggatctacatagctatgatttaggcatagagaatcgtgatgccaccaacgaccaagtcaccaaggatgctgcagaa

SEQ ID NO: 101106 - DNA, 1245 bp, Artificial Sequence
  derived and/or modified sequence
atgagcaagaagatcagcggcggcagcgtggtggagatgcagggcgacgagatgaccagaattatctgggaacttatcaaagagaaactcatattcccttacgtagagcttgacttacacagctatgacttgggaattgagaatcgtgatgccacaaatgaccaagtgacaaaagacgccgcggaggcaataaaaaagcacaacgtgggagtcaagtgtgccacgatcactcccgacgaaaagagggtagaggagttcaaacttaaacaaatgtggaagagcccaaatggaacaataagaaacatccttggcggtacagttttccgcgaggcgataatctgtaaaaacatcccgaggcttgtttctggatgggtgaagcctatcattatagggagacatgcgtatggtgatcagtacagagcaacagacttcgtggtaccagggccgggcaaggttgaaataacctatacaccctcagatggtacccaaaaagtgacatatcttgtgcacaatttcgaagagggcggcggtgtggctatgggcatgtacaaccaggataagtctatcgaggactttgcccacagctctttccagatggctctctctaaagggtggcctctgtacctgtcaaccaagaacacgatactgaagaagtacgacggcagatttaaagatatcttccaagaaatctacgacaagcagtataagagccagtttgaggcacaaaagatttggtacgaacatcggttaatcgacgacatggtggcacaggccatgaaaagcgagggaggattcatttgggcctgcaaaaattacgacggagacgtgcagagcgatagcgttgctcagggctacggctcgctgggaatgatgacatccgtcttggtttgtcccgacggcaaaacggtagaggcagaagctgcccatggtaccgtgacacggcattaccggatgtaccagaagggacaggaaactagcactaacccaattgcctctatctttgcttggacaaggggactggcacatcgggccaagctagataacaataaggaactggcgttttttgcaaatgcactggaggaggtttcaattgagacgattgaggccgggtttatgactaaggacttagcagcctgtatcaaaggtctgcctaatgtacagaggtccgactacctgaatacattcgaattcatggacaagctcggggagaatctcaaaatcaaactggcccaggctaagctgtag

SEQ ID NO: 101107 - DNA, 474 bp, Artificial Sequence
  derived and/or modified sequence
atgagcaagaagatcagcggcggcagcgtggtggagatgcagggcgacgagatgacacgcataatctgggagttaataaaggaaaagctgattttcccttatgtggaactcgacctgcacagctacgatttgggaatcgagaatcgagatgcaaccaatgatcaagtgaccaaggacgcggcagaagcaatcaaaaaacacaacgttggggtgaagtgtgctaccataacaccggacgagaagagggtggaggagttcaagttgaaacaaatgtggaagagccccaacggcaccatccgcaacattcttggcggtaccgtgtttcgtgaggccattatttgtaagaatatccctaggctggtctccggatgggttaagcccataattatcggccgtcacgcctacggtgatcagtacagggcaactgactttgtggtgccaggtccgggaaaggttgagattacctatacttag

SEQ ID NO: 101108 - DNA, 1245 bp, Artificial Sequence
  derived and/or modified sequence
atgagcaagaagatcagcggcggcagcgtggtggagatgcagggcgacgagatgacaaggattatttgggagttaattaaagaaaaactgatatttccgtacgttgaactagacctacactcatatgacctgggcattgagaatcgcgacgcgaccaacgaccaggtaaccaaggacgcagctgaggctattaagaaacacaacgtcggcgtgaagtgcgccactattactcctgacgagaaacgggtagaggagtttaaactgaagcaaatgtggaagtctccaaacgggaccatcagaaatattctggggggaacggtgttccgggaagccatcatttgtaaaaacatcccaagattggtgagtggatgggtgaaacctatcatcattggtcgacacgcctatggcgatcaatatagagcaacagattttgttgttccaggcccaggcaaggttgaaatcacatacacgccaagcgacgggacgcagaaagtcacttacctcgtgcataactttgaggagggagggggggttgctatgggcatgtataaccaggataagtctatcgaagacttcgcccacagtagcttccagatggccctctcaaagggatggccattgtaccttagtactaagaacaccatcctcaaaaagtatgacgggcgttttaaggatattttccaggaaatttacgacaagcaatacaagtcccagtttgaggcgcagaagatctggtatgagcatcgtctgattgatgatatggtcgcccaagccatgaaatctgagggcggatttatatgggcatgtaagaactatgacggcgatgtgcagtctgatagcgtggctcaagggtatggatccctgggcatgatgaccagtgtgctcgtatgcccagacggaaagaccgtcgaagcagaagccgctcacgggaccgtcacgaggcattacaggatgtaccagaaagggcaggaaacttctaccaaccctatagcaagtattttcgcttggacacgcggactggcccatagagctaagctcgacaataacaaggagctggcattctttgccaatgccctcgaggaagtcagtatagagactatcgaggccggttttatgacaaaagatctcgctgcctgcatcaaaggcctgcctaatgtacagagatccgactatctgaatacttttgagttcatggataaactgggggagaaccttaaaataaagctggcccaagcaaaattatag

SEQ ID NO: 101109 - DNA, 225 bp, Artificial Sequence
  derived and/or modified sequence
atgagcaagaagatcagcggcggcagcgtggtggagatgcagggcgacgaaatgacacggattatctgggaactaatcaaagaaaagctgatattcccgtacgtcgaactcgatctacactcatacgatcttgggatagagaatcgggacgctaccaacgaccaggttactaaagatgctgccgaagcgatcaagaaacataacgtcggagtcaagtgtgcttag

SEQ ID NO: 101110 - DNA, 1245 bp, Artificial Sequence
  derived and/or modified sequence
atgagcaagaagatcagcggcggcagcgtggtggagatgcagggcgatgaaatgacaaggatcatctgggaactaataaaggaaaaactgatctttccttacgtggagttggacctgcatagctacgacctcggaattgagaaccgggatgccaccaatgatcaggtgacgaaggacgctgctgaagcaatcaaaaagcataacgttggagtgaagtgcgccaccattacacctgacgagaagcgcgtagaggaatttaaacttaagcagatgtggaaaagtcctaacggaacaatacgtaacatcttgggcgggaccgtctttcgtgaagctattatatgtaagaacataccccgactggttagcggatgggtcaagccgataatcatcggaagacacgcctacggcgatcagtatcgcgcgacagacttcgtggtccctggacccggcaaggtggaaattacttataccccctccgatggtactcagaaggtcacgtaccttgttcataatttcgaggaaggtgggggcgtagcgatgggtatgtataatcaggacaagtccatcgaggacttcgctcatagctcttttcagatggcattaagtaagggctggccactgtacctgtcgacaaaaaacactatactgaaaaagtatgacggacgttttaaggatatctttcaggagatatatgacaagcaatacaagtctcagttcgaagcccagaaaatttggtacgagcaccggcttatagacgatatggtggcccaggccatgaagagcgaaggcggattcatttgggcttgcaagaattacgacggagacgtgcagtccgattccgtggcacagggatacggctcactcggaatgatgactagtgtcctggtctgcccagacgggaagactgtagaagccgaggcagctcatggaactgtgacaagacattatagaatgtaccagaagggccaggagacttcaaccaatcctattgcttcgattttcgcctggactaggggattggctcaccgggccaaactggacaataacaaagaactggccttttttgcaaatgcacttgaggaagtgtcaatcgaaacaatcgaagcaggattcatgacaaaagacctggcagcttgcatcaaaggcctcccaaatgtgcagagaagcgactacttaaacacttttgaattcatggataagctgggagagaacctgaaaattaagctagcacaggccaagctttag

SEQ ID NO: 101111 - DNA, 189 bp, Artificial Sequence
  derived and/or modified sequence
atgagcaagaagatcagcggcggcagcgtggtggagatgcagggcgacgaaatgactagaattatctgggaacttattaaggagaagctgatctttccttacgtcgagctagacctgcacagctatgacttgggcatcgagaacagagatgccaccaacgatcaggtaacaaaagatgcagccgaatag

SEQ ID NO: 101112 - DNA, 1245 bp, Artificial Sequence
  derived and/or modified sequence
atgagcaaaaagattagcggcggatctgttgtagagatgcagggggatgagatgacccggataatctgggagctgataaaagagaagcttatcttcccatatgttgaactcgacctacactcttacgatctgggcatcgaaaacagggacgctacaaatgatcaggtgacaaaggacgctgctgaggcgattaagaaacataacgttggcgtgaaatgcgctacaattacccccgatgagaaacgggttgaagagttcaagctgaagcagatgtggaagagcccgaatggtaccatacggaacatcttagggggaacagtgttcagagaagccatcatttgcaaaaacataccaaggttggtgtcaggctgggtgaagccaatcattataggcaggcacgcatacggcgatcaatacagggcaaccgattttgtcgtccccggacctgggaaagttgagattacatatactccaagcgacggtacccagaaggtcacttacctggtccacaatttcgaagaaggagggggagtcgctatgggcatgtacaaccaagacaaaagtattgaagacttcgcccactcttccttccagatggccctgtcaaaaggatggcctctttatctcagcaccaagaacacaatactgaagaagtacgatggcagatttaaagatatatttcaggagatctatgataagcagtataaaagccaatttgaggcccagaagatctggtatgaacacaggttaatcgacgacatggtggcccaggctatgaagagtgaaggcggtttcatttgggcttgtaagaattacgatggggacgtgcagtccgactctgtcgcccagggttacgggtccctgggaatgatgaccagcgttttagtgtgtccggacggaaaaactgtcgaagccgaagccgcacacggaactgttactcgccactacagaatgtatcaaaaggggcaggaaacctctaccaatcccattgcatcaatttttgcctggacccgtggacttgctcaccgcgctaagctggacaacaacaaagagctggctttcttcgctaatgccctggaggaggtttcaatcgaaaccatagaagctggatttatgaccaaagatttggctgcctgcattaaaggcctgcccaacgtgcaacggtctgactacctgaacacattcgagttcatggataaattaggagaaaacctcaagatcaaactggcccaagctaaattgtag

SEQ ID NO: 101113 - DNA, 474 bp, Artificial Sequence
  derived and/or modified sequence
atgagtaagaaaatcagcgggggtagcgtggttgaaatgcagggggacgagatgacgcgcattatctgggaacttatcaaggaaaagttgatctttccctatgtagaactggacctgcattcctacgacctcgggatcgaaaatcgcgacgcaacaaatgaccaggtgaccaaggacgcagccgaagcaattaaaaagcacaacgttggagtgaaatgcgcgacaattacacctgatgaaaagcgtgtcgaggagttcaagcttaagcagatgtggaaaagccctaatggtaccatcaggaacatactaggaggcaccgtgtttcgtgaagccattatctgtaagaacattcctagactggtctcaggctgggtcaagcccatcatcatcggtagacatgcgtatggcgatcagtacagggccactgacttcgttgttccaggccctggaaaggtggaaattacatacacttag

SEQ ID NO: 101114 - DNA, 1245 bp, Artificial Sequence
  derived and/or modified sequence
atgtcaaaaaagatcagcggaggcagcgtggttgagatgcagggtgacgagatgaccagaattatatgggagctcattaaagagaagctcatttttccctatgtggaattggacctgcatagttatgacctcggtatcgaaaacagagacgctactaatgaccaggtcacaaaggacgccgctgaggccatcaagaagcacaatgtgggtgtcaagtgcgcaacaatcacccctgacgagaagcgtgtggaggagtttaagctgaagcaaatgtggaagagtcccaacggcactattcgcaacatactgggaggcactgtgttcagggaggccattatctgcaagaacatcccccgtctcgttagtggctgggtcaaacccatcattattgggaggcatgcatacggtgatcagtaccgcgcaactgatttcgtagtgcccggaccaggcaaggtcgaaataacatatactccaagtgatggaacgcaaaaagtcacctacttagtccacaactttgaagagggcggaggggtcgcgatgggtatgtataatcaggataagagtattgaggattttgcccacagtagctttcagatggcactaagtaaagggtggccactctacctctctacaaagaacactatattgaaaaaatacgatggtcggtttaaagatatcttccaggagatctatgacaagcagtataaaagtcagtttgaagcccagaagatttggtacgagcacaggctgatcgacgacatggtcgcccaggccatgaagtcggaggggggtttcatctgggcctgcaaaaactatgatggtgacgtgcagtctgactccgtagctcagggctacgggtccctaggcatgatgacttcggttttagtgtgccccgacgggaaaacagtggaggccgaggctgcccatggcactgttaccaggcattaccggatgtatcagaaaggccaagaaacatctactaatcctattgctagcatcttcgcctggacccgcggacttgcccatcgggctaagcttgacaataacaaagaattagctttctttgcaaacgccttggaggaggtctctatcgagacgattgaggctggctttatgactaaggacctggccgcatgcatcaaaggactgcccaacgtgcagcgttctgactatctcaacacgtttgagttcatggacaaactgggagagaacctcaagatcaagctcgcgcaagcaaagttgtag

SEQ ID NO: 101115 - DNA, 225 bp, Artificial Sequence
  derived and/or modified sequence
atgtcgaaaaagatttctgggggatcagttgtcgagatgcagggcgacgagatgacacggatcatttgggagctcataaaggagaaactgatatttccatatgtggaactggatctgcacagttacgatctgggcatagagaaccgcgacgccacaaatgaccaagtgactaaagatgctgccgaggccatcaaaaaacataacgtgggcgtgaagtgtgcgtag

SEQ ID NO: 101116 - DNA, 1245 bp, Artificial Sequence
  derived and/or modified sequence
atgagcaagaaaatttctggcggtagcgtggtggagatgcagggtgatgagatgacaagaatcatatgggaacttatcaaggaaaagcttatctttccgtacgtggagctggatctgcatagctatgatctgggtatcgagaacagggacgccacaaacgatcaggtgacgaaggacgccgctgaggccatcaagaagcataatgtcggggtaaagtgcgccactattacgcccgatgaaaagcgtgttgaggagtttaaacttaagcagatgtggaaaagtcctaacggaactatcaggaacatcctcgggggtaccgtgttccgggaggcgatcatctgcaaaaacatcccaaggctggtcagtggctgggtcaaaccaatcatcatcggccgacacgcttacggggaccaatatcgggctacagacttcgtggtgcctggtcccggaaaggtggaaataacctacacgccctctgatggcacccagaaggtgacctacttggtccacaactttgaggaggggggaggggtcgccatggggatgtacaaccaggataaatcaatcgaagattttgcccactccagcttccagatggccttaagtaaaggctggcctctatacctaagtactaaaaacacaatattgaagaagtacgatggaagatttaaggacatcttccaagaaatttatgataaacagtacaaaagccagttcgaagcccaaaagatatggtatgaacatagactcatagatgatatggtagctcaggccatgaagtctgagggtggtttcatttgggcctgtaaaaattacgatggggacgtgcaaagcgactccgtcgcccagggatacgggtcactgggaatgatgacatcggtcttagtttgcccagacgggaagactgtggaggccgaggctgcgcacgggacagtcaccaggcactatcgaatgtaccagaagggccaagagacctccacaaatcccatcgcttcgattttcgcctggacaagaggcctggcccatagggcgaaactggacaacaacaaagaattagcattctttgcgaacgcactggaagaggtgtcgatcgagacgatcgaggccggattcatgaccaaggatctggcggcttgcattaaggggctacccaacgtccagaggagcgattatcttaacacgttcgagttcatggacaagctcggcgagaacttaaagatcaaactcgcgcaggccaaattgtag

SEQ ID NO: 101117 - DNA, 189 bp, Artificial Sequence
  derived and/or modified sequence
atgagcaaaaagattagcggcggttccgtcgtcgaaatgcagggggacgagatgaccaggataatctgggaactgatcaaagaaaaactaatattcccatacgtggagctggacctccattcttacgatctgggcattgagaatagggacgctacaaacgatcaggtaaccaaggatgctgccgagtag

SEQ ID NO: 101118 - protein, 763 aa, Artificial Sequence
  derived and/or modified sequence
MEHHLQRAISAQQVYGEKRDNMVIPVPEAESNIAYYESIYPGEFKMPKQLIHIQPFSLDAEQPDYDLDSEDEVFVNKLKKKMDICPLQFEEMIDRLEKGSGQQPVSLQEAKLLLKEDDELIREVYEYWIKKRKNCRGPSLIPSVKQEKRDGSSTNDPYVAFRRRTEKMQTRKNRKNDEASYEKMLKLRRDLSRAVTILEMIKRREKSKRELLHLTLEIMEKRYNLGDYNGEIMSEVMAQRQPMKPTYAIPIIPITNSSQFKHQEAMDVKEFKVNKQDKADLIRPKRKYEKKPKVLPSSAAATPQQTSPAALPVFNAKDLNQYDFPSSDEEPLSQVLSGSSEAEEDNDPDGPFAFRRKAGCQYYAPHLDQTGNWPWTSPKDGGLGDVRYRYCLTTLTVPQRCIGFARRRVGRGGRVLLDRAHSDYDSVFHHLDLEMLSSPQHSPVNQFANTSETNTSDKSFSKDLSQILVNIKSCRWRHFRPRTPSLHDSDNDELSCRKLYRSINRTGTAQPGTQTCSTSTQSKSSSGSAHFAFTAEQYQQHQQQLALMQKQQLAQIQQQQANSNSSTNTSQGFVSKTLDSASAQFAASALVTSEQLMGFKMKDDVVLGIGVNGVLPASGVYKGLHLSSTTPTALVHTSPSTAGSALLQPSNITQTSSSHSALSHQVTAANSATTQVLIGNNIRLTVPSSVATVNSIAPINARHIPRTLSAVPSSALKLAAAANCQVSKVPSSSSVDSVPRENHESEKPALNNIADNTVAMEVT

SEQ ID NO: 101119 - DNA, 2292 bp, Artificial Sequence
  derived and/or modified sequence
atggagcatcatctacagcgcgctatcagcgcacaacaggtatatggagagaagagggataacatggttatccccgtcccagaagcagaaagcaatattgcttactacgagtctatatatcccggcgagttcaagatgcccaagcaactcattcatatccaacccttttcactggacgctgaacagccagactatgacctggacagcgaggatgaagtattcgttaacaagcttaaaaaaaaaatggacatctgtcctctgcagttcgaggagatgattgatagactggagaaaggctcaggccagcagccggtgagcctccaggaggctaaactcctgttaaaagaagatgacgaactgatacgagaagtttacgagtattggatcaagaagagaaagaactgccgcggccctagtctcatcccctccgtgaaacaagaaaagcgcgatggttcctcgactaatgatccgtacgtggcgtttaggcgcagaactgaaaagatgcagacccggaagaacagaaaaaacgacgaagcatcctatgagaagatgctgaagctgcgtcgcgatcttagcagggcagtcacgattttagaaatgattaaacgtcgggaaaagtctaagagagaactcctgcacctgaccctggagattatggaaaagcgctataatctaggtgactacaacggagaaatcatgtctgaggtcatggctcaaaggcagccaatgaaacccacttacgcaattcctattattcctattactaattcaagtcagttcaagcaccaggaagccatggatgtaaaggaattcaaggttaataagcaagataaagcggatttaatccgaccgaaacgaaaatacgaaaagaagccaaaggttctgccctcctccgcagccgctactcctcagcagaccagtccagctgcactgcccgtcttcaacgctaaagatctgaaccagtacgactttccatcttccgacgaggaacctcttagccaggtgctgagcggctccagtgaagccgaagaggataacgatcctgacgggccgtttgcttttaggcgaaaagccgggtgccagtactatgctcctcacctcgatcaaaccggaaactggccgtggacctcacccaaggatggcggcctgggtgacgttcggtatcgctactgcctcacaaccctcacagtaccccaacgctgtattgggtttgctaggcgtcgcgtcggacggggtggtcgtgttctactggacagagcccattctgattatgacagcgtgtttcatcacttagatctcgagatgctgtcttcccctcagcacagccctgtgaatcaatttgccaatacatcagagacgaatacaagtgacaaatccttctccaaagatctctcccagattcttgtgaacatcaagagctgccgctggagacactttagacctcgcacaccctcgctgcatgatagtgataacgatgagttgagctgccggaagctctacagatctattaataggactggcaccgcgcagccgggcactcagacatgttccaccagtacgcagagcaaatcttcaagcggatcagcccattttgcctttaccgccgagcaataccaacagcaccagcagcaacttgctttaatgcagaaacagcagcttgcccagatccagcagcaacaggctaacagtaattcatccacaaacacaagccagggttttgtcagcaagacgctcgattccgccagtgcccagttcgccgcatctgccctggtgacgagcgaacagctgatgggattcaaaatgaaggatgatgtggtgctcgggattggcgtgaacggagtgctccctgcgtcgggcgtgtacaagggactgcatttatctagcaccactcccacagcacttgtgcatacttctccctcaaccgcaggatccgccctgttacagccttccaatatcacacagacctcctcttcacactcagccctaagtcatcaggtgacagccgccaattcggctactacacaagtattgattgggaacaacatacggctgactgtcccctccagtgtcgccaccgtgaactccattgctcccattaatgcaaggcacattccaaggaccctgtctgcagtgccaagctccgcactgaaactggcagctgccgccaattgtcaagtttccaaagtcccgagcagcagcagtgtcgatagcgtgccacgagaaaaccacgagtcggaaaaaccggctttaaataacatcgcagataacaccgtggctatggaggttacctag

SEQ ID NO: 101120 - DNA, 2292 bp, Artificial Sequence
  derived and/or modified sequence
atggagcaccacctgcagagggccatcagcgcccagcaggtgtatggagagaagagggacaacatggtgattcctgtgcctgaggccgagagcaacatcgcctactatgagagcatctacccaggagagttcaagatgcccaagcagctgatccacatccagcccttcagcctggatgctgagcagcctgactatgacctggacagtgaagatgaggtgtttgtgaacaagctgaagaagaagatggacatctgccccctgcagtttgaggagatgattgaccggctggagaagggcagcggccagcagcctgtgtccctgcaggaggccaagctgctgctgaaggaggatgatgagctgatccgggaggtgtatgagtactggatcaagaagaggaagaactgccggggccccagcctcatccccagcgtgaagcaggagaagagagatggcagcagcaccaatgacccctacgtggccttcagaagaagaacagagaagatgcagaccaggaagaacaggaagaatgatgaggccagctatgagaagatgctgaagctgcggcgggacctgagcagagctgtgaccatcctggagatgatcaagagaagagagaagagcaagcgggagctgctgcacctgaccctggagatcatggagaagcgctacaacctgggggactacaatggagagatcatgtctgaggtgatggcccagaggcagcccatgaagcccacctacgccatccccatcatccccatcaccaacagcagccagttcaagcaccaggaggccatggatgtgaaggagttcaaggtgaacaagcaggacaaggctgacctgatccggcccaagaggaaatatgagaagaagcccaaggtgctgcccagcagcgctgctgccaccccccagcagaccagccctgctgccctgcccgtcttcaatgccaaggacctgaaccagtatgacttccccagcagtgatgaggagcccctgagccaggtgctgagcggcagcagcgaggccgaggaggacaatgaccctgatggcccctttgccttccggaggaaggccggctgccagtactatgccccccacctggaccagacaggcaactggccctggaccagccccaaggatggcggcctgggagatgtgcgctaccgctactgcctgaccaccctgactgtgccccagcgctgcatcggctttgccaggagaagagtgggccggggcggccgggtgctgctggaccgggcccacagcgactatgacagcgtcttccaccacctggacctggagatgctgagcagcccccagcacagccctgtgaaccagtttgccaacaccagcgagaccaacaccagtgacaagagcttcagcaaggacctgagccagatcctggtgaacatcaagagctgccgctggaggcacttccggcccaggacccccagcctgcatgacagcgacaatgatgagctgagctgcaggaagctgtaccgcagcatcaacagaactggaacagcccagcccggcacccagacctgcagcaccagcacccagagcaagagcagcagcggcagcgcccactttgccttcaccgctgagcagtaccagcagcaccagcagcagctggccctgatgcagaagcagcagctggcccagatccagcagcagcaggccaacagcaacagcagcaccaacaccagccagggctttgtgtccaagaccctggacagcgccagcgcccagtttgctgccagcgccctggtgaccagcgagcagctgatgggcttcaagatgaaggatgatgtggtgctgggcattggagtgaatggagtgctgcctgccagcggcgtgtacaagggcctgcacctgagcagcaccacccccacagccctggtgcacaccagccccagcacagctggcagcgccctgctgcagcccagcaacatcacccagaccagcagcagccacagcgccctgagccaccaggtgacagctgccaacagcgccaccacccaggtgctgattggcaacaacatccggctgactgtgcccagctctgtggccaccgtgaacagcatcgcccccatcaatgcccggcacatccccaggaccctgtctgctgtgcccagcagcgccctgaagctggccgctgctgccaactgccaggtgtccaaggtgcccagcagcagctctgtggacagcgtgcccagagaaaatcatgaaagtgagaagccagccctgaacaacattgctgacaacacagtggccatggaggtgacctag

SEQ ID NO: 101121 - DNA, 2292 bp, Artificial Sequence
  derived and/or modified sequence
atggagcaccacctgcagcgggccatcagcgcccagcaggtgtacggcgaaaagcgggacaacatggtgatccctgttcctgaagccgaatcaaacatcgcctattatgaatcaatctaccctggagaattcaagatgcccaagcagctgatacatatccagccattcagtctagacgcggaacaaccagactacgacctcgatagtgaagatgaagtgttcgtgaataagctgaaaaaaaagatggatatttgtcctctacagtttgaggagatgatcgataggctggaaaaagggtcaggccagcagcctgtttccctgcaggaggccaaactcctcctgaaagaggatgatgaattgatcagggaggtgtacgagtattggatcaaaaaacgtaagaattgcagaggccccagtttgattccatccgttaagcaggaaaagcgggacggctccagcaccaacgatccatatgtggcgtttcggcgaagaacagagaagatgcagacaaggaagaaccgcaagaatgacgaagcatcctacgaaaaaatgctaaaactcagacgggatctgtcacgcgcagtcactattcttgagatgattaaacgccgcgaaaagtcaaagagggagctcttgcacctgacccttgagattatggagaaacgatataacctgggcgattataatggagaaataatgagcgaagtgatggcccagcggcagcccatgaaacctacttatgcaatcccaatcattcccattacaaattcttcccagtttaaacaccaggaagctatggacgtgaaggaatttaaggttaataagcaagataaagctgatttgatccggcccaagcggaagtacgagaagaaaccgaaggttctgccctcgtccgccgctgccacaccgcaacagactagtccagccgctctccctgtgtttaatgctaaagatctgaaccaatatgatttccccagctccgacgaagaacctctgtcacaggtgctgtcaggctcaagcgaggcagaagaagacaatgaccccgatgggcccttcgcttttcgcaggaaagcggggtgtcagtactatgccccacacctggaccagactgggaattggccctggacgagccctaaggacggcggcctcggcgacgtcagataccggtattgcctgactacgttgacggtgcctcaacgttgtatcgggtttgccagacgccgggtcggcagggggggtcgggtgctcctggacagggctcattccgactacgacagcgtgttccatcacctggatctggagatgctcagtagtcctcagcactcgcccgtcaatcagtttgcaaacacctctgaaactaatacatcagataagagcttcagtaaggatctttcccagatcctggtaaatatcaagtcttgccgctggcggcactttcgaccccgtacacccagcctgcacgacagcgacaatgatgagctaagttgtcggaaactgtatagatcaataaatcgaacaggcaccgctcagcccggcacacagacctgctctacgagcacccagtctaaatctagttcaggctctgcacatttcgctttcacagctgaacagtatcaacagcatcaacagcagttagctttaatgcagaagcaacagttagcccaaatccagcagcagcaagcaaactccaattcctctactaatacttctcagggattcgttagtaaaaccctggactccgcgagcgcccagttcgccgcttctgccctggtcacctcagagcagctcatgggcttcaaaatgaaggatgacgtcgtgctgggcattggcgtgaacggagtgttaccagcctccggggtctataagggcttacacctcagcagcacgactcccactgcgctggtacatacaagtcccagcacagcaggctcggcactgctgcagccttctaacataacacaaactagctcaagtcactcggccctgtcccatcaggtcacagctgcaaattcggctaccacccaggtgctgatcggcaataacatccggctgaccgtgccaagctctgtggcaaccgtcaacagtatagctccaatcaatgcccggcatattccccgcaccttatccgccgtgccttcctctgccctcaagctcgccgcagctgccaattgccaggtctctaaagtgccttcctcctcttcagtggactctgtgcccagagagaaccatgagtctgaaaagcccgcactcaacaacatcgcggataatactgtagcaatggaggtcacttag

SEQ ID NO: 101122 - DNA, 2292 bp, Artificial Sequence
  derived and/or modified sequence
atggaacatcacctgcaaagagcgataagcgctcagcaggtttacggcgaaaagagagacaacatggtcatcccagtgccagaggccgaaagcaacatcgcctactatgaaagcatctaccctggagagtttaagatgccaaagcagctgatccatatccagcccttttcacttgacgctgagcagccggactacgacctggattcggaagacgaggtcttcgtcaacaagcttaagaagaagatggatatatgcccactgcaatttgaggagatgattgaccgcctggaaaagggttcaggccagcaacctgtgtcacttcaagaagctaaactcctgttgaaagaggatgacgagctcataagagaggtgtatgagtattggattaagaagagaaagaattgtaggggccctagcctgattccaagcgtaaaacaggagaagagggatggctctagcaccaatgacccatacgtggctttccgcagacggacagaaaagatgcagaccagaaaaaatcgaaagaacgacgaggcttcttacgaaaagatgcttaagctgcggagagatctttctagggcagtgactattctggagatgattaaacgcagggagaaaagcaaaagggagcttctgcacctgacacttgaaatcatggaaaagaggtataaccttggcgactataatggcgagatcatgtccgaggtgatggcccaaagacagcccatgaagccaacatatgctatccccatcattcctatcacaaattctagtcagttcaagcaccaggaagcaatggacgttaaggaatttaaagtgaataaacaggacaaggcggacctgattaggccaaagaggaaatacgagaagaaaccgaaggtgttaccctccagtgcggctgccaccccacagcagacaagccctgccgctctgccagtattcaatgcaaaggatctgaaccagtacgacttccctagttccgacgaagagccactgagtcaggttctcagcgggtcctcagaagcggaggaagacaacgatcctgacggaccttttgctttcaggagaaaggccggatgtcaatattatgccccacacctcgatcagactggtaattggccttggacaagtccaaaggatggaggactaggggatgttcggtatcggtactgtctgaccactctcactgtgccccaacgctgcatcggcttcgctcgcagaagggtgggaagagggggtcgcgtgctcctggaccgcgctcattccgactacgatagtgtatttcatcatctagatctggaaatgctgagttctcctcagcattctcctgtgaaccagttcgcaaatactagtgagaccaacaccagcgacaaatcattctctaaagacctgagtcagattctcgttaatataaagtcctgccgctggaggcacttcagacctcgcacacccagtttgcacgattctgataacgatgaattgtcgtgtcgtaagttgtatagatccataaacagaacggggacagctcagcccggaacacagacctgcagtacgtccacgcagagtaaaagcagttctggcagcgcgcactttgctttcacagcagaacagtaccaacaacatcagcagcagctggcactgatgcaaaagcagcaactggcccagattcagcaacagcaggccaattctaatagtagcactaatacctcgcagggctttgtgagtaagactttagattctgcctctgcgcaatttgctgcttcggctttggtcacatcagaacagcttatgggcttcaagatgaaagatgatgtagttctgggtatcggagttaacggagtgttgccagcctccggagtctacaagggcctgcacctcagttccaccaccccaaccgcccttgtccatacatccccaagtactgccggaagtgccctcctgcagccttccaacatcactcagacttctagctctcattccgctctaagccaccaggtgacggccgcaaattccgccaccacccaggtgctcatcggaaataacatcagactcacagtccctagtagtgtggcgaccgtcaacagcattgccccaatcaatgccagacacatcccacggacgttgagcgccgtcccttcctccgcattaaagctcgcagcagccgcaaattgccaagtctcaaaggtgccctcaagtagctccgtcgatagtgtaccgagagaaaaccacgaatccgaaaaacccgcattgaacaatattgcagacaacactgtagcgatggaggtgacttag

SEQ ID NO: 101123 - DNA, 2292 bp, Artificial Sequence
  derived and/or modified sequence
atggagcaccacctgcagagagccatcagcgcccagcaggtgtacggcgagaagagagacaacatggtgatccccgtgcccgaggccgagagcaacatcgcctactacgagagcatctaccccggcgagttcaagatgcccaagcagctgatccacatccagcccttcagcctggacgccgagcagcccgactacgacctggacagcgaggacgaggtgttcgtgaacaagctgaagaagaagatggacatctgccccctgcagttcgaggagatgatcgacagactggagaagggcagcggccagcagcccgtgagcctgcaggaggccaagctgctgctgaaggaggacgacgagctgatcagagaggtgtacgagtactggatcaagaagagaaagaactgcagaggccccagcctgatccccagcgtgaagcaggagaagagagacggcagcagcaccaacgacccctacgtggccttcagaagaagaaccgagaagatgcagaccagaaagaacagaaagaacgacgaggccagctacgagaagatgctgaagctgagaagagacctgagcagagccgtgaccatcctggagatgatcaagagaagagagaagagcaagagagagctgctgcacctgaccctggagatcatggagaagagatacaacctgggcgactacaacggcgagatcatgagcgaggtgatggcccagagacagcccatgaagcccacctacgccatccccatcatccccatcaccaacagcagccagttcaagcaccaggaggccatggacgtgaaggagttcaaggtgaacaagcaggacaaggccgacctgatcagacccaagagaaagtacgagaagaagcccaaggtgctgcccagcagcgccgccgccaccccccagcagaccagccccgccgccctgcccgtgttcaacgccaaggacctgaaccagtacgacttccccagcagcgacgaggagcccctgagccaggtgctgagcggcagcagcgaggccgaggaggacaacgaccccgacggccccttcgccttcagaagaaaggccggctgccagtactacgccccccacctggaccagaccggcaactggccctggaccagccccaaggacggcggcctgggcgacgtgagatacagatactgcctgaccaccctgaccgtgccccagagatgcatcggcttcgccagaagaagagtgggcagaggcggcagagtgctgctggacagagcccacagcgactacgacagcgtgttccaccacctggacctggagatgctgagcagcccccagcacagccccgtgaaccagttcgccaacaccagcgagaccaacaccagcgacaagagcttcagcaaggacctgagccagatcctggtgaacatcaagagctgcagatggagacacttcagacccagaacccccagcctgcacgacagcgacaacgacgagctgagctgcagaaagctgtacagaagcatcaacagaaccggcaccgcccagcccggcacccagacctgcagcaccagcacccagagcaagagcagcagcggcagcgcccacttcgccttcaccgccgagcagtaccagcagcaccagcagcagctggccctgatgcagaagcagcagctggcccagatccagcagcagcaggccaacagcaacagcagcaccaacaccagccagggcttcgtgagcaagaccctggacagcgccagcgcccagttcgccgccagcgccctggtgaccagcgagcagctgatgggcttcaagatgaaggacgacgtggtgctgggcatcggcgtgaacggcgtgctgcccgccagcggcgtgtacaagggcctgcacctgagcagcaccacccccaccgccctggtgcacaccagccccagcaccgccggcagcgccctgctgcagcccagcaacatcacccagaccagcagcagccacagcgccctgagccaccaggtgaccgccgccaacagcgccaccacccaggtgctgatcggcaacaacatcagactgaccgtgcccagcagcgtggccaccgtgaacagcatcgcccccatcaacgccagacacatccccagaaccctgagcgccgtgcccagcagcgccctgaagctggccgccgccgccaactgccaggtgagcaaggtgcccagcagcagcagcgtggacagcgtgcccagagagaaccacgagagcgagaagcccgccctgaacaacatcgccgacaacaccgtggccatggaggtgacctag

SEQ ID NO: 101124 - DNA, 3909 bp, Artificial Sequence
  derived and/or modified sequence
agcgctcgcctgcttgccatcgcaaagttgttaaccccagagtcttctggctgtgctgcctcctctgcttttaatcttctgtggatatttctccgatttcccccaaaagcccacagatcctgggggaagccaccccattcggccaccgatcatggaagaaagtattactttttatttaccaaacattttaaagatgttggaagatccatatgctgcctggaggctgttgtttctagggacacaagtatccagcctatattgttacaattttttttcaagaactgccgtcttctttgcctgcactaatggaacatcatcttcagcgggctatttcagcacagcaggtgtatggcgagaagagggataatatggttataccggtcccagaggcagaaagtaatattgcttactatgagtctatatatcctggggaatttaagatgccaaagcagctcattcacatacagccttttagtttggatgctgaacagcctgattatgatttggattctgaagatgaagtatttgtgaataaactgaaaaagaaaatggacatctgcccattgcaatttgaggagatgattgaccgcctagaaaaaggcagtggtcagcagccagtcagtctgcaggaagccaaactactgctaaaagaagatgatgaactaattagagaagtttatgaatattggattaaaaagagaaaaaactgtcgagggccatctcttattccatcagtaaaacaagagaagcgagatggttccagcacaaatgatccttatgtggcttttagaaggcgtactgaaaaaatgcagactcgaaaaaatcgcaaaaatgatgaagcctcttacgaaaaaatgcttaagctgcgacgagatctaagtcgagctgttactattctagagatgataaaaagaagagaaaaaagtaaaagagagctattgcacttaacactggaaattatggaaaagaggtataatttgggcgactacaatggagagatcatgtctgaggttatggcacagagacagccaatgaaacctacttatgccatccccatcatccctattactaatagcagtcaatttaaacaccaggaagcaatggatgtgaaggagttcaaagttaataagcaagataaagccgatcttatccgaccgaaacggaaatatgaaaagaagcccaaagtcttaccatcgtctgccgctgctactccccaacagacgagtcctgctgcactgccagtcttcaatgctaaagatctgaatcagtatgactttcccagctcagacgaagaacctctctcccaggttttgtctggctcttcggaagctgaggaagacaatgatcctgatggtccttttgctttccgtaggaaagcaggctgtcagtactatgctcctcacttagaccaaactggcaactggccttggactagtcctaaagatggaggattaggggatgtgcgatatagatactgcttaactactctcaccgtaccccaaaggtgtattggatttgcacgaagacgggttgggcgcggtggaagggtcttactggacagagctcattcagactatgacagtgtgtttcaccatctggatttggaaatgctttcctcaccacaacattctccagtcaatcagtttgccaatacctcagaaacaaatacctcggacaaatctttctctaaagacctcagtcagatactagtcaatatcaaatcatgtagatggcggcattttaggcctcggacaccatccctacatgacagtgacaatgatgaactctcctgtagaaaattatataggagtataaaccgaacaggaacagcacaacctgggacccagacatgcagtacctctacgcaaagtaaaagtagcagtggttcagcacactttgcatttacagccgaacaataccagcaacatcaacagcaactggcactcatgcagaaacagcagcttgcacaaattcagcaacagcaagcaaatagtaattcctccaccaacacatcacagggttttgtttctaagactttggattctgctagtgcacagtttgctgcttctgctttggtgacatcagaacaactgatgggattcaagatgaaggatgatgtggtgcttggaatcggggtgaatggcgtccttccagcctcaggagtatacaagggcttacacctcagtagtactacaccaacagcacttgtacatacaagtccatcaacggcaggttcagctttgttacagccttcaaatattacacagacttcaagttcccacagtgcactgagtcatcaagtaactgctgccaattctgcaacaactcaggttctgattgggaacaacattcgattaactgtaccttcatcagttgccactgtaaactctattgccccaataaatgcacgacatatacctaggactttaagtgctgttccatcatctgccttaaagctggccgctgcagcaaactgtcaagtttccaaggtcccatcttcatcctctgtagattcagttccaagggaaaatcatgaatcagaaaagccagcactgaacaacatagcagacaacacagtagcgatggaggtgacgtagcttcctccgagtggaactgcagcctggggacttgattaggtgctatgcatcagtagcattttgaatgcaagggatgatggaaagcagcacatgcgtttctgtggcagctgtggggacttgacagcaatgctcatctctcatgcttcaatttttcttttcttactgttaataggaaaaaaatcaacatctgtaaattaagaatacagcaattatctgtacagtactgcatatttgtaatacccttgtatatatgttacttgaatacagaaatgttcatttgtgatgctttgcacttgggggtggggggtgggagggaaatcaattgcaacaaagagtgtgagatgtgagattgtatagagatgaagtgtcatcacatcatgtgcatggtgcggaacctgctgttttatctatttattgtgccgtgtttacagttttttgtacactgtaccttcattggttcctgtgctgtagtaaatgtgttaggtagctgtggactccttggtattttgtaaatggtataacataacttggttcccctctgggtccttgagttttctgtgtatcatgtgaaaaaaaatggtgacatacatacagaattttacaaaaaaaaaaaaaaaaaaaaaggcatcagtttttttaaaaatggggaatgtactattaaatggggatcttcctggtctactatcattaggacaagtaacaagctaaaaatgaagtctcttgaatctttccatccccaacttgcccacaaagctgtgggtggtttctggtacttaaagcactaatattatgttgctgctctgcgaacagcccagtagtcccatttccttccacaccaaaaagtgttaaatcaagtatgcaaatggagtccttacaactggagtttatgttgtcttgccctttttttagcacaaaaaaaattgtacttttttattgtcgaattgtttaaaagacttcattctttacttgttcttacgaaaaggatataagggagaagaatgcagtaattgctgtacgtgtatcatcattccagtttctaaaaacagccagccagcttttttccttttaagattctccagaaggctgcaaggccagaaccacaaatatcgggtgccttcctttggaaatatttgacctctcttctgtgaagagaatggtacttaacagactactactagtgctttgtcagtaccgaagtctgaatgcccagtccaatggcatacattatccttaaggtttttaatcccacctggaaaaattgtgatagaattctcacaaaataaacccagggcattacatgttgacaaactaa

SEQ ID NO: 101125 - protein, 2297 aa, Artificial Sequence
  derived and/or modified sequence
MDGDGGRRDVPGTLMEPGRGAGPAGMAEPRAKAARPGPQRFLRRSVVESDQEEPPGLEAAEAPGPQPPQPLQRRVLLLCKTRRLIAERARGRPAAPAPAALVAQPGAPGAPADAGPEPVGTQEPGPDPIAAAVETAPAPDGGPREEAAATVRKEDEGAAEAKPEPGRTRRDEPEEEEDDEDDLKAVATSLDGRFLKFDIELGRGSFKTVYKGLDTETWVEVAWCELQDRKLTKLERQRFKEEAEMLKGLQHPNIVRFYDFWESSAKGKRCIVLVTELMTSGTLKTYLKRFKVMKPKVLRSWCRQILKGLLFLHTRTPPIIHRDLKCDNIFITGPTGSVKIGDLGLATLKRASFAKSVIGTPEFMAPEMYEEHYDESVDVYAFGMCMLEMATSEYPYSECQNAAQIYRKVTCGIKPASFEKVHDPEIKEIIGECICKNKEERYEIKDLLSHAFFAEDTGVRVELAEEDHGRKSTIALRLWVEDPKKLKGKPKDNGAIEFTFDLEKETPDEVAQEMIESGFFHESDVKIVAKSIRDRVALIQWRRERIWPALQPKEQQDVGSPDKARGPPVPLQVQVTYHAQAGQPGPPEPEEPEADQHLLPPTLPTSATSLASDSTFDSGQGSTVYSDSQSSQQSVMLGSLADAAPSPAQCVCSPPVSEGPVLPQSLPSLGAYQQPTAAPGLPVGSVPAPACPPSLQQHFPDPAMSFAPVLPPPSTPMPTGPGQPAPPGQQPPPLAQPTPLPQVLAPQPVVPLQPVPPHLPPYLAPASQVGAPAQLKPLQMPQAPLQPLAQVPPQMPPIPVVPPITPLAGIDGLPPALPDLPTATVPPVPPPQYFSPAVILPSLAAPLPPASPALPLQAVKLPHPPGAPLAMPCRTIVPNAPATIPLLAVAPPGVAALSIHSAVAQLPGQPVYPAAFPQMAPTDVPPSPHHTVQNMRATPPQPALPPQPTLPPQPVLPPQPTLPPQPVLPPQPTRPPQPVLPPQPMLPPQPVLPPQPALPVRPEPLQPHLPEQAAPAATPGSQILLGHPAPYAVDVAAQVPTVPVPPAAVLSPPLPEVLLPAAPELLPQFPSSLATVSASVQSVPTQTATLLPPANPPLPGGPGIASPCPTVQLTVEPVQEEQASQDKPPGLPQSCESYGGSDVTSGKELSDSCEGAFGGGRLEGRAARKHHRRSTRARSRQERASRPRLTILNVCNTGDKMVECQLETHNHKMVTFKFDLDGDAPDEIATYMVEHDFILQAERETFIEQMKDVMDKAEDMLSEDTDADRGSDPGTSPPHLSTCGLGTGEESRQSQANAPVYQQNVLHTGKRWFIICPVAEHPAPEAPESSPPLPLSSLPPEASQGPCRGLTLPCLPWRRAACGAVFLSLFSAESAQSKQPPDSAPYKDQLSSKEQPSFLASQQLLSQAGPSNPPGAPPAPLAPSSPPVTALPQDGAAPATSTMPEPASGTASQAGGPGTPQGLTSELETSQPLAETHEAPLAVQPLVVGLAPCTPAPEAASTRDASAPREPLPPPAPEPSPHSGTPQPALGQPAPLLPAAVGAVSLATSQLPSPPLGPTVPPQPPSALESDGEGPPPRVGFVDSTIKSLDEKLRTLLYQEHVPTSSASAGTPVEVGDRDFTLEPLRGDQPRSEVCGGDLALPPVPKEAVSGRVQLPQPLVEKSELAPTRGAVMEQGTSSSMTAESSPRSMLGYDRDGRQVASDSHVVPSVPQDVPAFVRPARVEPTDRDGGEAGESSAEPPPSDMGTVGGQASHPQTLGARALGSPRKRPEQQDVSSPAKTVGRFSVVSTQDEWTLASPHSLRYSAPPDVYLDEAPSSPDVKLAVRRAQTASSIEVGVGEPVSSDSGDEGPRARPPVQKQASLPVSGSVAGDFVKKATAFLQRPSRAGSLGPETPSRVGMKVPTISVTSFHSQSSYISSDNDSELEDADIKKELQSLREKHLKEISELQSQQKQEIEALYRRLGKPLPPNVGFFHTAPPTGRRRKTSKSKLKAGKLLNPLVRQLKVVASSTGHLADSSRGPPAKDPAQASVGLTADSTGLSGKAVQTQQPCSVRASLSSDICSGLASDGGGARGQGWTVYHPTSERVTYKSSSKPRARFLSGPVSVSIWSALKRLCLGKEHSSRSSTSSLAPGPEPGPQPALHVQAQVNNSNNKKGTFTDDLHKLVDEWTSKTVGAAQLKPTLNQLKQTQKLQDMEAQAGWAAPGEARAMTAPRAGVGMPRLPPAPGPLSTTVIPGAAPTLSVPTPDGALGTARRNQVWFGLRVPPTACCGHSTQPRGGQRVGSKTASFAASDPVRS

SEQ ID NO: 101126 - protein, 1866 aa, Artificial Sequence
  derived and/or modified sequence
MATSEYPYSECQNAAQIYRKVTCGIKPASFEKVHDPEIKEIIGECICKNKEERYEIKDLLSHAFFAEDTGVRVELAEEDHGRKSTIALRLWVEDPKKLKGKPKDNGAIEFTFDLEKETPDEVAQEMIESGFFHESDVKIVAKSIRDRVALIQWRRERIWPALQPKEQQDVGSPDKARGPPVPLQVQVTYHAQAGQPGPPEPEEPEADQHLLPPTLPTSATSLASDSTFDSGQGSTVYSDSQSSQQSVMLGSLADAAPSPAQCVCSPPVSEGPVLPQSLPSLGAYQQPTAAPGLPVGSVPAPACPPSLQQHFPDPAMSFAPVLPPPSTPMPTGPGQPAPPGQQPPPLAQPTPLPQVLAPQPVVPLQPVPPHLPPYLAPASQVGAPAQLKPLQMPQAPLQPLAQVPPQMPPIPVVPPITPLAGIDGLPPALPDLPTATVPPVPPPQYFSPAVILPSLAAPLPPASPALPLQAVKLPHPPGAPLAMPCRTIVPNAPATIPLLAVAPPGVAALSIHSAVAQLPGQPVYPAAFPQMAPTDVPPSPHHTVQNMRATPPQPALPPQPTLPPQPVLPPQPTLPPQPVLPPQPTRPPQPVLPPQPMLPPQPVLPPQPALPVRPEPLQPHLPEQAAPAATPGSQILLGHPAPYAVDVAAQVPTVPVPPAAVLSPPLPEVLLPAAPELLPQFPSSLATVSASVQSVPTQTATLLPPANPPLPGGPGIASPCPTVQLTVEPVQEEQASQDKPPGLPQSCESYGGSDVTSGKELSDSCEGAFGGGRLEGRAARKHHRRSTRARSRQERASRPRLTILNVCNTGDKMVECQLETHNHKMVTFKFDLDGDAPDEIATYMVEHDFILQAERETFIEQMKDVMDKAEDMLSEDTDADRGSDPGTSPPHLSTCGLGTGEESRQSQANAPVYQQNVLHTGKRWFIICPVAEHPAPEAPESSPPLPLSSLPPEASQGPCRGLTLPCLPWRRAACGAVFLSLFSAESAQSKQPPDSAPYKDQLSSKEQPSFLASQQLLSQAGPSNPPGAPPAPLAPSSPPVTALPQDGAAPATSTMPEPASGTASQAGGPGTPQGLTSELETSQPLAETHEAPLAVQPLVVGLAPCTPAPEAASTRDASAPREPLPPPAPEPSPHSGTPQPALGQPAPLLPAAVGAVSLATSQLPSPPLGPTVPPQPPSALESDGEGPPPRVGFVDSTIKSLDEKLRTLLYQEHVPTSSASAGTPVEVGDRDFTLEPLRGDQPRSEVCGGDLALPPVPKEAVSGRVQLPQPLVEKSELAPTRGAVMEQGTSSSMTAESSPRSMLGYDRDGRQVASDSHVVPSVPQDVPAFVRPARVEPTDRDGGEAGESSAEPPPSDMGTVGGQASHPQTLGARALGSPRKRPEQQDVSSPAKTVGRFSVVSTQDEWTLASPHSLRYSAPPDVYLDEAPSSPDVKLAVRRAQTASSIEVGVGEPVSSDSGDEGPRARPPVQKQASLPVSGSVAGDFVKKATAFLQRPSRAGSLGPETPSRVGMKVPTISVTSFHSQSSYISSDNDSELEDADIKKELQSLREKHLKEISELQSQQKQEIEALYRRLGKPLPPNVGFFHTAPPTGRRRKTSKSKLKAGKLLNPLVRQLKVVASSTGHLADSSRGPPAKDPAQASVGLTADSTGLSGKAVQTQQPCSVRASLSSDICSGLASDGGGARGQGWTVYHPTSERVTYKSSSKPRARFLSGPVSVSIWSALKRLCLGKEHSSRSSTSSLAPGPEPGPQPALHVQAQVNNSNNKKGTFTDDLHKLVDEWTSKTVGAAQLKPTLNQLKQTQKLQDMEAQAGWAAPGEARAMTAPRAGVGMPRLPPAPGPLSTTVIPGAAPTLSVPTPDPESEKPD

SEQ ID NO: 101127 - DNA, 6894 bp, Artificial Sequence
  derived and/or modified sequence
atggacggcgacggcggcagaagagacgtgcccggcaccctgatggagcccggcagaggcgccggccccgccggcatggccgagcccagagccaaggccgccagacccggcccccagagattcctgagaagaagcgtggtggagagcgaccaggaggagccccccggcctggaggccgccgaggcccccggcccccagcccccccagcccctgcagagaagagtgctgctgctgtgcaagaccagaagactgatcgccgagagagccagaggcagacccgccgcccccgcccccgccgccctggtggcccagcccggcgcccccggcgcccccgccgacgccggccccgagcccgtgggcacccaggagcccggccccgaccccatcgccgccgccgtggagaccgcccccgcccccgacggcggccccagagaggaggccgccgccaccgtgagaaaggaggacgagggcgccgccgaggccaagcccgagcccggcagaaccagaagagacgagcccgaggaggaggaggacgacgaggacgacctgaaggccgtggccaccagcctggacggcagattcctgaagttcgacatcgagctgggcagaggcagcttcaagaccgtgtacaagggcctggacaccgagacctgggtggaggtggcctggtgcgagctgcaggacagaaagctgaccaagctggagagacagagattcaaggaggaggccgagatgctgaagggcctgcagcaccccaacatcgtgagattctacgacttctgggagagcagcgccaagggcaagagatgcatcgtgctggtgaccgagctgatgaccagcggcaccctgaagacctacctgaagagattcaaggtgatgaagcccaaggtgctgagaagctggtgcagacagatcctgaagggcctgctgttcctgcacaccagaaccccccccatcatccacagagacctgaagtgcgacaacatcttcatcaccggccccaccggcagcgtgaagatcggcgacctgggcctggccaccctgaagagagccagcttcgccaagagcgtgatcggcacccccgagttcatggcccccgagatgtacgaggagcactacgacgagagcgtggacgtgtacgccttcggcatgtgcatgctggagatggccaccagcgagtacccctacagcgagtgccagaacgccgcccagatctacagaaaggtgacctgcggcatcaagcccgccagcttcgagaaggtgcacgaccccgagatcaaggagatcatcggcgagtgcatctgcaagaacaaggaggagagatacgagatcaaggacctgctgagccacgccttcttcgccgaggacaccggcgtgagagtggagctggccgaggaggaccacggcagaaagagcaccatcgccctgagactgtgggtggaggaccccaagaagctgaagggcaagcccaaggacaacggcgccatcgagttcaccttcgacctggagaaggagacccccgacgaggtggcccaggagatgatcgagagcggcttcttccacgagagcgacgtgaagatcgtggccaagagcatcagagacagagtggccctgatccagtggagaagagagagaatctggcccgccctgcagcccaaggagcagcaggacgtgggcagccccgacaaggccagaggcccccccgtgcccctgcaggtgcaggtgacctaccacgcccaggccggccagcccggcccccccgagcccgaggagcccgaggccgaccagcacctgctgccccccaccctgcccaccagcgccaccagcctggccagcgacagcaccttcgacagcggccagggcagcaccgtgtacagcgacagccagagcagccagcagagcgtgatgctgggcagcctggccgacgccgcccccagccccgcccagtgcgtgtgcagcccccccgtgagcgagggccccgtgctgccccagagcctgcccagcctgggcgcctaccagcagcccaccgccgcccccggcctgcccgtgggcagcgtgcccgcccccgcctgcccccccagcctgcagcagcacttccccgaccccgccatgagcttcgcccccgtgctgcccccccccagcacccccatgcccaccggccccggccagcccgccccccccggccagcagcccccccccctggcccagcccacccccctgccccaggtgctggccccccagcccgtggtgcccctgcagcccgtgcccccccacctgcccccctacctggcccccgccagccaggtgggcgcccccgcccagctgaagcccctgcagatgccccaggcccccctgcagcccctggcccaggtgcccccccagatgccccccatccccgtggtgccccccatcacccccctggccggcatcgacggcctgccccccgccctgcccgacctgcccaccgccaccgtgccccccgtgccccccccccagtacttcagccccgccgtgatcctgcccagcctggccgcccccctgccccccgccagccccgccctgcccctgcaggccgtgaagctgccccacccccccggcgcccccctggccatgccctgcagaaccatcgtgcccaacgcccccgccaccatccccctgctggccgtggccccccccggcgtggccgccctgagcatccacagcgccgtggcccagctgcccggccagcccgtgtaccccgccgccttcccccagatggcccccaccgacgtgccccccagcccccaccacaccgtgcagaacatgagagccacccccccccagcccgccctgcccccccagcccaccctgcccccccagcccgtgctgcccccccagcccaccctgcccccccagcccgtgctgcccccccagcccaccagacccccccagcccgtgctgcccccccagcccatgctgcccccccagcccgtgctgcccccccagcccgccctgcccgtgagacccgagcccctgcagccccacctgcccgagcaggccgcccccgccgccacccccggcagccagatcctgctgggccaccccgccccctacgccgtggacgtggccgcccaggtgcccaccgtgcccgtgccccccgccgccgtgctgagcccccccctgcccgaggtgctgctgcccgccgcccccgagctgctgccccagttccccagcagcctggccaccgtgagcgccagcgtgcagagcgtgcccacccagaccgccaccctgctgccccccgccaacccccccctgcccggcggccccggcatcgccagcccctgccccaccgtgcagctgaccgtggagcccgtgcaggaggagcaggccagccaggacaagccccccggcctgccccagagctgcgagagctacggcggcagcgacgtgaccagcggcaaggagctgagcgacagctgcgagggcgccttcggcggcggcagactggagggcagagccgccagaaagcaccacagaagaagcaccagagccagaagcagacaggagagagccagcagacccagactgaccatcctgaacgtgtgcaacaccggcgacaagatggtggagtgccagctggagacccacaaccacaagatggtgaccttcaagttcgacctggacggcgacgcccccgacgagatcgccacctacatggtggagcacgacttcatcctgcaggccgagagagagaccttcatcgagcagatgaaggacgtgatggacaaggccgaggacatgctgagcgaggacaccgacgccgacagaggcagcgaccccggcaccagccccccccacctgagcacctgcggcctgggcaccggcgaggagagcagacagagccaggccaacgcccccgtgtaccagcagaacgtgctgcacaccggcaagagatggttcatcatctgccccgtggccgagcaccccgcccccgaggcccccgagagcagcccccccctgcccctgagcagcctgccccccgaggccagccagggcccctgcagaggcctgaccctgccctgcctgccctggagaagagccgcctgcggcgccgtgttcctgagcctgttcagcgccgagagcgcccagagcaagcagccccccgacagcgccccctacaaggaccagctgagcagcaaggagcagcccagcttcctggccagccagcagctgctgagccaggccggccccagcaacccccccggcgccccccccgcccccctggcccccagcagcccccccgtgaccgccctgccccaggacggcgccgcccccgccaccagcaccatgcccgagcccgccagcggcaccgccagccaggccggcggccccggcaccccccagggcctgaccagcgagctggagaccagccagcccctggccgagacccacgaggcccccctggccgtgcagcccctggtggtgggcctggccccctgcacccccgcccccgaggccgccagcaccagagacgccagcgcccccagagagcccctgcccccccccgcccccgagcccagcccccacagcggcaccccccagcccgccctgggccagcccgcccccctgctgcccgccgccgtgggcgccgtgagcctggccaccagccagctgcccagcccccccctgggccccaccgtgcccccccagccccccagcgccctggagagcgacggcgagggccccccccccagagtgggcttcgtggacagcaccatcaagagcctggacgagaagctgagaaccctgctgtaccaggagcacgtgcccaccagcagcgccagcgccggcacccccgtggaggtgggcgacagagacttcaccctggagcccctgagaggcgaccagcccagaagcgaggtgtgcggcggcgacctggccctgccccccgtgcccaaggaggccgtgagcggcagagtgcagctgccccagcccctggtggagaagagcgagctggcccccaccagaggcgccgtgatggagcagggcaccagcagcagcatgaccgccgagagcagccccagaagcatgctgggctacgacagagacggcagacaggtggccagcgacagccacgtggtgcccagcgtgccccaggacgtgcccgccttcgtgagacccgccagagtggagcccaccgacagagacggcggcgaggccggcgagagcagcgccgagcccccccccagcgacatgggcaccgtgggcggccaggccagccacccccagaccctgggcgccagagccctgggcagccccagaaagagacccgagcagcaggacgtgagcagccccgccaagaccgtgggcagattcagcgtggtgagcacccaggacgagtggaccctggccagcccccacagcctgagatacagcgccccccccgacgtgtacctggacgaggcccccagcagccccgacgtgaagctggccgtgagaagagcccagaccgccagcagcatcgaggtgggcgtgggcgagcccgtgagcagcgacagcggcgacgagggccccagagccagaccccccgtgcagaagcaggccagcctgcccgtgagcggcagcgtggccggcgacttcgtgaagaaggccaccgccttcctgcagagacccagcagagccggcagcctgggccccgagacccccagcagagtgggcatgaaggtgcccaccatcagcgtgaccagcttccacagccagagcagctacatcagcagcgacaacgacagcgagctggaggacgccgacatcaagaaggagctgcagagcctgagagagaagcacctgaaggagatcagcgagctgcagagccagcagaagcaggagatcgaggccctgtacagaagactgggcaagcccctgccccccaacgtgggcttcttccacaccgccccccccaccggcagaagaagaaagaccagcaagagcaagctgaaggccggcaagctgctgaaccccctggtgagacagctgaaggtggtggccagcagcaccggccacctggccgacagcagcagaggcccccccgccaaggaccccgcccaggccagcgtgggcctgaccgccgacagcaccggcctgagcggcaaggccgtgcagacccagcagccctgcagcgtgagagccagcctgagcagcgacatctgcagcggcctggccagcgacggcggcggcgccagaggccagggctggaccgtgtaccaccccaccagcgagagagtgacctacaagagcagcagcaagcccagagccagattcctgagcggccccgtgagcgtgagcatctggagcgccctgaagagactgtgcctgggcaaggagcacagcagcagaagcagcaccagcagcctggcccccggccccgagcccggcccccagcccgccctgcacgtgcaggcccaggtgaacaacagcaacaacaagaagggcaccttcaccgacgacctgcacaagctggtggacgagtggaccagcaagaccgtgggcgccgcccagctgaagcccaccctgaaccagctgaagcagacccagaagctgcaggacatggaggcccaggccggctgggccgcccccggcgaggccagagccatgaccgcccccagagccggcgtgggcatgcccagactgccccccgcccccggccccctgagcaccaccgtgatccccggcgccgcccccaccctgagcgtgcccacccccgacggcgccctgggcaccgccagaagaaaccaggtgtggttcggcctgagagtgccccccaccgcctgctgcggccacagcacccagcccagaggcggccagagagtgggcagcaagaccgccagcttcgccgccagcgaccccgtgagaagctag

SEQ ID NO: 101128 - DNA, 5601 bp, Artificial Sequence
  derived and/or modified sequence
atggccaccagcgagtacccctacagcgagtgccagaacgccgcccagatctacagaaaggtgacctgcggcatcaagcccgccagcttcgagaaggtgcacgaccccgagatcaaggagatcatcggcgagtgcatctgcaagaacaaggaggagagatacgagatcaaggacctgctgagccacgccttcttcgccgaggacaccggcgtgagagtggagctggccgaggaggaccacggcagaaagagcaccatcgccctgagactgtgggtggaggaccccaagaagctgaagggcaagcccaaggacaacggcgccatcgagttcaccttcgacctggagaaggagacccccgacgaggtggcccaggagatgatcgagagcggcttcttccacgagagcgacgtgaagatcgtggccaagagcatcagagacagagtggccctgatccagtggagaagagagagaatctggcccgccctgcagcccaaggagcagcaggacgtgggcagccccgacaaggccagaggcccccccgtgcccctgcaggtgcaggtgacctaccacgcccaggccggccagcccggcccccccgagcccgaggagcccgaggccgaccagcacctgctgccccccaccctgcccaccagcgccaccagcctggccagcgacagcaccttcgacagcggccagggcagcaccgtgtacagcgacagccagagcagccagcagagcgtgatgctgggcagcctggccgacgccgcccccagccccgcccagtgcgtgtgcagcccccccgtgagcgagggccccgtgctgccccagagcctgcccagcctgggcgcctaccagcagcccaccgccgcccccggcctgcccgtgggcagcgtgcccgcccccgcctgcccccccagcctgcagcagcacttccccgaccccgccatgagcttcgcccccgtgctgcccccccccagcacccccatgcccaccggccccggccagcccgccccccccggccagcagcccccccccctggcccagcccacccccctgccccaggtgctggccccccagcccgtggtgcccctgcagcccgtgcccccccacctgcccccctacctggcccccgccagccaggtgggcgcccccgcccagctgaagcccctgcagatgccccaggcccccctgcagcccctggcccaggtgcccccccagatgccccccatccccgtggtgccccccatcacccccctggccggcatcgacggcctgccccccgccctgcccgacctgcccaccgccaccgtgccccccgtgccccccccccagtacttcagccccgccgtgatcctgcccagcctggccgcccccctgccccccgccagccccgccctgcccctgcaggccgtgaagctgccccacccccccggcgcccccctggccatgccctgcagaaccatcgtgcccaacgcccccgccaccatccccctgctggccgtggccccccccggcgtggccgccctgagcatccacagcgccgtggcccagctgcccggccagcccgtgtaccccgccgccttcccccagatggcccccaccgacgtgccccccagcccccaccacaccgtgcagaacatgagagccacccccccccagcccgccctgcccccccagcccaccctgcccccccagcccgtgctgcccccccagcccaccctgcccccccagcccgtgctgcccccccagcccaccagacccccccagcccgtgctgcccccccagcccatgctgcccccccagcccgtgctgcccccccagcccgccctgcccgtgagacccgagcccctgcagccccacctgcccgagcaggccgcccccgccgccacccccggcagccagatcctgctgggccaccccgccccctacgccgtggacgtggccgcccaggtgcccaccgtgcccgtgccccccgccgccgtgctgagcccccccctgcccgaggtgctgctgcccgccgcccccgagctgctgccccagttccccagcagcctggccaccgtgagcgccagcgtgcagagcgtgcccacccagaccgccaccctgctgccccccgccaacccccccctgcccggcggccccggcatcgccagcccctgccccaccgtgcagctgaccgtggagcccgtgcaggaggagcaggccagccaggacaagccccccggcctgccccagagctgcgagagctacggcggcagcgacgtgaccagcggcaaggagctgagcgacagctgcgagggcgccttcggcggcggcagactggagggcagagccgccagaaagcaccacagaagaagcaccagagccagaagcagacaggagagagccagcagacccagactgaccatcctgaacgtgtgcaacaccggcgacaagatggtggagtgccagctggagacccacaaccacaagatggtgaccttcaagttcgacctggacggcgacgcccccgacgagatcgccacctacatggtggagcacgacttcatcctgcaggccgagagagagaccttcatcgagcagatgaaggacgtgatggacaaggccgaggacatgctgagcgaggacaccgacgccgacagaggcagcgaccccggcaccagccccccccacctgagcacctgcggcctgggcaccggcgaggagagcagacagagccaggccaacgcccccgtgtaccagcagaacgtgctgcacaccggcaagagatggttcatcatctgccccgtggccgagcaccccgcccccgaggcccccgagagcagcccccccctgcccctgagcagcctgccccccgaggccagccagggcccctgcagaggcctgaccctgccctgcctgccctggagaagagccgcctgcggcgccgtgttcctgagcctgttcagcgccgagagcgcccagagcaagcagccccccgacagcgccccctacaaggaccagctgagcagcaaggagcagcccagcttcctggccagccagcagctgctgagccaggccggccccagcaacccccccggcgccccccccgcccccctggcccccagcagcccccccgtgaccgccctgccccaggacggcgccgcccccgccaccagcaccatgcccgagcccgccagcggcaccgccagccaggccggcggccccggcaccccccagggcctgaccagcgagctggagaccagccagcccctggccgagacccacgaggcccccctggccgtgcagcccctggtggtgggcctggccccctgcacccccgcccccgaggccgccagcaccagagacgccagcgcccccagagagcccctgcccccccccgcccccgagcccagcccccacagcggcaccccccagcccgccctgggccagcccgcccccctgctgcccgccgccgtgggcgccgtgagcctggccaccagccagctgcccagcccccccctgggccccaccgtgcccccccagccccccagcgccctggagagcgacggcgagggccccccccccagagtgggcttcgtggacagcaccatcaagagcctggacgagaagctgagaaccctgctgtaccaggagcacgtgcccaccagcagcgccagcgccggcacccccgtggaggtgggcgacagagacttcaccctggagcccctgagaggcgaccagcccagaagcgaggtgtgcggcggcgacctggccctgccccccgtgcccaaggaggccgtgagcggcagagtgcagctgccccagcccctggtggagaagagcgagctggcccccaccagaggcgccgtgatggagcagggcaccagcagcagcatgaccgccgagagcagccccagaagcatgctgggctacgacagagacggcagacaggtggccagcgacagccacgtggtgcccagcgtgccccaggacgtgcccgccttcgtgagacccgccagagtggagcccaccgacagagacggcggcgaggccggcgagagcagcgccgagcccccccccagcgacatgggcaccgtgggcggccaggccagccacccccagaccctgggcgccagagccctgggcagccccagaaagagacccgagcagcaggacgtgagcagccccgccaagaccgtgggcagattcagcgtggtgagcacccaggacgagtggaccctggccagcccccacagcctgagatacagcgccccccccgacgtgtacctggacgaggcccccagcagccccgacgtgaagctggccgtgagaagagcccagaccgccagcagcatcgaggtgggcgtgggcgagcccgtgagcagcgacagcggcgacgagggccccagagccagaccccccgtgcagaagcaggccagcctgcccgtgagcggcagcgtggccggcgacttcgtgaagaaggccaccgccttcctgcagagacccagcagagccggcagcctgggccccgagacccccagcagagtgggcatgaaggtgcccaccatcagcgtgaccagcttccacagccagagcagctacatcagcagcgacaacgacagcgagctggaggacgccgacatcaagaaggagctgcagagcctgagagagaagcacctgaaggagatcagcgagctgcagagccagcagaagcaggagatcgaggccctgtacagaagactgggcaagcccctgccccccaacgtgggcttcttccacaccgccccccccaccggcagaagaagaaagaccagcaagagcaagctgaaggccggcaagctgctgaaccccctggtgagacagctgaaggtggtggccagcagcaccggccacctggccgacagcagcagaggcccccccgccaaggaccccgcccaggccagcgtgggcctgaccgccgacagcaccggcctgagcggcaaggccgtgcagacccagcagccctgcagcgtgagagccagcctgagcagcgacatctgcagcggcctggccagcgacggcggcggcgccagaggccagggctggaccgtgtaccaccccaccagcgagagagtgacctacaagagcagcagcaagcccagagccagattcctgagcggccccgtgagcgtgagcatctggagcgccctgaagagactgtgcctgggcaaggagcacagcagcagaagcagcaccagcagcctggcccccggccccgagcccggcccccagcccgccctgcacgtgcaggcccaggtgaacaacagcaacaacaagaagggcaccttcaccgacgacctgcacaagctggtggacgagtggaccagcaagaccgtgggcgccgcccagctgaagcccaccctgaaccagctgaagcagacccagaagctgcaggacatggaggcccaggccggctgggccgcccccggcgaggccagagccatgaccgcccccagagccggcgtgggcatgcccagactgccccccgcccccggccccctgagcaccaccgtgatccccggcgccgcccccaccctgagcgtgcccacccccgaccccgagagcgagaagcccgactag

SEQ ID NO: 101129 - DNA, 6894 bp, Artificial Sequence
  derived and/or modified sequence
atggatggcgacggggggagacgggacgttcctgggaccctaatggaacctggccgtggagccggccccgcgggcatggcagagccccgcgcaaaagctgccaggcctggtccccagcgctttctccggaggtcggtcgtggagagtgaccaggaggaaccgccagggctagaggccgccgaggctccgggtcctcagccgcctcaacccctgcaaaggcgcgttctgcttctgtgcaaaacccggcggttgatcgccgaacgtgcaagaggccgccccgccgcaccagcgcccgcagccctggtcgcccaacccggcgccccgggagcccctgccgacgcaggccccgagccggttggtacccaagagccgggacccgaccccatagctgctgccgtggagaccgctcctgcaccagacggaggtccccgcgaggaggctgccgctaccgtcaggaaggaggacgaaggagctgcggaagccaagccggagcccggccggaccagaagggatgaaccagaagaggaggaggacgacgaggacgacctgaaggctgtggcaacctcacttgacgggcgcttcctgaagttcgacatagaactgggacggggctcttttaaaacggtgtataaaggacttgatacagagacttgggttgaggtggcctggtgtgagcttcaagataggaaactcacaaagctggagcgccagaggttcaaggaggaggctgagatgttaaagggcctccaacaccctaatatagtgcggttctacgatttctgggaatctagtgcaaagggaaagcgctgcattgtgctggtcaccgagctgatgacttctggcaccctcaagacatatctcaaacgattcaaagttatgaagccgaaggtgctgaggagctggtgtcgccagatcctgaaaggactcttgtttctgcatacacggacgcctccaataattcaccgcgatctcaagtgcgataatatcttcattaccgggcccacaggttcagtgaaaattggcgacctcggacttgctactctgaagcgagctagtttcgccaagtccgtgatcggaaccccagagttcatggcccccgaaatgtatgaggagcattacgacgagagcgtggatgtgtacgcctttgggatgtgtatgctcgaaatggccacatcagagtatccgtatagtgaatgtcagaatgctgcacagatctataggaaagttacttgtggcatcaaacccgcatcattcgagaaggttcacgatccagaaatcaaagaaatcattggcgaatgcatctgcaaaaacaaggaagagcgctatgagatcaaagatctcctctctcatgcatttttcgccgaagataccggggtccgtgtggagctggcagaggaagatcatggaagaaaatctactatcgctttaaggttatgggtcgaagatccgaaaaagttgaaaggaaaaccaaaagataatggcgctatagagttcacctttgaccttgagaaggagaccccggacgaggtcgcacaagagatgattgagtcaggctttttccatgagtcagacgtgaaaatcgtggctaaaagtattagagaccgagtggccctaattcagtggcggagagagaggatttggcctgcccttcagccaaaggaacagcaggatgttggttcccccgacaaggctaggggccctcccgtaccccttcaggttcaggtgacctaccatgcgcaagccgggcagccagggccccccgaaccagaggagcccgaggcggaccagcatctgttacctccgacactgccgaccagtgcgacatccttggcatccgactctaccttcgatagcggacaaggtagcaccgtgtatagcgattctcagagttcccagcagagcgtgatgctgggaagtctggcggatgccgccccttcccccgctcagtgcgtgtgttctcctccagtgagtgagggaccagtcctccctcagtctttgcccagcctgggcgcatatcagcaacccacagcagcccctggcttgccggtaggctcagtgcccgcaccggcttgccctccctctcttcagcagcactttcctgatcccgccatgtcttttgcacccgtgttaccacccccttccaccccgatgcctacaggacctggacagcctgcccccccaggacaacaacctcctcccctggcacagcccacccctttaccccaggtgcttgcacctcagccggtggtaccactgcagcctgtgcccccccacctccctccgtatctggcacctgcttctcaagtgggcgcccctgcccagctgaagccccttcagatgccccaagcacctttacagcctttggcacaagtgcccccccagatgcctcccattccggtagtgccacctatcacaccgttggccggaatcgatgggctccctcccgcactgccagacctcccaacagccacagtgcccccggtgcctccgccccaatacttttcccccgcagtcatcttaccatccttggcagcccccctcccacctgcctccccggcattgccactgcaggcagtgaaactcccccaccccccaggtgctccactcgcaatgccttgccgtactatagtcccgaacgcccctgctactattccacttctggcagtggctccacccggggtggctgctttgagtatccatagcgctgtggcccagctgcccggacagccggtctaccccgcagcatttcctcaaatggctccaaccgacgtcccaccctctccacatcacacagtgcagaatatgcgagccacccctccgcagcccgcacttccccctcagccaactctgcctccccaacccgttctgccacctcaacctactctgcccccccaaccagtcctccccccgcagccgaccagaccacctcaacccgtactccccccccaacccatgctacctccccagccagtcctccccccgcagccagcattacccgttcggccagagccccttcagccccatctgcctgagcaagctgccccagcagcaacgcccggctcccagattttgttagggcatccagcgccatacgcggttgacgttgccgcgcaggtcccaaccgtccccgtgcctcccgccgctgtgttgtcccctcccttgcccgaagttttactgccagcagcacccgagctattgccacagtttccttcaagcttagctacagtttccgctagcgtccaaagtgtgccgacgcagaccgccaccctcctgcccccggcaaaccctccattacctggggggccaggaatagccagtccatgccccacagtgcagttaaccgtcgagccagtgcaggaagagcaagccagccaggacaagccccccggcctaccgcagtcatgtgaatcgtacggaggttccgatgtgacttctggaaaagaactaagtgattcgtgtgagggagcattcgggggtggtcgattggaaggacgagctgcacggaagcatcatcgccggtccaccagggcccgttcaaggcaggaacgggccagccgcccccgtctgacgatcctcaatgtgtgtaataccggagacaagatggtggagtgtcagcttgaaacccataatcataagatggtcaccttcaagttcgatctggacggtgatgctcccgatgaaattgccacatatatggtcgaacacgattttatccttcaggctgagagggagacgttcatcgaacagatgaaggatgttatggataaagccgaagatatgctgtcagaagataccgatgcagataggggtagcgatccagggaccagcccacctcatctgagtacttgtggcctggggactggggaggagtcacgacagagccaggccaacgctcccgtctaccagcagaacgtcctccacactggcaaaaggtggtttatcatttgtcctgttgccgagcatcctgctcctgaggccccagaatccagccctccactccccctcagctccttacccccagaagctagtcaggggccgtgcagggggctcaccttgccctgccttccatggaggcgcgccgcctgtggggctgtctttctgtctcttttcagtgccgagtcagcccaaagcaaacaaccccctgatagtgccccctataaggaccagctttcatccaaagagcagccatccttcctggcgtcccaacagctgctctctcaggctggtccttccaacccgccaggcgccccgcctgcccccctagcacctagctcacctcctgtgaccgccctgccgcaggatggggccgccccagcgaccagtaccatgccagaaccagcctcggggaccgcatcacaggccggcggtccaggaaccccccagggactgacatctgagttggagacaagccaaccactggccgagacccatgaggcacccctggctgtgcagccgctagtcgtggggttggccccctgtacccccgccccggaggcagcttcaactcgggacgcctctgccccacgtgaacctctacccccccccgcgcccgagccctcacctcattctgggacgccacagcctgcactgggccaacctgcccctctgctgcctgccgctgttggagccgtctctttggccacctcccagcttccgagtccccctctgggcccgaccgtccccccacagcctccttcagccctggaaagcgatggggaaggccctcccccgcgagtgggttttgtggactctactatcaaaagtctggacgagaagctccgaaccctgctctatcaggagcacgtgcctacctcctccgccagcgcagggacccctgtcgaggtgggtgaccgcgacttcacactggagccattgcgcggggatcaaccgcgctcagaggtgtgtggaggagacctggccctgccgccagtgccaaaagaggccgtgtccgggagagtacaactgccgcaacccctggtcgaaaagtcagagctggcgcctacaaggggtgctgttatggaacagggaacctcatcaagcatgacggctgagagttcgccaagatctatgctggggtacgatcgcgacggtaggcaagtggcttccgatagccatgtggtgccctcagtcccccaggacgtccccgcctttgtgcgaccggcccgcgtggaaccgaccgacagggacggcggcgaggccggggaatcctccgctgaacctcccccctccgatatgggcaccgtggggggccaggcctcccatccacagactctcggcgcccgagccttggggagccctcggaaacggcctgaacagcaagatgtctcgtcgcctgccaaaacagtgggacggttttctgttgtgtccacccaagacgaatggacacttgcttctcctcattcactgcggtactctgcccctccggacgtctaccttgacgaggctcctagcagcccggacgtgaagctggcagttcgccgagcgcaaacagccagctcgatagaggtaggagttggagagcccgttagttcagattctggagacgagggacctagagcacggccacccgtgcagaaacaggccagcctgcctgtttcgggctctgtggctggggacttcgtcaaaaaggcgaccgcatttttgcagaggccatcccgcgctggtagcttgggaccggagactccctcccgggtggggatgaaagtcccaacaatttcagtgaccagctttcatagccagagttcttatatctcctcagacaacgacagcgagcttgaggacgccgacatcaagaaagagttgcaaagcctgcgagagaaacaccttaaggaaatctctgagctgcaaagccagcagaagcaggagatagaagccctctaccgtagactgggcaagccactgcctcctaatgtaggattctttcacaccgcacctccaacaggtcgccgcaggaaaacttccaagtccaagctgaaggctggaaagctactgaatcctctggtccgccagctcaaggttgtcgcaagctcaaccggccacctggcggatagctctcggggacccccagctaaagaccctgctcaggccagcgtaggcctgacagcagattctactggactctcaggaaaggccgttcagacccagcagccttgttctgttcgcgcaagtctgagctcagacatctgttcggggctcgcctcggacggtggaggcgcgagaggccagggttggactgtctaccacccaacctcagagagagtgacatataagtcaagttcaaagcccagggctcgcttcctctctgggcccgtttctgtgtctatttggtccgctctgaaacggctctgtctcggcaaggagcactcttcccgtagtagtacgtcttccctggcacccgggccagaacccggcccacagcccgccctgcatgtccaggcacaagtgaacaattccaacaacaaaaaaggtacatttacggatgacctccacaagcttgtggacgagtggacctccaaaacagtcggagcggcccagttgaagcctacactgaatcaattgaaacagacccaaaaactacaggacatggaagcgcaggctggttgggcagcccccggcgaagcacgggctatgaccgctcctagagctggtgtcggtatgcctagactaccacccgctccaggccctctatcaactacggtgattccaggagcggcccccactctgtcagtgcctacgcctgacggggctctggggactgcaaggcgaaaccaggtttggttcggtttgcgcgtgccaccaacggcttgctgcggccacagtacccagccgagaggggggcagcgcgttggaagcaagaccgcgagctttgcggcctccgatccggtacggtcctag

SEQ ID NO: 101130 - DNA, 5601 bp, Artificial Sequence
  derived and/or modified sequence
atggccactagtgaatacccttactccgaatgtcagaatgccgcccagatctacagaaaagtgacctgcgggattaagcccgcctcgtttgaaaaggtgcacgatccagaaataaaagagatcatcggcgaatgtatctgcaagaataaagaagaacgctatgaaataaaagaccttctgtctcatgcgtttttcgccgaagataccggggtgagagtcgagctggccgaggaagaccatggacggaaaagcaccattgccctgcgtttgtgggtagaggaccctaagaagctgaaaggtaagcccaaggataacggcgctatcgagtttacctttgaccttgaaaaggagacgcctgacgaagttgcgcaggagatgattgagtccggctttttccacgagagcgatgtaaagatcgttgcaaagtccatccgggatagagtggccttgatccaatggaggcgggagcggatctggccggcgttgcaaccaaaggaacaacaggatgtgggctcaccagacaaagcgcgcggcccacccgtgcctcttcaagtgcaggtaacttatcacgcccaggccggtcaaccagggccacctgagccagaggaaccggaagccgatcagcaccttctgcctcctactcttccgacatccgcaactagcctagcctctgacagtactttcgattccggacagggatctacggtttactccgacagccagtcatcccaacagtcggtcatgttggggagcttggccgacgctgcaccctcgccggcacagtgcgtctgctcacctcccgtctcagaaggaccagtgctccctcagtccctcccatcactcggcgcctaccaacagccaacggcggcgcctggcttgcccgttgggagcgtgcctgcacctgcatgtccgccgtccttgcagcagcacttcccagacccagctatgagttttgccccagtacttccgcctccatcgacccctatgcctacaggccctggtcagcctgctccacctggacagcaaccccctccactggcacaacccaccccactcccgcaggtgttggcccctcaaccagtagttccactgcagcctgttcccccccacctgcctccctacctcgccccagctagtcaggtgggcgcccctgcccagctgaagcccctacagatgccacaggctccactgcaaccactcgcccaggttccaccgcagatgccccccatacctgttgtgcccccgattacaccccttgccgggatcgatgggcttcccccagctctgcctgatctgcctacagcgacagttccccctgtgcctccaccgcaatacttctccccagccgtgattctcccttccttggccgcgcccctgccaccagctagccccgcccttcctctacaggccgtgaaactcccacacccccctggcgccccgctcgctatgccgtgcaggaccatcgtacccaacgccccggccaccataccactattagcagtggctccaccaggtgttgctgctctgtcaatccattcagcagtggctcaactgccaggtcagcctgtgtatcccgccgctttcccccaaatggcacctaccgatgttccgccgtctccacatcataccgttcagaacatgagagctaccccaccgcaaccggcattgccaccccagccaaccctcccaccccagcccgtactgcctcctcagcccacacttccccctcagcctgtgctcccccctcagcccacgaggcctccacagccagttcttccccctcaaccgatgttacctcctcagcccgtcctccctccgcagcctgctctgcccgtcaggccggaacccctgcaacctcatctccccgaacaggcggctcctgcagcaacgcccggaagtcagatcctgctcgggcaccccgcaccttatgcggtggatgtcgccgcccaggtgcctacggtgcctgtgcctcccgccgctgtattaagccctccgctccccgaggtgttgctccccgcggcacctgaattattgccccagttcccaagtagcctcgctaccgtttccgctagcgtacaatctgtgcctacgcagacggccacactactgccgcctgcaaacccccctctccctggcggaccggggatcgcctccccatgccctactgtccagctgaccgtcgagcccgtgcaggaggagcaggcctcacaggataaaccgccagggctgccacagtcatgcgagagctacggcggatcagacgtgacaagtggaaaggagctgtctgactcatgcgagggggcttttggagggggcagattggaggggagagccgcaagaaaacatcacagacggtcaacaagagctcggtcacggcaggagcgcgcctcccgcccaagactgaccattctaaatgtgtgcaataccggcgacaagatggtggaatgccagctcgaaactcacaaccacaaaatggtgacattcaaattcgatttagacggggatgcccctgatgagatcgctacctatatggtggaacatgacttcatcctgcaagccgagagggagacattcatagaacaaatgaaggacgtgatggataaggcagaagacatgcttagtgaggatactgatgcggaccggggatccgacccaggaacttcccctccccacctgtccacctgcggtttaggtactggggaagaaagtaggcaaagtcaggccaacgccccagtataccagcagaatgtgctccacacaggcaagaggtggtttataatttgtcctgtggccgagcatccagcccccgaagcaccggagtcttctccccccttacctctttcctctctgcctcctgaagctagccagggcccatgtcgtgggctcacactgccttgcctcccttggagaagggccgcctgcggcgctgtcttcctgtcacttttctccgccgagtcagcccagtccaagcagccacccgactccgcgccatataaagatcagctgagttccaaggagcagccttcatttttagcgagtcagcagctcctctcccaggccggaccctctaatcctccgggcgcccccccagctcccctggcccccagcagcccccccgtgaccgctttaccccaggacggggctgcccctgccaccagcaccatgccagaaccagcctccggaaccgccagccaagctggcgggcctgggacaccccagggtctgaccagcgagctggaaactagtcagccactcgctgagactcatgaagcacctctcgctgtgcagccccttgttgtcgggctggctccctgtacaccagcccccgaggcggcctcaacacgagacgcctctgctccccgggagcccctgcctccacccgccccagagccgagtcctcactctggcactccgcagcccgctttgggccagccagccccactcttgccagccgccgtcggcgcagtaagcctggcaacctctcagttgcccagccctcctcttgggcccacagtgccgccgcaacccccctccgccctggagagcgacggcgaaggcccccccccacgcgtagggttcgttgacagcactatcaaatctctcgatgagaaactccgaaccctcctctaccaagaacatgtgcccaccagctccgcgagcgcagggacgcctgtcgaagtaggcgacagagattttaccctggaacccctgcgtggagaccagccacgttctgaggtttgcggcggcgatctggccctccctcccgtaccaaaggaagccgtgtccggacgcgtgcagctgccacagcccttggttgagaagagcgagttggcccctacccgcggggcagtcatggaacagggaaccagctcatctatgactgcagagagttctccccggagcatgctcggttatgaccgcgacggtagacaagtggcctctgactcacatgtggtgcctagcgtcccacaggatgtgcctgcctttgtcagaccggcccgagtggagccgactgacagggatgggggtgaagctggagagtcatccgctgagcctccgcctagtgatatggggactgtgggtggacaggcaagtcaccctcagacactcggcgcccgggcactggggagcccaaggaagcgtcccgagcagcaggacgtctcaagccccgctaaaacggtgggacgcttctccgttgtgagcacccaggatgaatggacactggcctcgccccattctctgcgttattctgcgccccccgatgtgtatctggacgaggccccttcttctcccgatgttaagcttgcggtgagaagggctcagacagcgtcctcgatcgaagtgggtgtgggggagcctgtcagctcagattcaggcgatgaagggccaagggcaagacccccagtgcagaaacaggcctccctgccagtgtctggttcagttgcgggtgactttgtcaaaaaggccaccgcatttctacaacgtccatcacgcgctggctccctgggccctgaaaccccaagtcgggtggggatgaaggtgccgactatctcagtcaccagctttcatagtcaatcaagttatatttcctccgacaatgatagcgagcttgaggatgccgatatcaagaaggagttacagtctcttcgggagaagcacctcaaagagatttcagaacttcagtcacagcagaagcaggagatcgaggccttgtacagacggctgggaaagcctctgccaccgaacgtgggattttttcatacggcgccccccaccggacgcaggcgcaaaacatcaaaatcaaagctcaaagctggaaagctcctaaacccattggtaaggcagcttaaggtggttgcctcctctaccggccacctcgctgacagcagcagaggacctccggccaaggacccagctcaggcttctgtcggtctcaccgctgacagcactggccttagcgggaaggccgtgcaaactcagcagccgtgctctgtgagggcatccctctccagcgacatatgcagcggccttgcttccgacggcggaggcgccaggggccagggctggacagtctatcatcctacgtctgagagagtaacctacaaaagctcctcgaaaccccgcgcaaggtttctgtccggacccgtctccgtgagcatctggtctgccctcaagcggctctgtttgggaaaggagcacagtagccgctctagtacatccagtctggcccccgggcccgagcccgggccacagccggcactccacgtgcaggcccaagtgaacaattcaaacaataaaaagggaaccttcactgatgaccttcacaagctcgtggatgagtggacttccaagactgtgggtgccgcccagttgaagccaacgctgaatcagctgaaacagactcagaagctccaagacatggaggcgcaggcgggttgggccgcccctggagaggcaagagccatgaccgccccacgcgctggcgtagggatgccgcgattgcctcccgctcctggacccctctccaccacagtcatccctggcgccgcgcccacattgagcgttcctaccccagaccccgagagcgagaaaccggactag

SEQ ID NO: 101131 - DNA, 6894 bp, Artificial Sequence
  derived and/or modified sequence
atggatggagatggcggcagaagagatgtgcccggcaccctgatggagcccggcagaggagctggccctgctggcatggccgagccccgggccaaggccgcccggcccggcccccagcgcttcctgcggcgctctgtggtggagagtgaccaggaggagcccccaggcctggaggccgctgaggcccctggcccccagcccccccagcccctgcagaggagagtgctgctgctgtgcaagacccggcggctgattgctgagcgggcccggggccggcctgctgccccagccccagctgccctggtggcccagcccggggcccctggggccccagcagatgctggccctgagcctgtgggcacccaggagcccggccctgaccccatcgctgctgctgtggagacagccccagccccagatggcggcccccgggaggaggccgccgccaccgtgaggaaggaggatgaaggagctgctgaggccaagccagagcccggccgcaccaggagagatgagcctgaggaggaggaggatgatgaagatgacctgaaggctgtggccaccagcctggatggccgcttcctgaagtttgatattgagctgggccggggcagcttcaagacagtgtacaagggcctggacacagagacctgggtggaggtggcctggtgtgagctgcaggacaggaagctgaccaagctggagcggcagcgcttcaaggaggaggccgagatgctgaagggcctgcagcaccccaacatcgtgcgcttctatgacttctgggagagcagcgccaagggcaagcgctgcatcgtgctggtgacagagctgatgaccagcggcaccctgaagacctacctgaagcgcttcaaggtgatgaagcccaaggtgctgcgctcctggtgccggcagatcctgaagggcctgctcttcctgcacaccaggaccccacccatcatccaccgggacctgaagtgtgacaacatcttcatcaccggccccactggatctgtgaagatcggggacctgggcctggccaccctgaagagggccagctttgccaagagcgtcatcggcaccccagagttcatggcccctgagatgtatgaggagcactatgatgagagcgtggatgtgtatgccttcggcatgtgcatgctggagatggccaccagcgagtacccctacagcgagtgccagaatgctgcccagatctacaggaaggtgacctgtggcatcaagccagccagctttgagaaggtgcatgaccctgagatcaaggagatcatcggggagtgcatctgcaagaacaaggaggagagatatgagatcaaggacctgctgagccacgccttctttgctgaagatactggagtgcgggtggagctggccgaggaggaccacggcaggaagagcaccatcgccctgcggctgtgggtggaggaccccaagaagctgaagggcaagcccaaggacaatggagccatcgagttcacctttgacctggagaaggagaccccagatgaggtggcccaggagatgattgaaagtggcttcttccatgaaagtgatgtgaagatcgtggccaagagcatccgggacagagtggccctgatccagtggaggcgggagcgcatctggccagccctgcagcccaaggagcagcaggatgtgggcagcccagacaaggcccggggcccccctgtgcccctgcaggtgcaggtgacctaccacgcccaggccggccagcccggccccccagagcctgaggagcctgaggccgaccagcacctgctgccccccaccctgcccaccagcgccaccagcctggccagtgacagcacctttgacagcggccagggcagcacagtgtacagcgacagccagagcagccagcagagcgtgatgctgggcagcctggctgatgctgcccccagccctgcccagtgtgtgtgcagcccccctgtgtctgagggccctgtgctgccccagagcctgcccagcctgggcgcctaccagcagcccacagctgcccctggcctgcctgtgggctctgtgcctgccccagcctgcccccccagcctgcagcagcacttcccagaccctgccatgagctttgcccctgtgctgcccccacccagcacccccatgcccactggacctggccagcctgcccctcctggccagcagcccccacccctggcccagcccacccccctgccccaggtgctggccccccagcctgtggtgcccctgcagcctgtgcccccccacctgcccccctacctggccccagccagccaggtgggcgccccagcccagctgaagcccctgcagatgccccaggcccccctgcagcccctggcccaggtgcccccccagatgccacccatccctgtggtgccccccatcacccccctggccggcattgatggcctgcccccagccctgcctgacctgcccacagccaccgtgccccctgtgcccccaccccagtacttcagccctgctgtgatcctgcccagcctggccgcccccctgcccccagccagccctgccctgcccctgcaggccgtgaagctgccccaccccccaggggcccccctggccatgccctgcaggaccatcgtgcccaatgccccagccaccatccccctgctggccgtggcccctcctggggtggccgccctgagcatccacagcgctgtggcccagctgcccggccagcctgtgtacccagctgccttcccccagatggcccccacagatgtgccccccagcccccaccacacagtgcagaacatgagggccaccccaccccagcctgccctgcccccccagcccaccctgcccccccagcctgtgctgcccccccagcccaccctgcccccccagcctgtgctgcccccccagcccaccaggcctccccagcctgtgctgcccccccagcccatgctgcccccccagcctgtgctgcccccccagcctgccctgcctgtgcggcctgagcccctgcagccccacctgcctgagcaggccgccccagctgccaccccaggcagccagatcctgctgggccacccagccccctatgctgtggatgtggccgcccaggtgcccaccgtgcctgtgcccccagctgctgtgctgagcccccccctgcctgaggtgctgctgcctgctgcccctgagctgctgccccagttccccagcagcctggccaccgtgtctgcctctgtgcagagcgtgcccacccagacagccaccctgctgcccccagccaacccccccctgcccggcggccctggcatcgccagcccctgccccaccgtgcagctgactgtggagcctgtgcaggaggagcaggccagccaggacaagcccccaggcctgccccagagctgtgagagctatggaggcagtgatgtgaccagcggcaaggagctgagtgacagctgtgagggcgcctttggaggcggccgcctggagggccgggccgccaggaagcaccaccggcgcagcacccgggcccggagccggcaggagcgggccagccggccccggctgaccatcctgaatgtgtgcaacacaggagacaagatggtggagtgccagctggagacccacaaccacaagatggtgaccttcaagtttgacctggatggagatgccccagatgagatcgccacctacatggtggagcatgacttcatcctgcaggccgagcgggagaccttcatcgagcagatgaaggatgtgatggacaaggccgaggacatgctgtctgaggacacagatgctgaccggggcagtgaccccggcaccagccccccccacctgagcacctgtggcctgggcactggagaggagagccggcagagccaggccaatgcccctgtgtaccagcagaatgtgctgcacacaggcaagcgctggttcatcatctgccctgtggccgagcacccagcccctgaggcccctgagagcagcccccccctgcccctgagcagcctgcccccagaggccagccagggcccctgccggggcctgaccctgccctgcctgccctggaggcgggccgcctgtggggctgtgttcctgagcctcttctctgctgagagcgcccagagcaagcagcccccagattctgccccctacaaggaccagctgagcagcaaggagcagcccagcttcctggccagccagcagctgctgagccaggccggccccagcaaccccccaggggcccccccagcccccctggcccccagcagcccccctgtgacagccctgccccaggatggagctgccccagccaccagcaccatgcctgagcccgccagcggcacagccagccaggccggcggccctggcaccccccagggcctgaccagcgagctggagaccagccagcccctggccgagacccatgaggcccccctggccgtgcagcccctggtggtgggcctggccccctgcaccccagcccctgaggccgccagcaccagagatgccagcgccccccgggagcccctgcccccaccagcccctgagcccagcccccacagcggcaccccccagcctgccctgggccagcctgcccccctgctgcctgctgctgtgggcgctgtgtccctggccaccagccagctgcccagcccccccctgggccccaccgtgcccccccagccccccagcgccctggagagtgatggagagggccccccaccccgggtgggctttgtggacagcaccatcaagagcctggatgagaagctgcggaccctgctgtaccaggagcacgtgcccaccagcagcgccagcgctggcacccctgtggaggtgggggaccgggacttcaccctggagcccctgcggggggaccagcccaggtctgaggtgtgtggcggggacctggccctgccccctgtgcccaaggaggccgtgtctggccgggtgcagctgccccagcccctggtggagaagtctgagctggcccccaccagaggagctgtgatggagcagggcaccagcagctccatgacagctgagagcagccccaggtccatgctgggctatgacagagatggccggcaggtggccagtgacagccacgtggtgcccagcgtgccccaggatgtgcctgcctttgtgcggcctgcccgggtggagcccacagacagagatggaggagaggccggggagagcagcgctgagcccccacccagcgacatgggcaccgtgggcggccaggccagccacccccagaccctgggcgcccgggccctgggcagccccaggaagaggcctgagcagcaggatgtgagcagccctgccaagacagtgggccgcttctctgtggtgtccacccaggatgagtggaccctggccagcccccacagcctgcgctacagcgcccccccagatgtgtacctggatgaggcccccagcagcccagatgtgaagctggccgtgcggcgggcccagacagccagcagcattgaggtgggcgtgggggagcctgtgtccagtgacagcggagatgagggcccccgggcccggccccctgtgcagaagcaggccagcctgcctgtgtctggctctgtggccggggactttgtgaagaaggccacagccttcctgcagaggcccagcagagctggcagcctgggccctgagacccccagccgggtgggcatgaaggtgcccaccatctctgtgaccagcttccacagccagagcagctacatcagcagtgacaatgattctgagctggaggatgctgacatcaagaaggagctgcagagcctgcgggagaagcacctgaaggagatcagcgagctgcagagccagcagaagcaggagattgaggccctgtacagaaggctgggcaagcccctgccccccaacgtgggcttcttccacacagccccacccaccggcagaagaaggaagaccagcaagagcaagctgaaggccggcaagctgctgaaccccctggtgcggcagctgaaggtggtggccagcagcacaggccacctggccgacagcagccggggccccccagccaaggaccctgcccaggcctctgtgggcctgacagctgacagcacaggcctgagcggcaaggctgtgcagacccagcagccctgcagcgtgcgggccagcctgagcagtgacatctgcagcggcctggccagtgatggcggcggggcccggggccagggctggacagtgtaccaccccaccagcgagcgggtgacctacaagagcagcagcaagccccgggcccgcttcctgagcggccctgtgtctgtgtccatctggagcgccctgaagaggctgtgcctgggcaaggagcacagcagccgcagcagcaccagcagcctggcccctggccctgagcccggcccccagcctgccctgcacgtgcaggcccaggtgaacaacagcaacaacaagaagggcaccttcacagatgacctgcacaagctggtggatgagtggaccagcaagacagtgggcgccgcccagctgaagcccaccctgaaccagctgaagcagacccagaagctgcaggacatggaggcccaggccggctgggccgcccctggagaggcccgggccatgacagcccccagggctggggtgggcatgccccggctgcccccagcccctggccccctgagcaccaccgtcatccctggagctgcccccaccctgtctgtgcccaccccagatggagccctgggcacagcccggaggaaccaggtgtggtttggcctgcgggtgcccccaacagcctgctgcggccacagcacccagccccggggcggccagagggtgggcagcaagacagccagctttgctgccagtgaccctgtgcgctcctag

SEQ ID NO: 101132 - DNA, 5601 bp, Artificial Sequence
  derived and/or modified sequence
atggccaccagcgagtacccctacagcgagtgccagaatgctgcccagatctacaggaaggtgacctgtggcatcaagccagccagctttgagaaggtgcatgaccctgagatcaaggagatcatcggggagtgcatctgcaagaacaaggaggagagatatgagatcaaggacctgctgagccacgccttctttgctgaagatactggagtgcgggtggagctggccgaggaggaccacggcaggaagagcaccatcgccctgcggctgtgggtggaggaccccaagaagctgaagggcaagcccaaggacaatggagccatcgagttcacctttgacctggagaaggagaccccagatgaggtggcccaggagatgattgaaagtggcttcttccatgaaagtgatgtgaagatcgtggccaagagcatccgggacagagtggccctgatccagtggaggcgggagcgcatctggccagccctgcagcccaaggagcagcaggatgtgggcagcccagacaaggcccggggcccccctgtgcccctgcaggtgcaggtgacctaccacgcccaggccggccagcccggccccccagagcctgaggagcctgaggccgaccagcacctgctgccccccaccctgcccaccagcgccaccagcctggccagtgacagcacctttgacagcggccagggcagcacagtgtacagcgacagccagagcagccagcagagcgtgatgctgggcagcctggctgatgctgcccccagccctgcccagtgtgtgtgcagcccccctgtgtctgagggccctgtgctgccccagagcctgcccagcctgggcgcctaccagcagcccacagctgcccctggcctgcctgtgggctctgtgcctgccccagcctgcccccccagcctgcagcagcacttcccagaccctgccatgagctttgcccctgtgctgcccccacccagcacccccatgcccactggacctggccagcctgcccctcctggccagcagcccccacccctggcccagcccacccccctgccccaggtgctggccccccagcctgtggtgcccctgcagcctgtgcccccccacctgcccccctacctggccccagccagccaggtgggcgccccagcccagctgaagcccctgcagatgccccaggcccccctgcagcccctggcccaggtgcccccccagatgccacccatccctgtggtgccccccatcacccccctggccggcattgatggcctgcccccagccctgcctgacctgcccacagccaccgtgccccctgtgcccccaccccagtacttcagccctgctgtgatcctgcccagcctggccgcccccctgcccccagccagccctgccctgcccctgcaggccgtgaagctgccccaccccccaggggcccccctggccatgccctgcaggaccatcgtgcccaatgccccagccaccatccccctgctggccgtggcccctcctggggtggccgccctgagcatccacagcgctgtggcccagctgcccggccagcctgtgtacccagctgccttcccccagatggcccccacagatgtgccccccagcccccaccacacagtgcagaacatgagggccaccccaccccagcctgccctgcccccccagcccaccctgcccccccagcctgtgctgcccccccagcccaccctgcccccccagcctgtgctgcccccccagcccaccaggcctccccagcctgtgctgcccccccagcccatgctgcccccccagcctgtgctgcccccccagcctgccctgcctgtgcggcctgagcccctgcagccccacctgcctgagcaggccgccccagctgccaccccaggcagccagatcctgctgggccacccagccccctatgctgtggatgtggccgcccaggtgcccaccgtgcctgtgcccccagctgctgtgctgagcccccccctgcctgaggtgctgctgcctgctgcccctgagctgctgccccagttccccagcagcctggccaccgtgtctgcctctgtgcagagcgtgcccacccagacagccaccctgctgcccccagccaacccccccctgcccggcggccctggcatcgccagcccctgccccaccgtgcagctgactgtggagcctgtgcaggaggagcaggccagccaggacaagcccccaggcctgccccagagctgtgagagctatggaggcagtgatgtgaccagcggcaaggagctgagtgacagctgtgagggcgcctttggaggcggccgcctggagggccgggccgccaggaagcaccaccggcgcagcacccgggcccggagccggcaggagcgggccagccggccccggctgaccatcctgaatgtgtgcaacacaggagacaagatggtggagtgccagctggagacccacaaccacaagatggtgaccttcaagtttgacctggatggagatgccccagatgagatcgccacctacatggtggagcatgacttcatcctgcaggccgagcgggagaccttcatcgagcagatgaaggatgtgatggacaaggccgaggacatgctgtctgaggacacagatgctgaccggggcagtgaccccggcaccagccccccccacctgagcacctgtggcctgggcactggagaggagagccggcagagccaggccaatgcccctgtgtaccagcagaatgtgctgcacacaggcaagcgctggttcatcatctgccctgtggccgagcacccagcccctgaggcccctgagagcagcccccccctgcccctgagcagcctgcccccagaggccagccagggcccctgccggggcctgaccctgccctgcctgccctggaggcgggccgcctgtggggctgtgttcctgagcctcttctctgctgagagcgcccagagcaagcagcccccagattctgccccctacaaggaccagctgagcagcaaggagcagcccagcttcctggccagccagcagctgctgagccaggccggccccagcaaccccccaggggcccccccagcccccctggcccccagcagcccccctgtgacagccctgccccaggatggagctgccccagccaccagcaccatgcctgagcccgccagcggcacagccagccaggccggcggccctggcaccccccagggcctgaccagcgagctggagaccagccagcccctggccgagacccatgaggcccccctggccgtgcagcccctggtggtgggcctggccccctgcaccccagcccctgaggccgccagcaccagagatgccagcgccccccgggagcccctgcccccaccagcccctgagcccagcccccacagcggcaccccccagcctgccctgggccagcctgcccccctgctgcctgctgctgtgggcgctgtgtccctggccaccagccagctgcccagcccccccctgggccccaccgtgcccccccagccccccagcgccctggagagtgatggagagggccccccaccccgggtgggctttgtggacagcaccatcaagagcctggatgagaagctgcggaccctgctgtaccaggagcacgtgcccaccagcagcgccagcgctggcacccctgtggaggtgggggaccgggacttcaccctggagcccctgcggggggaccagcccaggtctgaggtgtgtggcggggacctggccctgccccctgtgcccaaggaggccgtgtctggccgggtgcagctgccccagcccctggtggagaagtctgagctggcccccaccagaggagctgtgatggagcagggcaccagcagctccatgacagctgagagcagccccaggtccatgctgggctatgacagagatggccggcaggtggccagtgacagccacgtggtgcccagcgtgccccaggatgtgcctgcctttgtgcggcctgcccgggtggagcccacagacagagatggaggagaggccggggagagcagcgctgagcccccacccagcgacatgggcaccgtgggcggccaggccagccacccccagaccctgggcgcccgggccctgggcagccccaggaagaggcctgagcagcaggatgtgagcagccctgccaagacagtgggccgcttctctgtggtgtccacccaggatgagtggaccctggccagcccccacagcctgcgctacagcgcccccccagatgtgtacctggatgaggcccccagcagcccagatgtgaagctggccgtgcggcgggcccagacagccagcagcattgaggtgggcgtgggggagcctgtgtccagtgacagcggagatgagggcccccgggcccggccccctgtgcagaagcaggccagcctgcctgtgtctggctctgtggccggggactttgtgaagaaggccacagccttcctgcagaggcccagcagagctggcagcctgggccctgagacccccagccgggtgggcatgaaggtgcccaccatctctgtgaccagcttccacagccagagcagctacatcagcagtgacaatgattctgagctggaggatgctgacatcaagaaggagctgcagagcctgcgggagaagcacctgaaggagatcagcgagctgcagagccagcagaagcaggagattgaggccctgtacagaaggctgggcaagcccctgccccccaacgtgggcttcttccacacagccccacccaccggcagaagaaggaagaccagcaagagcaagctgaaggccggcaagctgctgaaccccctggtgcggcagctgaaggtggtggccagcagcacaggccacctggccgacagcagccggggccccccagccaaggaccctgcccaggcctctgtgggcctgacagctgacagcacaggcctgagcggcaaggctgtgcagacccagcagccctgcagcgtgcgggccagcctgagcagtgacatctgcagcggcctggccagtgatggcggcggggcccggggccagggctggacagtgtaccaccccaccagcgagcgggtgacctacaagagcagcagcaagccccgggcccgcttcctgagcggccctgtgtctgtgtccatctggagcgccctgaagaggctgtgcctgggcaaggagcacagcagccgcagcagcaccagcagcctggcccctggccctgagcccggcccccagcctgccctgcacgtgcaggcccaggtgaacaacagcaacaacaagaagggcaccttcacagatgacctgcacaagctggtggatgagtggaccagcaagacagtgggcgccgcccagctgaagcccaccctgaaccagctgaagcagacccagaagctgcaggacatggaggcccaggccggctgggccgcccctggagaggcccgggccatgacagcccccagggctggggtgggcatgccccggctgcccccagcccctggccccctgagcaccaccgtcatccctggagctgcccccaccctgtctgtgcccaccccagaccctgagagcgagaagccagactag

SEQ ID NO: 101133 - DNA, 6894 bp, Artificial Sequence
  derived and/or modified sequence
atggacggcgacggcggccggcgggacgtgcccggcaccctgatggagcctggccgtggcgcaggacccgccggcatggcagagccacgggctaaggcagccagacctggtccccagcgttttttacgcagaagcgtcgtcgaatccgaccaggaagaaccccccggcctcgaagcagccgaggcccctgggccccagcctccacagcctttacaacgcagagtgctgctgctgtgtaagacccgccggctcatcgccgaacgtgctcgtggccgtccagcggcacccgctccagctgcattggtggcacagcccggagcccccggagctcctgctgatgccggtcccgaacctgtcggcacccaagagcccggcccagaccctattgctgccgccgtcgaaactgcccccgcacctgacggggggcccagagaggaggccgctgcaacggtgagaaaggaggacgaaggcgccgccgaagccaaaccagagccaggccggactagacgagacgagcctgaggaagaggaagatgatgaagatgatctgaaggcagtggcaacctccctcgacggtcggttcctgaagtttgatattgagctcggacgcgggtcctttaaaacagtctataagggactggacacagagacctgggtggaggtggcttggtgtgagctgcaggatagaaaactgactaaacttgaaagacagcgcttcaaggaggaggccgaaatgcttaaaggattgcagcacccaaacatcgttcgcttctatgatttctgggaaagctctgccaagggcaaaagatgcatcgtcctcgtgactgagctgatgacttccgggacgttaaagacctacttaaaaaggtttaaagtgatgaagcctaaagtcctgagaagctggtgtaggcagattctgaagggtctactgtttttgcatacacgcactcctccaatcatacaccgagacctgaaatgcgacaatatatttatcacgggcccgacaggctcggtgaagattggcgacctcggtcttgcaactctaaagcgggcgagcttcgccaaatctgtcatcgggactccagagtttatggccccagaaatgtacgaagaacattacgacgaatctgtggatgtctacgcctttggaatgtgcatgctcgaaatggcaacctcagaatatccttactcagaatgtcagaatgcggcccagatttaccggaaagtaacctgcgggataaagccggcttctttcgagaaggtgcatgaccccgagatcaaagagattatcggggagtgcatctgcaaaaataaagaagagcgctatgagataaaggatcttctctcgcacgcattctttgcagaagacacaggggtccgggtcgagctcgctgaagaggatcatgggagaaaaagcacgatcgccctccggctctgggtggaggatcccaaaaagctgaagggtaagcctaaggacaacggagcaatcgagttcacattcgatctagagaaggagactcctgatgaagttgcacaggaaatgattgaaagtggattttttcacgagtccgacgtcaagatagtcgcaaaatcgattcgggatagagtggccctgatacagtggcgccgggaacggatttggcccgccttgcagccaaaggagcagcaagacgtgggctcgcccgacaaagccagagggccacccgtgccacttcaggtgcaggtaacctatcacgcccaggcaggacaaccagggccaccagagccagaggaacccgaggctgaccaacatctgttaccacctacgctccctacttccgcaacctcactggcctccgattcgacatttgactcagggcaaggttcaactgtctactcagatagtcaatcaagccaacagtccgtcatgctcgggtccttggcagacgcagctccgtcacctgcccaatgcgtgtgttctccacctgtctccgagggcccagttcttccacagtctctccccagtctcggcgcatatcagcaaccgaccgctgccccaggcctccctgttggctcagttccagcgccggcctgtccgcctagtctacaacagcattttcctgatcctgcaatgtcatttgcacctgttttgccccctccttccacaccaatgccaaccggaccaggacagcctgctccaccaggacagcagccccctcccctggcacagcccaccccattgccacaggtgttggccccccaacctgtcgtacccctgcagcctgtcccaccccatctccccccctatctggcccccgcctctcaggtgggagctcccgcgcagctgaaacctttacagatgccacaggcacccctccagcctttggcacaggtccccccacaaatgcctccaattcctgtcgttccccctataactccactcgccgggatcgacggtctgccgcctgctttgccagacctacctaccgcaacggttcctccggtcccaccgccccaatatttctcccccgcagtgatcctccccagcctggccgcacccctgcccccggcctcccccgcacttcctctgcaggctgtgaagctgccgcatccaccaggcgcaccactagctatgccctgtagaaccatcgtgcccaacgctccggctacaatcccactgctggctgttgccccacctggcgtggccgccctgtccatacatagtgccgtggcacagttaccgggccagccggtctatcctgccgcattcccacaaatggcaccaacggatgtaccaccaagccctcatcataccgtgcaaaatatgagagccacgccgccccagcccgccttgcctccgcagccaaccctacccccccagccggtgctgccaccccaaccaactttaccgccccagccagtcctgcctccccagccaactcggccaccacagccagtgttgccaccacaaccgatgctgcctcctcagccagtgctgccaccccagccagcccttcctgtaaggccagagcccctgcaaccccacctgcctgaacaggctgcaccagccgccactcctggatcccagatcctgttgggtcatcccgctccatatgccgtagacgttgctgcacaggtgcctactgtgccggttcccccggctgctgtgctctccccacctctgccggaagtgctgctgccagcggccccagaactgctgccccagttccctagctcactcgctaccgtcagcgcttctgtacagtccgtgcctacacagacagcgacgctcctgcccccggccaacccgcccctccctggaggtccagggatagcgagcccttgtcctactgtacagctcacggttgagcctgtccaggaggagcaggcctcacaggacaaaccaccgggactgccccaatcgtgcgagtcgtatggcggcagtgacgttacctccggtaaggaactaagcgatagttgcgagggcgcatttggaggggggcgactcgaggggcgggcagcaaggaaacatcaccggcgttccaccagagcacgctctcggcaggagagggccagcaggccacgcctgaccattctcaacgtttgcaacactggggataaaatggtggagtgtcagttggagactcacaatcataagatggtgacttttaagttcgacttggacggtgacgccccagacgaaattgcaacctacatggtcgagcacgattttattctccaggccgaaagagagaccttcatcgagcaaatgaaggatgtgatggacaaggcagaggatatgctcagtgaggatactgacgcagaccggggttccgatcctggtactagcccccctcatttatcgacttgcggcttaggcacaggggaggagtctagacagtcccaggccaatgccccggtttaccagcagaacgtactccatactggcaagcgatggttcataatttgtcctgtggctgagcatcctgcccctgaagcccctgagagctccccccctttacctctctcttccctgcctcccgaggccagtcagggcccttgtcgcggcctcaccttgccctgcctgccttggcgccgtgcagcatgtggcgcggtattcctgagtcttttctcggctgagtctgctcagtccaagcagcctccggactcagccccctacaaagatcagttgtcaagcaaggaacagccttcatttctggcgtcccagcagctgctgtcccaggccggtcctagcaatcccccaggcgcacctcccgctcccctagcccccagcagtccacctgtcactgccctaccccaggacggagccgctcccgccacctcaacgatgccagagccagcttcgggcaccgccagccaggccggagggccaggcactccacaaggcctgacttccgagctggagacctctcagcctttagcagagactcacgaggctcctcttgccgttcagcctctggtggtcggtctggcaccctgcacacccgctcccgaggctgcatcaacgcgcgacgcctccgcccctagggagcccctaccgccgcccgcaccagaaccatcgccacacagtggaacaccacagccagccctcggccagcccgctccgcttctacccgcagccgtgggtgcggtgtccctggctacgtcacagctacctagtcctccactcggtcctactgtgcccccacagccaccctctgctctggagtcagatggagagggacctccaccccgggttgggttcgtggactccaccattaaatcactcgacgaaaaactgcggaccctgttatatcaagagcacgtgccgacatcgtctgcttcggcgggaacccctgtagaggtgggcgatagagacttcaccctggagccgctgaggggtgaccagccccggtctgaagtgtgcggtggcgatttagcgctccctccagtgcctaaagaggcagtgtcgggtagagtgcagctccctcagccacttgtcgaaaagtctgagctggctcccacccgcggggccgttatggaacaggggacatcttcatctatgaccgcggagtcttcccccagaagtatgcttggatacgatagggacggccggcaggtggccagtgatagtcacgtagttccatccgtgcctcaggacgttccggcctttgtgagacccgctcgcgtggagcctacagaccgcgacggaggagaagctggggagtcttcagcagagccacctccttctgatatgggaacagtgggaggtcaggccagccacccacaaacattgggggctagggctctaggaagtcctagaaagcgacccgagcagcaggacgtgagctcgccagcaaaaactgtaggcaggttttcagtagtgtctacccaggatgagtggaccctggcctccccgcatagtttgagatactctgcacctcctgacgtgtacctggatgaagctccatcttcgcccgacgtgaagctagcagtgaggagggcccaaaccgccagcagcatcgaggtgggggtaggtgagccagtgagctctgactccggagatgaagggccccgggcacggccgcccgtgcagaagcaggcaagtctccctgtgtctggatcggttgctggtgacttcgtgaaaaaggcaaccgcatttctgcagcgccccagcagagccgggtctctcggccccgaaacccccagtcgggtggggatgaaagtgccgaccatttcggtgacgtcctttcacagccaaagctcatacatttcatcagacaacgatagtgaactggaagacgccgacatcaagaaagaattacagagtcttagggagaagcacttaaaggaaatttcagagcttcaaagccagcaaaaacaggaaattgaggccctttaccgcaggctgggcaaaccactcccaccaaacgtgggatttttccacaccgctccacctacgggtcggagacgcaagacctctaagagcaagctcaaggccgggaaactgttgaaccctctcgttcggcagctaaaggtggtggcgtcctccactggccacctggcggatagcagcaggggtccacctgcaaaagatccagcacaggcttcggtcggcctcaccgctgacagcacaggcctatcgggcaaagcagtacagacgcagcagccatgttccgtgcgcgcatcactgagtagtgacatctgctcagggcttgctagcgacggagggggcgcccgtggccagggctggactgtatatcacccaacctctgagagagttacctataaatccagcagtaagccgcgagctagatttctgtctggtcccgtctcagtctccatctggagcgcgctaaagcggctctgcctcgggaaggaacacagttctcgcagctctacaagcagcctggctcccggtcctgaaccgggtcctcaacccgcacttcacgtgcaggcgcaggttaacaactctaataataaaaaaggtacctttaccgacgacttgcacaaattggtggacgagtggaccagtaagaccgttggagcggcccagctgaaacctaccttaaatcagctgaaacagacacagaaactgcaggacatggaggcacaggccggatgggcagcgcccggagaggcacgcgcaatgacagcgccacgcgcaggagtaggtatgccccggctccctcccgcccccgggccacttagtaccacggtcattcccggagctgctcccactctgagcgttcctaccccagatggtgcgctcggcaccgccaggagaaaccaggtgtggttcgggctgcgggttcccccaactgcttgttgcgggcactccacccagccacgtggcgggcagcgagtgggtagcaaaaccgcttcgtttgctgccagcgaccccgttcggtcctag

SEQ ID NO: 101134 - DNA, 5601 bp, Artificial Sequence
  derived and/or modified sequence
atggccaccagcgagtacccctacagcgagtgccagaacgccgcccagatctacaggaaggttacttgcggaatcaagcctgccagctttgaaaaggttcacgatcccgaaatcaaggaaatcattggggaatgcatttgcaagaataaagaagagcgctacgaaatcaaagatttgctctctcacgcattctttgccgaggacactggagtccgggtggagctagcagaggaggatcacgggcgcaagagtacgattgccctgagactttgggtggaggatcccaagaagttgaagggcaagcccaaagataacggcgctatcgaattcaccttcgaccttgaaaaagaaacccccgatgaagtcgcgcaggaaatgattgaatcaggcttctttcacgaatccgacgtaaagatcgtagcaaaatccattcgcgacagagtggctcttattcagtggcggcgggaacgcatctggccagcccttcagcctaaagagcagcaagacgttggctctccggacaaagctcgcggtcccccagtcccattgcaggtgcaagttacttaccacgcccaggcaggacagcctgggccccccgagccagaggagcctgaagccgaccagcatctgctgccccccacactgcccacaagtgctactagcctggcctcagattcgaccttcgattccggtcagggctccaccgtgtatagtgacagccagagttcgcaacagagcgtgatgttgggaagccttgccgatgccgccccatcccccgctcagtgtgtctgttcccctcccgtctctgagggccccgtcctgccccagtcactgcctagcctgggggcttatcaacagccaactgccgcacccggcctgcctgtcgggtccgttccagccccggcatgccctcccagcctccagcagcactttccagacccggccatgtcatttgccccggtgctgcctcccccatccacgcccatgcctactggacctgggcagccggcaccacccggtcaacaaccccccccactggcccagccaaccccactgccgcaagtcttggccccccagcccgttgtcccgctacagccggtccccccacacttgccaccttatctggcccccgcgtcgcaggtgggtgcgcctgcacagctgaagcctttacagatgcctcaggcacccctgcagcccctggcacaggtaccccctcagatgcctcccattccagtcgtgccccccatcacacccctggctggcattgatgggcttcctccggctctgcccgacctccccactgctacagttccccctgtcccaccaccccaatatttttctcccgccgtcatactgccatcactcgcagctcctctgccaccagccagccctgccctgcccctgcaggctgtgaaactgccacacccgccaggtgccccactggccatgccctgcaggacaatcgtgccaaatgccccagccacgattccattactggcagtagctccacccggagtggccgctctgtcaattcactccgcagtagctcagcttccggggcagcctgtgtaccctgcagcctttccacagatggctcccacggacgtccccccttcacctcatcacactgtgcagaatatgcgggccacaccgcctcaacctgcgttgccgcctcagcctactctgccgccccagccagtgctgcccccacaaccgactctgcctccccagcccgtactgcctccacagccaacacggcctcctcagccagttctcccaccccagcccatgttacccccccaaccggtgctgccaccacagccagccctgccagtccgccctgagcctctgcagccacatctgcctgaacaagcagcacctgctgcaaccccgggaagccaaatattgttgggccaccccgctccctacgctgtcgatgtcgccgctcaggttccaactgttcccgtaccacccgctgcagtgctttccccccctctcccagaggtcctgcttcctgcggcaccagagctgcttcctcagttcccgagtagtctggccacagtgtccgctagtgtgcagagtgttcccacacagacagcaacactactaccacccgccaaccccccacttcctggcggcccaggcattgcgagcccttgtcctactgtacaactcaccgtcgagcccgtccaggaggagcaggctagtcaggacaagccccccgggcttcctcagtcctgcgaaagctatggtggcagcgacgtgacaagcggaaaggagctgagcgattcatgtgagggtgcgtttgggggcggaagacttgagggcagagctgctcggaaacatcaccggcgcagtactcgtgcgcgcagccgacaggagcgcgcctcaagaccccggttaacaatccttaatgtctgtaacaccggtgacaagatggtggagtgccagctggagacccataatcacaaaatggtcactttcaagttcgatctggacggggacgcaccagatgagatagctacatatatggttgagcacgacttcattcttcaagcagagcgcgaaactttcatagagcagatgaaggacgtcatggacaaggcagaagacatgctgagcgaggacaccgacgctgacaggggatctgatcccggaacgtctccgccgcacttatctacctgtgggctcgggactggagaggaatctcgacagagccaagccaacgcaccggtgtatcagcagaatgtgcttcataccggcaagagatggttcattatctgtccagtggccgaacacccggctccggaagcccccgaatcctcccctcctctccccttgagctcattgcccccggaagcaagccaaggcccgtgtcggggattaaccctgccttgtctgccctggagacgggccgcttgcggggcggtctttctgtccttattctcagccgagagcgctcagtcaaagcaacccccagattcggcgccctacaaggaccaactgagctctaaggagcaaccttcctttctggcatctcagcagctgctctcacaggctggcccatccaaccccccaggcgcaccgccggcgcctctggccccatcatctccacctgtcactgccctgccacaggacggagcagcccctgcaacaagcaccatgccggagcctgctagcgggacagccagccaggccggggggccaggaaccccacagggactgacttccgaactcgaaacttctcagcccctagcagagacacacgaggctccactagccgtgcaaccactggtcgtgggattagccccatgcacaccggcccccgaggctgcctccacgcgagacgccagtgccccacgggagccccttccgccacctgcccctgagccttcacctcattctgggaccccgcagccggctctggggcagccggcgcctttgctcccagccgccgttggggctgtgagcttggctacttcacaacttccctctccgccactgggtccgacagtcccaccacagcctccttcagcactggaatctgacggagaagggccacccccacgcgtgggttttgtggatagcactatcaagagcttggacgagaagctccggaccctgctataccaggagcacgtgccgacttcttctgccagtgctggcacccccgtcgaggtaggtgaccgagattttaccctggagcccctccgcggggatcagcctcgcagtgaggtctgtggcggcgacctcgctcttccacccgtcccaaaggaggctgtctcagggagggtccagttgccacaaccactagttgaaaagtcagaactcgcacctaccagaggagcggtgatggaacaggggacaagttcctctatgactgctgagtcatctccaaggagtatgcttgggtacgaccgagacggcagacaggtcgccagtgactctcatgtggtaccatctgtgccccaggatgtgccagcctttgtgagaccagcacgggtggagcctaccgatagggacggaggtgaggccggcgagtcttccgcagagccccccccttccgatatgggcaccgtaggggggcaggcctcgcacccacagacacttggtgcaagagcgctcggttcccctcgaaaacggccggagcagcaggacgtcagctcgccggcaaaaactgtggggagattctcggtagtctcaacacaggatgagtggaccctcgcttccccccatagtctacgctattctgccccgcctgatgtgtatttggacgaggctccttctagcccagacgtcaagctggccgtgagacgcgcccagacggctagctctattgaggtaggcgttggggaacctgtgtctagcgattcgggagacgaaggaccgagagcccgccctcctgtgcagaagcaggcctcgctgcccgtcagcggctctgtcgctggcgactttgtgaaaaaggctaccgcctttttgcagcgcccaagccgtgcagggtcgctaggccctgagaccccttctagagttggcatgaaagtccccaccatcagcgtgacaagttttcattctcagtcctcgtacattagctctgataatgatagtgagctggaagatgccgacatcaaaaaagagctacagtctcttcgggaaaagcacttaaaggaaatttctgaactgcagtcccaacagaaacaggagattgaggcgctgtaccggagactcggcaagcccctgcccccgaacgtgggatttttccatacggcaccgcctactggccggcgacgcaagacatccaaatccaagttaaaagctggcaagctgttgaaccctctagtgcgacaactaaaggtggtcgcctccagtaccggacaccttgcagattcttccagaggccctcccgctaaagatcccgcacaggctagcgtgggcctgacggccgactcaacaggccttagcggaaaagccgtgcagacacagcagccttgtagtgtccgtgcctccctatcctccgatatctgtagcggcttggcgtcggatggaggaggcgccagaggccagggctggactgtgtaccaccccaccagcgagagggtcacgtacaagtctagcagcaaaccaagagcccgtttcctgtcggggccggtgtccgtgtctatttggtcagcccttaagaggttatgtcttgggaaagagcattcgtctaggagcagtacgagttctcttgctcctggccctgaacccggtcctcagcccgccttacatgttcaggcgcaggtcaataattcgaataataaaaaggggacttttaccgatgatctgcacaaattggtcgatgagtggaccagcaagaccgtgggcgcagcccagttgaagcctacactgaaccaactgaagcagacgcagaagcttcaagatatggaggcacaggccggctgggccgcccccggggaggctagggcaatgacagcccccagagccggagttggaatgccccgactcccacctgctcctggtcctctgagcacaacggtaattcctggagccgctcctaccctatcagtcccgacccccgaccctgagtctgagaagccagattag

SEQ ID NO: 101135 - DNA, 6894 bp, Artificial Sequence
  derived and/or modified sequence
atggatggtgacggcggaagacgagatgtgccaggaactctgatggagcccggacgaggcgctgggcctgcaggcatggcagagcccagggcaaaggccgctagaccaggaccgcagcgctttctgcgaaggagcgtagtcgaatcggaccaggaggaaccccctggcttagaggctgctgaagcccctggccctcaaccaccgcaacctctgcagcgccgtgtccttttgctgtgcaagactagacgcctgattgctgagcgtgcgagggggagacccgcagctcccgcacccgctgcccttgtggctcagcctggtgctcctggggcaccagcggacgccggtccggagcccgtgggcacccaagagcctggcccagaccccattgccgcagctgtggagacagcacccgctcccgatggcggaccacgtgaagaagcggctgcaacagtcaggaaggaagacgaaggtgcagccgaggccaagccagagcctggaagaactcggagagatgagcccgaagaggaggaggatgatgaggatgaccttaaggccgtcgccaccagcctcgacggccgatttcttaagtttgatatcgagctaggtagaggttcgttcaagaccgtctataaaggcctggatacagagacatgggtcgaggtggcttggtgtgagttacaagataggaaactgaccaaattggaacgacaaaggtttaaagaagaggccgaaatgctgaaaggcctgcagcaccccaatatcgtgcgcttttatgacttttgggagagctccgccaaggggaaaagatgcatagttttggtgacagagctgatgacgtccggcaccttgaaaacatacttgaagaggtttaaggtaatgaagcccaaggtgctgcgctcttggtgccgacaaatcctgaagggcctactgttccttcacaccaggacaccgcctattatccatcgcgacctgaagtgcgataatattttcatcactggcccaaccggatccgtgaagatcggggatcttggactggcgacactcaagagggccagcttcgccaagtcggtgattgggacccccgagtttatggcccctgaaatgtatgaggaacattacgacgagagtgtggatgtgtacgcatttggaatgtgcatgcttgaaatggccaccagcgaatacccctactcggaatgccagaatgcagctcaaatttaccgaaaagttacctgcggtattaaacctgcgagtttcgagaaagtgcatgatcctgagataaaggagattattggagagtgtatttgtaagaacaaggaggaacggtatgaaataaaagatcttttgtcccatgccttttttgccgaggataccggggtgagggtggaactggccgaagaagatcacgggcgaaagtccacaattgccctgcgcctatgggtggaggatcctaagaaactgaaaggtaagccaaaggataatggggcaattgagttcactttcgacttagagaaggagaccccagacgaggtggcacaagaaatgattgaaagcggcttcttccatgagtctgatgtcaagatcgtagccaaaagtatccgagatcgggtcgcactcattcagtggcggagggagagaatctggcccgctttacagcccaaggaacagcaggacgtgggatcacccgacaaagctcgcggtccccctgtcccattacaggttcaagtgacctaccacgcccaggccggtcagcccggaccaccggagcccgaagagcccgaagctgaccagcacctgctgccaccaacactccccactagcgccacgagtctggcttctgatagtacctttgatagtggacagggttccacagtgtacagtgattctcagtcatcccagcagagcgtgatgctcgggtcgcttgccgacgctgctcccagtccagcccagtgtgtgtgctcaccccctgtttccgaaggccctgttctccctcagagtctgccctccctgggcgcttaccaacagcctaccgccgctcctggcctgcctgtcgggtccgtcccagccccagcttgccctccatccctgcaacaacacttcccggatcctgctatgagtttcgcccctgtgctccctcccccttccacccccatgccgactggcccaggtcagccagccccacctggtcaacaaccgccaccattggcacagccgaccccacttccccaggtgctcgcacctcagccggtggtgcctctccagcccgtgcccccacatttaccgccatacctcgctccggcttcacaggtcggcgctcctgcgcaactgaaaccactgcagatgccacaggctccactccagccactcgcccaggttccacctcagatgcccccaatcccagtggtgcctccgattacccctctagcaggtattgacggcctgccgccagcattgcctgatctgcccaccgctactgtgcctccagtgcccccaccacaatacttttcgcctgctgtgattctaccctctttggcagcccctctccctcccgcatcccctgcacttcccttgcaggctgtgaaactaccacatcctcctggggctcccctggcaatgccttgcaggaccatagtcccaaatgctccagccactatcccacttctggcggtggctccgccaggcgtagccgctctttcgatacacagtgcggtagctcagttgcccggacagccagtttacccagccgctttccctcagatggcacccaccgacgtgccaccttctccccaccatactgtccagaacatgcgcgcaacaccccctcagccagctctcccgccacaaccaacattgccgcctcagccagtgctgccaccacagcccaccctgccccctcagccggtgctgccacctcagcctacgcgcccacctcagccagttctgcctccacagcccatgctgccccctcaaccagtcctgccccctcagccagctctccccgtgagaccagaacccttgcaaccacatttacctgagcaagccgcacctgcagccacccccggatcacagattctgctgggacaccctgccccatacgcagtggacgtggctgcccaggtgcctaccgtgcccgttccacccgctgcagtcctctctcctcccctgcccgaggtcttactgcccgcagctcccgaactcctgccgcagtttccatccagcctggcgaccgtcagcgcttccgtccagagtgtacctactcagactgcaactctgctgccacccgctaaccccccactgccagggggaccaggaatagctagcccctgtccaactgtgcagctgactgtggagcctgtacaggaggagcaggcaagtcaggacaaaccacccggtctgccacagagctgcgaatcatatggagggagtgacgtcacaagcggcaaggaactatcagacagttgcgagggggcatttggcggagggcgattggaaggccgtgccgctcgaaagcatcacaggaggagcacaagagctcgcagccggcaagagagggcaagcagacctaggcttactatcctcaatgtatgcaataccggcgacaagatggtagaatgtcagcttgaaacgcataaccacaaaatggtgacatttaagttcgaccttgacggcgacgctcctgacgagatcgccacctatatggtggaacacgatttcatcctacaggccgaacgcgagacgttcattgagcagatgaaggacgtcatggacaaagctgaagatatgctcagtgaggataccgatgccgaccggggttcagaccccggtacttcccctccgcatttatctacatgcggacttggaacgggggaggaatctcggcagtcgcaagccaacgcaccagtttatcagcagaatgttctccataccggaaagaggtggttcattatatgcccggtcgccgagcaccctgcacctgaagcaccggagtcttctcctcccctgccattaagcagcttgcctcccgaagccagtcagggcccttgtaggggccttactctgccatgtttaccttggcgacgagccgcttgtggggcagttttccttagccttttttcggcagagtccgcgcagtcaaaacaaccccctgattcagccccatataaagaccagctcagctctaaggagcaaccctccttcctggcgtcacagcagctgctgagtcaggctggtcctagcaatcctcctggcgctccacccgctcccctcgccccatcttcacccccagtcaccgcattgcctcaagatggcgctgctcctgcaacatcaactatgccagagcctgctagcggcaccgcatcccaggctgggggtccaggcaccccccagggactaacttctgagctggaaacgtcacaaccactcgccgagacgcacgaggctcccttggccgtgcagcctctggtggtcggactggccccttgtacgccggcacccgaggccgcttcaacaagagatgcatcagcccctagggagcctctccctccacccgcacccgagccctccccccacagtggcacgcctcagccagctctgggccagcctgctccgctcctccctgccgctgtgggcgctgtttcacttgctacctctcaactgccaagtccgcctctgggcccaacagtacccccacagcccccatctgccttggagtctgatggcgagggcccacccccaagagtcgggttcgtcgattcgacgatcaaatccctggatgagaagctacgtaccctcctttaccaagaacatgtccccacatcgagtgctagcgcagggactcctgtggaagtgggggatcgcgacttcaccctggagcccctcaggggggatcagccccgttccgaggtatgcgggggagatctggctctgccacccgtaccaaaagaggccgtaagcggacgggtgcagctcccgcaacccctcgtagaaaagtcagagctggctccaacaagaggggcagtgatggaacagggaacgagctctagcatgaccgcagaatctagcccgaggtccatgctggggtatgatcgcgacgggagacaagtggctagcgatagccacgtggtgcctagtgtgcctcaggacgtgcccgcatttgtccgtcctgcccgtgtggaacctacggatagggatgggggagaagccggtgagagctcagccgagccaccacccagtgatatgggaaccgttggcggtcaggcgagccaccctcagaccttgggagcccgagcccttgggtcgcctcggaagagaccggaacagcaggacgtgtccagccccgctaagacagttgggagatttagtgtagtgtcaactcaggacgagtggacattggcatccccacatagtttgcgctattcagctccccctgatgtctacttggacgaggccccttctagccccgatgtgaaactggcagttaggagggctcagacagcgagttccatagaggtgggtgtgggggagcccgtgagctctgatagtggggacgaggggcctcgcgctcggccacctgtccagaagcaagccagtctcccagtgtcagggtctgtggccggtgattttgttaagaaagcaactgcttttctgcagagaccctctcgggcagggagtctgggtcccgaaacaccgtcaagggtggggatgaaagtgcctaccatctcggtgactagttttcacagccagagctcttatatctcaagcgacaacgattccgagctggaggatgctgacatcaagaaggagctacagagccttcgggaaaagcacctgaaggagataagtgagcttcaaagccaacaaaagcaggaaatcgaggccctataccggaggctcggcaagcccctgcctcccaacgtggggttttttcacaccgccccacctacaggcaggagacgcaagaccagcaagagtaagctcaaagcaggcaagctgcttaaccccttggtgcggcagttgaaagtcgtggcttcatccaccgggcacttggcggacagttcccggggaccacctgcaaaagatccagcacaggcaagcgtgggactgactgcggacagtaccggcttaagtggaaaggctgtgcagacccagcagccttgttctgtgcgggcaagcctctcgtccgacatctgtagcggattggccagcgacggagggggtgcacgtggccagggatggaccgtatatcatccaacatcagaacgcgtgacctacaaatcatccagcaaacccagggcacggttcctgtcgggcccagtaagcgtgagcatttggtccgccttgaagcgcctttgcctggggaaggagcactccagccgaagcagcactagttccttggctccgggacccgagccaggcccacagccagccttgcacgttcaagcgcaggtgaacaacagcaacaacaagaaaggtaccttcacagacgatctgcacaaactggtcgacgaatggacttccaaaaccgtgggggctgctcagctaaagcctacgttgaatcagctcaagcagacacaaaagctccaggacatggaagcgcaggctggctgggctgcaccaggcgaggccagggcgatgacagcaccacgggctggggttggaatgccgaggctgcccccagctcctgggccactcagtacaactgtcatcccaggcgctgctcctacgttgagcgtgccgacacccgacggcgcactcggaaccgcgcgaaggaaccaggtttggtttggtctccgcgttcccccaaccgcgtgttgcggccactccactcaacctcgcggtgggcagcgagtgggaagcaagaccgcaagcttcgctgccagcgacccagtaagaagttac

SEQ ID NO: 101136 - DNA, 5600 bp, Artificial Sequence
  derived and/or modified sequence
atggccacctcagaatatccatatagcgagtgccagaacgccgcacagatctacagaaaagttacctgcggaataaagcccgcatcgttcgagaaagtacacgaccccgagatcaaagagattattggagagtgtatctgtaaaaacaaggaagaacgttatgaaattaaagacctcctaagtcatgccttttttgcagaggataccggagtccgggtggagctagctgaggaagaccacggcaggaaatcaacaatagccctgcggctctgggtcgaagatcctaagaagctcaagggcaagcctaaggataacggagcaatcgagttcacattcgatctcgaaaaggagaccccggatgaggttgcccaggaaatgattgagtccggcttctttcatgaatctgacgtcaagattgtggccaaatccattcgagacagagtcgccctgattcaatggagaagagagaggatttggccagccctgcagcctaaagaacagcaagatgtcggatcaccagataaagccaggggcccaccagtccccttacaagtccaggtgacatatcacgcccaggctggtcagccgggtccccctgaacccgaagaacctgaggccgaccagcacctattgccacctacattgcccacttcagcaacatctcttgcaagcgacagtaccttcgactcaggccagggctccactgtttacagcgatagtcagagcagtcagcagagcgttatgctgggatccctggccgacgctgcgccttccccagctcagtgtgtgtgctctcctccggtgtccgaggggcctgtcttgcctcaaagcctgccgtctcttggggcttaccagcagcccactgctgcccctggcctccccgtaggaagcgtgccagcccctgcgtgtcccccatccctgcagcaacactttccggaccccgcaatgtcattcgcaccggttcttccgcctcctagcaccccgatgccaactgggccaggtcagcccgcaccgcctggccagcagccacctcccctggcccaaccaacccccctaccccaagtgctcgcaccccagccggtggtaccactgcaacccgtccctccccatctgccaccttacctcgctcctgcctctcaagtcggagcgcctgctcaacttaaaccgcttcagatgcctcaggcccctctgcaacctctggcccaagtgcctccacagatgccccctattccggtcgtccctcccataacgccactggccggtattgatggcctgccccctgcccttcctgacctcccaacagcaacagtgcctccagtacctccaccccagtacttttcaccagccgtcatactccctagcttggccgcaccccttcctcccgcaagtcccgctttgcccctgcaggcggtcaaacttcctcaccctcctggggctccactggctatgccttgccgcacgatcgttcccaatgcgcctgcaaccattccattactggcagtggcccctccaggcgtggctgctttatctatccactccgctgtggctcaattgcctggacaacctgtgtatccagcagcatttccccagatggcccctacagatgtgccgccttccccacaccacaccgtccaaaacatgagagcaacccctccccagccagccctcccaccacagcccaccctgcctccccaaccagtgctgcctcctcagcccacacttcctcctcagccagttctgccaccccagcctacaaggcccccacagcccgtgcttccccctcagccaatgctcccaccacaaccagttctgcctccacaacccgcacttcccgtgcgccctgagccactgcagcctcatctgcccgaacaggccgctcccgctgctacgccaggatcccagatccttcttggccatcccgctccatatgctgtggatgtcgcagctcaggtacccaccgtccctgtgccccctgctgccgtgttatctcctcccctaccagaggtgttgttaccagccgcacctgaattacttcctcagttccctagctctctcgcaacagtgagtgcctccgtgcaaagcgtaccaacccagactgccacacttctgcctcccgcaaatcccccattgcctgggggacccggtatcgccagcccctgcccaaccgttcaactgactgttgagccagtccaagaggagcaggccagccaggataaaccaccaggacttccgcagtcctgcgaatcttatggtggatccgacgtgacctctgggaaagagctcagtgatagttgcgaaggagcattcgggggaggcagacttgagggcagagcggctcgcaagcatcaccggcgttctactcgagcgcgaagtagacaggaacgggcatcacgaccaagattgacaattctgaacgtctgcaatactggcgacaagatggttgagtgtcagttggagacacacaatcacaagatggtaacgttcaagttcgatttagatggcgacgctcccgatgagatagccacttacatggtggaacacgacttcatcctccaggctgagcgcgagaccttcatagaacagatgaaggatgtgatggacaaggcagaagatatgctgagtgaagacacggatgctgatcgcggatcggatccaggcacatccccaccacacctaagcacttgtggattggggaccggagaggagtcccgtcagagccaggctaatgctccggtgtatcagcagaacgtgcttcacaccggaaagcgttggttcatcatttgtcccgtggccgagcacccagcccctgaggcacctgagtcatcaccacctctgcccttgagctccctgcccccagaagcatcccagggcccatgtcgcggacttaccctgccatgcctcccctggaggcgcgcagcatgcggagccgtgttcctatccctcttctcagccgagagcgctcaatcgaagcagccacctgattcagctccctataaagaccagttgagttccaaagagcagccaagctttctagcttctcagcagctcctctctcaggcaggcccttccaaccccccaggagcccctccagctcctctggcccctagcagtccacccgttactgctctgcctcaggacggggcagcccctgctacatcaacaatgcccgaacccgcatctggtaccgcgagtcaggccggtgggcctggaacaccacaggggctgaccagtgaactggagacctctcagccgctagccgagactcatgaggcgccacttgccgtgcagcctctcgtagtcgggcttgcaccctgcacaccagcaccggaggccgctagtacgagagacgctagcgctccaagagagcctcttcctcctccagccccagagccgtctccgcattctggaacgccccagcctgcccttggccagccagccccattgctaccagccgctgtcggtgccgtctccctcgctacctctcaactgccctctccgcctctgggacccacagtcccgcctcagccaccgtccgccctagagagcgatggcgaaggaccccctcccagagtgggcttcgtggactccacaatcaagagcttagacgaaaagttgcggaccctactctatcaagagcacgtccccacgtcatctgcctctgcagggactccagtcgaggtgggggatcgagacttcacgctggagccactccgaggggaccagcccaggagcgaggtgtgcggcggtgacttggctctaccccctgttcccaaggaggcagtgagtggacgggtacagcttccccaacccttagtcgaaaaatccgaattggcaccgaccaggggtgcagtgatggagcaaggcacaagtagttccatgacagctgagtcttcacctcggtctatgttgggttatgatagggatggacgccaggtggcatccgactcccacgtagtgccatctgtgcctcaagatgtccccgcattcgtccgaccagccagggtggaacctacagaccgagatgggggtgaggcgggagaaagctccgccgagcccccacccagcgacatggggaccgtgggaggtcaggcttcccaccctcagactttgggagcccgagccttaggatctccacggaagaggcctgaacagcaagacgtgtccagcccagctaagaccgttgggaggttttccgttgtatctactcaagacgagtggaccctcgcctccccccacagcctgcggtactcagctccgccagacgtgtacttggatgaggcaccctcgtcgcccgatgtcaaactggcagttcgtagggcacagaccgcctcctctattgaagtgggcgttggagaaccggtctcttcagattcaggagatgaggggccacgtgcaaggcccccagtgcagaagcaagctagcctcccggtctccggctccgtggccggagactttgtgaagaaggccacagcctttctccagcgaccaagccgggctggttctcttggtcctgagacacctagtcgggtgggtatgaaagttccgactatttcggtgacatcatttcattcacagtcatcttacatttcgagcgataatgactcggagctcgaagatgctgacatcaaaaaagaacttcagtctctcagagaaaagcaccttaaggagatctccgaattacagtcccaacaaaagcaggagattgaggccttgtacaggagactgggtaagcctcttcccccaaatgtgggcttctttcacaccgcccctcccacagggaggcgccgtaagacatctaagtctaaactgaaagccggaaagctcctgaaccctcttgtgaggcaacttaaggttgttgccagctccactgggcacttggccgactcttctcgcggaccccctgccaaggacccagctcaggcctctgtgggactaaccgcagattccactgggctgtccggcaaagcggtccaaacccagcaaccatgcagcgtccgagcaagccttagtagcgacatctgctccggattagcatcagacggtggcggagccaggggtcaggggtggaccgtttaccatcctacgtccgagagagtgacctacaaatccagtagtaaaccgagagccaggtttttgtcaggtcccgtcagtgtgagcatctggagtgctctcaaaaggctgtgtctgggtaaggagcattcctcaaggagttctacgtcaagcctggcacctggacctgagcccggtccacagccagctttacacgttcaggcccaggtcaataattccaataataagaagggaacttttaccgatgaccttcacaagttagtggatgagtggacctctaaaaccgtaggggcagcccagctgaaaccgaccctgaaccagctaaaacagacacagaaactccaggacatggaagctcaggccggatgggccgctccaggggaggctcgcgcaatgaccgctccaagggctggtgtgggaatgccacgtcttcctccagcaccgggaccactaagcacgacggtgataccaggcgcagctccgacactgtcagtgcctacaccagacccagagtcagagaaaccagacta

SEQ ID NO: 101137 - DNA, 7138 bp, Artificial Sequence
  derived and/or modified sequence
atggacggcgatggcggccgccgagacgtccccggcacgctgatggagcccgggcgcggcgcggggcccgcgggcatggcggagcctcgggcgaaggcggcgcggccggggccccagcgctttctgcggcgcagcgtggtagagtcggaccaggaggagccgccgggcttggaggcagccgaggcgccgggcccgcagcccccgcagcccctgcagcgccgggtgcttctgctctgcaagacgcgccgcctcatcgcggagcgcgcccgcggacgccccgccgcccccgcgcccgcagcgctggtagcgcagccgggagcccccggagcccccgcggacgccggccccgagcccgtgggcacgcaggagcccggcccggaccccatcgcagccgctgtcgaaaccgcgcctgcccccgacggcggccccagggaggaggcggcggcgaccgtgaggaaggaggatgagggggcggccgaggcgaagcctgagcccgggcgcactcgccgggacgagcccgaagaggaggaggacgacgaggacgacctcaaggccgtggccacctctctggacggccgcttcctcaagttcgacatcgagctgggccgcggttccttcaagacggtctacaaggggctggacacggagacctgggtggaggtggcctggtgtgagctgcaggaccggaagctcaccaagctggagcggcagcggttcaaggaagaggctgagatgctgaaaggcctgcagcaccccaacatcgtgcgcttctacgacttctgggagtccagcgccaagggcaagcggtgcattgtgctggtgacggagctgatgacctcagggacgctgaagacatacctgaagcggttcaaggtgatgaagcccaaggttctccgcagctggtgccggcagatcctgaagggcctgctgttcctgcacacaaggacgccacccatcatccaccgagacctgaaatgtgacaatattttcatcaccggaccaactgggtctgtgaagattggcgacttgggcctggccactctgaaaagagcgtcatttgccaaaagtgtgataggtactcccgagttcatggcgcccgagatgtacgaggagcactacgatgagtccgtggacgtctatgcctttgggatgtgcatgctggagatggccacctcggagtacccctactcggagtgccagaatgcggcccagatctaccgcaaggtcacctgtggtatcaagccggccagctttgagaaagtgcacgatcctgaaatcaaggagattattggggagtgtatctgcaaaaacaaggaggaaaggtacgagatcaaagacctgctgagccacgccttcttcgcagaggacacaggcgtgagggtggagctcgcggaggaggaccacggcaggaagtccaccatcgccctgaggctctgggtggaagaccccaagaaactgaagggaaagcccaaggacaatggagccatagagttcaccttcgacctggagaaggagacgccggatgaggtggcccaagagatgattgagtctggattcttccacgagagtgacgtcaagatcgtggccaagtccatccgtgaccgcgtggccttgatccagtggcggcgggagaggatctggcccgcgctgcagcccaaggagcagcaggatgtgggcagcccggacaaggccaggggtccgccggtgcccctgcaggtccaggtgacctaccatgcacaggctgggcagcccgggccaccagagcccgaggagccggaggccgaccagcacctcctgccacctacgttgccgaccagcgccacctccctggcctcggacagcaccttcgacagcggccagggctctaccgtgtactcagactcgcagagcagccagcagagcgtgatgcttggctcccttgccgacgcagcgccgtccccggcccagtgtgtgtgcagcccccctgtgagcgaggggcccgtcctgccgcagagcctgccctcgctgggggcctaccagcagcccacggctgcacctggcttgccggtgggctctgtcccggcccccgcctgccctccgtccctccagcagcacttcccggatccggccatgagcttcgcccccgtgctgccgccgcccagcacccccatgcccacgggcccaggccagccagcaccccccggccagcagcctcctccgctggcccagccgacacccctgccgcaggtcctggccccacagcccgtggtccccctccagccggttcccccccacctgccaccgtacctggctccagcctcccaggtgggggcccccgctcagctgaagcccctccagatgccacaggcgcccctgcagccgcttgctcaagtccctccgcagatgcccccgattcctgttgtgccccccatcacgcccctggcgggaatcgacggcctccctccggccctcccagacctgccgaccgcgactgtgcctcccgtgccaccacctcagtatttctctccagccgtgatcttgccgagcctcgctgccccactcccccctgcgtccccagccttgcctctgcaggctgtgaagctgccccacccccctggggcgcccctggccatgccctgccggaccattgtgccaaatgcaccggccactatccccctgctggccgtagccccaccgggcgtggctgccctgtccattcattctgccgtggcccagctcccaggccaacctgtgtacccagcggccttcccacagatggcgcctactgacgtccctccttccccccatcacacggtgcagaatatgagggccacccctccacagccggcactgcctccacaacccacactgcccccacaacccgtgctgcccccgcaacccacgctgccccctcaacctgtgttgcccccgcaacccacacggccccctcaacctgtgctgcccccgcaacccatgctgcccccacaacctgtgctgcccccgcagccggcactgcctgtgcgccctgagcccctccagccccaccttcctgaacaagctgctccagctgctacaccagggagccagattctgcttggccacccagctccctatgctgtggacgtcgccgctcaggtccccaccgtgcctgtgccaccggctgcggtcctctcgccgcctctgccggaagtgctgctgcctgccgcccctgagctcctgcctcagttccccagctccctggccacggtgtctgcctctgtgcagagtgtgcccacccagactgccacacttctgccaccagcaaacccaccgctgcctggcgggcccgggatcgccagcccttgcccaactgtccagctgacggtggaaccagtccaagaggagcaggcctcacaggacaagccgcccggcctcccgcagagctgtgagagctatggaggttctgatgtcacttctggaaaagagctgagtgacagctgtgaaggcgcctttggagggggcaggctggagggcagggcagcccgaaaacaccaccgcaggtccacgcgtgcgcgctcccggcaggagagggccagccggccccggcttaccatcttgaacgtgtgcaacactggggacaagatggtggagtgccagctggagacgcacaaccacaagatggtgaccttcaagttcgacttggacggggacgcacccgatgaaattgccacgtatatggtggagcatgactttatcctgcaggccgagcgggaaacgttcatcgagcagatgaaggatgtcatggacaaggcagaggacatgctcagcgaggacacagacgccgaccgtggctccgacccagggaccagcccgccacacctcagcacctgcggcctgggcaccggggaggagagccgacaatcccaagccaacgcccccgtgtatcagcagaacgtcctgcacaccgggaagaggtggttcatcatctgtccggtggctgagcaccccgcccccgaggcccctgaatcttcgcccccacttcctctaagctccctgccgccagaagccagccaaggtccatgcagggggctcaccctgccctgtctcccatggcgcagagcagcctgtggggctgtgttcctatccttgttttctgctgaatcagctcagtcaaagcagcctccagattcagcgccctataaagaccagctgtcctcgaaggaacaacccagctttctagccagtcagcagctcctgagccaggcgggccccagcaaccctcctggggcacccccagcccctttggccccctcctcccctcctgtgactgctctgccccaagatggagcagctccagccaccagcaccatgccagagccagcgtcaggaactgccagccaggcagggggtccagggacacctcaggggctgaccagtgagctcgagacgtctcagccactagcggagactcacgaggccccgcttgctgtgcagcccctcgtggtgggcctagcaccttgcactccagctccagaggctgcctcaaccagggacgccagtgccccaagggagcccctgccacctcctgcacctgagcccagcccccacagcgggaccccacagcccgccttgggtcaacctgctcccctgcttcctgccgcagtgggggccgtcagcctggccacctcccagctcccaagcccacccctggggcccaccgtccccccacagccaccctcggccctggagtcggatggggaagggccgccccccagggtgggctttgtggacagcaccatcaagagcctggacgagaagctgcggactctgctctaccaggagcacgtgcccacctcctcagcctcagctgggacccctgtggaggtgggcgacagagacttcaccctggagcccctgagaggggaccagccccgctcagaggtctgcgggggggacctggccctgcccccagtgcctaaggaggcggtctcagggcgtgtccagctgccccagcccttggtggagaagtcagaactggcccccactcgaggggccgtgatggagcagggcacgtcctcgtcaatgacagcagagtcgtctcccaggagtatgctaggctatgacagagatggaaggcaggtggcctcagactcccatgtggtccccagcgtcccccaggatgtacctgcttttgtgagacctgcacgtgtggagcccacagacagggatggtggagaagctggagaaagctcggcagagcccccgccgagtgacatgggcacagtggggggccaggctagccacccccagacactcggcgctcgagctttggggtcccctcggaaacgtccagagcagcaggatgtcagctcaccagccaagactgtgggccgtttctcggtggtcagcactcaggacgagtggaccctggcctccccccacagcctgagatactctgccccacccgacgtctacctggacgaggccccctccagccccgacgtgaagctggcagtgcggcgggcgcagacggcctcctccatcgaggtcggcgtgggcgagcccgtgtccagcgactctggggacgagggccctcgggcgagacccccggtgcagaagcaggcgtccctgcccgtgagtggcagcgtggctggcgacttcgtgaagaaggccaccgccttcctgcagaggccttctcgggccggctcgctgggccccgagacacccagcagggtgggcatgaaggtccccacgatcagcgtgacctccttccattcccagtcgtcctacatcagcagcgacaatgattcggagctcgaggatgctgacataaagaaggagctgcagagtctgcgggagaagcacctgaaggagatctcggagctgcagagccagcagaagcaggagatcgaagctctgtaccgccgcctgggcaagccactgccccccaacgtgggcttcttccacacggcaccccccactggccgccggagaaaaaccagcaagagcaagctgaaggcaggcaagctgctaaatcccctggtgcggcagctcaaggtcgtggcctccagcacaggtcacttggctgactccagcagaggccctcccgctaaggaccctgcccaagccagtgtggggctcactgcagacagcacgggcctgagcgggaaggcagtgcagacccagcagccctgctccgtccgggcctccctgtcttcggacatctgctccggcttagccagtgatggaggcggagcgcgtggccaaggctggacggtttaccacccaacgtctgagagagtgacctataagtctagtagcaaacctcgtgctcgattcctcagtggacccgtatctgtgtccatctggtctgccctgaagcgtctctgcctaggcaaagaacacagcagtaggtcctccaccagcagcctggccccaggccctgagccaggcccccagcccgccctgcacgtccaggcgcaggtgaacaacagcaacaacaagaagggtaccttcacggacgacctgcacaagctggtggacgagtggacgagcaagacggtgggggccgcgcagctgaagcccacgctcaaccagctgaagcagacccagaagctgcaagacatggaggcccaggcaggctgggctgcccctggcgaggcgcgggctatgaccgcacctcgagcaggagtggggatgccacgtctgcccccagcgcccggccctctgtccaccacggtcattcccggagccgccccgaccctgtccgtgcccacaccagatggcgccctcggaaccgcccggagaaaccaggtgtggtttggcctccgagtcccccccaccgcctgctgtgggcacagcactcagccgcgagggggacagcgggtgggcagcaagactgcttcctttgcggcttcagaccctgttcgctcctaggttcctgtggtccacgcgccgtctccacacccacttcctatacttgagttgatggttagaaccttgtcgtcaccctgcagaagtacagtgccttgaatgccagcttttccgttccctgatgaaaagatatgttaaaaaaaattatcggaaaaggtttcatttgcaattggcttgtgcattgataatctttatttactgttttaagttgcagagatgtgaatggtttacaaatctgaagctgaag

SEQ ID NO: 101138 - DNA, 6945 bp, Artificial Sequence
  derived and/or modified sequence
atggacggcgatggcggccgccgagacgtccccggcacgctgatggagcccgggcgcggcgcggggcccgcgggcatggcggagcctcgggcgaaggcggcgcggccggggccccagcgctttctgcggcgcagcgtggtagagtcggaccaggaggagccgccgggcttggaggcagccgaggcgccgggcccgcagcccccgcagcccctgcagcgccgggtgcttctgctctgcaagacgcgccgcctcatcgcggagcgcgcccgcggacgccccgccgcccccgcgcccgcagcgctggtagcgcagccgggagcccccggagcccccgcggacgccggccccgagcccgtgggcacgcaggagcccggcccggaccccatcgcagccgctgtcgaaaccgcgcctgcccccgacggcggccccagggaggaggcggcggcgaccgtgaggaaggaggatgagggggcggccgaggcgaagcctgagcccgggcgcactcgccgggacgagcccgaagaggaggaggacgacgaggacgacctcaaggccgtggccacctctctggacggccgcttcctcaagttcgacatcgagctgggccgcggttccttcaagacggtctacaaggggctggacacggagacctgggtggaggtggcctggtgtgagctgcaggaccggaagctcaccaagctggagcggcagcggttcaaggaagaggctgagatgctgaaaggcctgcagcaccccaacatcgtgcgcttctacgacttctgggagtccagcgccaagggcaagcggtgcattgtgctggtgacggagctgatgacctcagggacgctgaagacatacctgaagcggttcaaggtgatgaagcccaaggttctccgcagctggtgccggcagatcctgaagggcctgctgttcctgcacacaaggacgccacccatcatccaccgagacctgaaatgtgacaatattttcatcaccggaccaactgggtctgtgaagattggcgacttgggcctggccactctgaaaagagcgtcatttgccaaaagtgtgataggtactcccgagttcatggcgcccgagatgtacgaggagcactacgatgagtccgtggacgtctatgcctttgggatgtgcatgctggagatggccacctcggagtacccctactcggagtgccagaatgcggcccagatctaccgcaaggtcacctgtggtatcaagccggccagctttgagaaagtgcacgatcctgaaatcaaggagattattggggagtgtatctgcaaaaacaaggaggaaaggtacgagatcaaagacctgctgagccacgccttcttcgcagaggacacaggcgtgagggtggagctcgcggaggaggaccacggcaggaagtccaccatcgccctgaggctctgggtggaagaccccaagaaactgaagggaaagcccaaggacaatggagccatagagttcaccttcgacctggagaaggagacgccggatgaggtggcccaagagatgattgagtctggattcttccacgagagtgacgtcaagatcgtggccaagtccatccgtgaccgcgtggccttgatccagtggcggcgggagaggatctggcccgcgctgcagcccaaggagcagcaggatgtgggcagcccggacaaggccaggggtccgccggtgcccctgcaggtccaggtgacctaccatgcacaggctgggcagcccgggccaccagagcccgaggagccggaggccgaccagcacctcctgccacctacgttgccgaccagcgccacctccctggcctcggacagcaccttcgacagcggccagggctctaccgtgtactcagactcgcagagcagccagcagagcgtgatgcttggctcccttgccgacgcagcgccgtccccggcccagtgtgtgtgcagcccccctgtgagcgaggggcccgtcctgccgcagagcctgccctcgctgggggcctaccagcagcccacggctgcacctggcttgccggtgggctctgtcccggcccccgcctgccctccgtccctccagcagcacttcccggatccggccatgagcttcgcccccgtgctgccgccgcccagcacccccatgcccacgggcccaggccagccagcaccccccggccagcagcctcctccgctggcccagccgacacccctgccgcaggtcctggccccacagcccgtggtccccctccagccggttcccccccacctgccaccgtacctggctccagcctcccaggtgggggcccccgctcagctgaagcccctccagatgccacaggcgcccctgcagccgcttgctcaagtccctccgcagatgcccccgattcctgttgtgccccccatcacgcccctggcgggaatcgacggcctccctccggccctcccagacctgccgaccgcgactgtgcctcccgtgccaccacctcagtatttctctccagccgtgatcttgccgagcctcgctgccccactcccccctgcgtccccagccttgcctctgcaggctgtgaagctgccccacccccctggggcgcccctggccatgccctgccggaccattgtgccaaatgcaccggccactatccccctgctggccgtagccccaccgggcgtggctgccctgtccattcattctgccgtggcccagctcccaggccaacctgtgtacccagcggccttcccacagatggcgcctactgacgtccctccttccccccatcacacggtgcagaatatgagggccacccctccacagccggcactgcctccacaacccacactgcccccacaacccgtgctgcccccgcaacccacgctgccccctcaacctgtgttgcccccgcaacccacacggccccctcaacctgtgctgcccccgcaacccatgctgcccccacaacctgtgctgcccccgcagccggcactgcctgtgcgccctgagcccctccagccccaccttcctgaacaagctgctccagctgctacaccagggagccagattctgcttggccacccagctccctatgctgtggacgtcgccgctcaggtccccaccgtgcctgtgccaccggctgcggtcctctcgccgcctctgccggaagtgctgctgcctgccgcccctgagctcctgcctcagttccccagctccctggccacggtgtctgcctctgtgcagagtgtgcccacccagactgccacacttctgccaccagcaaacccaccgctgcctggcgggcccgggatcgccagcccttgcccaactgtccagctgacggtggaaccagtccaagaggagcaggcctcacaggacaagccgcccggcctcccgcagagctgtgagagctatggaggttctgatgtcacttctggaaaagagctgagtgacagctgtgaaggcgcctttggagggggcaggctggagggcagggcagcccgaaaacaccaccgcaggtccacgcgtgcgcgctcccggcaggagagggccagccggccccggcttaccatcttgaacgtgtgcaacactggggacaagatggtggagtgccagctggagacgcacaaccacaagatggtgaccttcaagttcgacttggacggggacgcacccgatgaaattgccacgtatatggtggagcatgactttatcctgcaggccgagcgggaaacgttcatcgagcagatgaaggatgtcatggacaaggcagaggacatgctcagcgaggacacagacgccgaccgtggctccgacccagggaccagcccgccacacctcagcacctgcggcctgggcaccggggaggagagccgacaatcccaagccaacgcccccgtgtatcagcagaacgtcctgcacaccgggaagaggtggttcatcatctgtccggtggctgagcaccccgcccccgaggcccctgaatcttcgcccccacttcctctaagctccctgccgccagaagccagccaaggtccatgcagggggctcaccctgccctgtctcccatggcgcagagcagcctgtggggctgtgttcctatccttgttttctgctgaatcagctcagtcaaagcagcctccagattcagcgccctataaagaccagctgtcctcgaaggaacaacccagctttctagccagtcagcagctcctgagccaggcgggccccagcaaccctcctggggcacccccagcccctttggccccctcctcccctcctgtgactgctctgccccaagatggagcagctccagccaccagcaccatgccagagccagcgtcaggaactgccagccaggcagggggtccagggacacctcaggggctgaccagtgagctcgagacgtctcagccactagcggagactcacgaggccccgcttgctgtgcagcccctcgtggtgggcctagcaccttgcactccagctccagaggctgcctcaaccagggacgccagtgccccaagggagcccctgccacctcctgcacctgagcccagcccccacagcgggaccccacagcccgccttgggtcaacctgctcccctgcttcctgccgcagtgggggccgtcagcctggccacctcccagctcccaagcccacccctggggcccaccgtccccccacagccaccctcggccctggagtcggatggggaagggccgccccccagggtgggctttgtggacagcaccatcaagagcctggacgagaagctgcggactctgctctaccaggagcacgtgcccacctcctcagcctcagctgggacccctgtggaggtgggcgacagagacttcaccctggagcccctgagaggggaccagccccgctcagaggtctgcgggggggacctggccctgcccccagtgcctaaggaggcggtctcagggcgtgtccagctgccccagcccttggtggagaagtcagaactggcccccactcgaggggccgtgatggagcagggcacgtcctcgtcaatgacagcagagtcgtctcccaggagtatgctaggctatgacagagatggaaggcaggtggcctcagactcccatgtggtccccagcgtcccccaggatgtacctgcttttgtgagacctgcacgtgtggagcccacagacagggatggtggagaagctggagaaagctcggcagagcccccgccgagtgacatgggcacagtggggggccaggctagccacccccagacactcggcgctcgagctttggggtcccctcggaaacgtccagagcagcaggatgtcagctcaccagccaagactgtgggccgtttctcggtggtcagcactcaggacgagtggaccctggcctccccccacagcctgagatactctgccccacccgacgtctacctggacgaggccccctccagccccgacgtgaagctggcagtgcggcgggcgcagacggcctcctccatcgaggtcggcgtgggcgagcccgtgtccagcgactctggggacgagggccctcgggcgagacccccggtgcagaagcaggcgtccctgcccgtgagtggcagcgtggctggcgacttcgtgaagaaggccaccgccttcctgcagaggccttctcgggccggctcgctgggccccgagacacccagcagggtgggcatgaaggtccccacgatcagcgtgacctccttccattcccagtcgtcctacatcagcagcgacaatgattcggagctcgaggatgctgacataaagaaggagctgcagagtctgcgggagaagcacctgaaggagatctcggagctgcagagccagcagaagcaggagatcgaagctctgtaccgccgcctgggcaagccactgccccccaacgtgggcttcttccacacggcaccccccactggccgccggagaaaaaccagcaagagcaagctgaaggcaggcaagctgctaaatcccctggtgcggcagctcaaggtcgtggcctccagcacaggtcacttggctgactccagcagaggccctcccgctaaggaccctgcccaagccagtgtggggctcactgcagacagcacgggcctgagcgggaaggcagtgcagacccagcagccctgctccgtccgggcctccctgtcttcggacatctgctccggcttagccagtgatggaggcggagcgcgtggccaaggctggacggtttaccacccaacgtctgagagagtgacctataagtctagtagcaaacctcgtgctcgattcctcagtggacccgtatctgtgtccatctggtctgccctgaagcgtctctgcctaggcaaagaacacagcagtaggtcctccaccagcagcctggccccaggccctgagccaggcccccagcccgccctgcacgtccaggcgcaggtgaacaacagcaacaacaagaagggtaccttcacggacgacctgcacaagctggtggacgagtggacgagcaagacggtgggggccgcgcagctgaagcccacgctcaaccagctgaagcagacccagaagctgcaagacatggaggcccaggcaggctgggctgcccctggcgaggcgcgggctatgaccgcacctcgagcaggagtggggatgccacgtctgcccccagcgcccggccctctgtccaccacggtcattcccggagccgccccgaccctgtccgtgcccacaccagatcctgagagtgagaagcctgactgaccccgcctagacgccaggcccacttcacgccgtctaagtggagaagtgacggaccctcagggccagctgctcctcctgtccagttcacgctgttttgtaaccactttctaagcattttttattcacaattggaaacacaaatgtaatgcaagaataaaaaatattttggggcagaaagga

SEQ ID NO: 101139 - protein, 388 aa, Artificial Sequence
  derived and/or modified sequence
MAAVSPTTRCQESVTFEDVAVVFTDEEWSRLVPIQRDLYKEVMLENYNSIVSLDWETKPEIHDASDKKSEGSLRECLGRQSPLCPKFEVHTPNGRMGTEKQSPSGETRKKSLSRDKGLRRRRSALSREILTKERHQECSDCGKTFFDHSSLTRHQRTHTGEKPYDCRECGKAFSHRSSLSRHLMSHTGESPYECSVCSKAFFDRSSLTVHQRIHTGEKPFQCNECGKAFFDRSSLTRHQRIHTGESPYECHQCGKAFSQKSILTRHQLIHTGRKPYECNECGKAFYGVSSLNRHQKAHAGDPRYQCNECGKAFFDRSSLTQHQKIHTGDKPYECSECGKAFSQRCRLTRHQRVHTGEKPFECTVCGKVFSSKSSVIQHQRRYAKQGID

SEQ ID NO: 101140 - protein, 346 aa, Artificial Sequence
  derived and/or modified sequence
MLENYNSIVSLDWETKPEIHDASDKKSEGSLRECLGRQSPLCPKFEVHTPNGRMGTEKQSPSGETRKKSLSRDKGLRRRRSALSREILTKERHQECSDCGKTFFDHSSLTRHQRTHTGEKPYDCRECGKAFSHRSSLSRHLMSHTGESPYECSVCSKAFFDRSSLTVHQRIHTGEKPFQCNECGKAFFDRSSLTRHQRIHTGESPYECHQCGKAFSQKSILTRHQLIHTGRKPYECNECGKAFYGVSSLNRHQKAHAGDPRYQCNECGKAFFDRSSLTQHQKIHTGDKPYECSECGKAFSQRCRLTRHQRVHTGEKPFECTVCGKVFSSKSSVIQHQRRYAKQGID

SEQ ID NO: 101141 - DNA, 1167 bp, Artificial Sequence
  derived and/or modified sequence
atggccgccgtgagccccaccaccagatgccaggagagcgtgaccttcgaggacgtggccgtggtgttcaccgacgaggagtggagcagactggtgcccatccagagagacctgtacaaggaggtgatgctggagaactacaacagcatcgtgagcctggactgggagaccaagcccgagatccacgacgccagcgacaagaagagcgagggcagcctgagagagtgcctgggcagacagagccccctgtgccccaagttcgaggtgcacacccccaacggcagaatgggcaccgagaagcagagccccagcggcgagaccagaaagaagagcctgagcagagacaagggcctgagaagaagaagaagcgccctgagcagagagatcctgaccaaggagagacaccaggagtgcagcgactgcggcaagaccttcttcgaccacagcagcctgaccagacaccagagaacccacaccggcgagaagccctacgactgcagagagtgcggcaaggccttcagccacagaagcagcctgagcagacacctgatgagccacaccggcgagagcccctacgagtgcagcgtgtgcagcaaggccttcttcgacagaagcagcctgaccgtgcaccagagaatccacaccggcgagaagcccttccagtgcaacgagtgcggcaaggccttcttcgacagaagcagcctgaccagacaccagagaatccacaccggcgagagcccctacgagtgccaccagtgcggcaaggccttcagccagaagagcatcctgaccagacaccagctgatccacaccggcagaaagccctacgagtgcaacgagtgcggcaaggccttctacggcgtgagcagcctgaacagacaccagaaggcccacgccggcgaccccagataccagtgcaacgagtgcggcaaggccttcttcgacagaagcagcctgacccagcaccagaagatccacaccggcgacaagccctacgagtgcagcgagtgcggcaaggccttcagccagagatgcagactgaccagacaccagagagtgcacaccggcgagaagcccttcgagtgcaccgtgtgcggcaaggtgttcagcagcaagagcagcgtgatccagcaccagagaagatacgccaagcagggcatcgactag

SEQ ID NO: 101142 - DNA, 1167 bp, Artificial Sequence
  derived and/or modified sequence
atggcagctgtttctcctaccacaagatgtcaagaaagcgtgacctttgaggacgtcgccgtggtttttacggatgaggagtggtcaaggttggtgcctattcagagagacctgtacaaagaagtcatgcttgaaaactacaactctatcgtgagtctggattgggaaacaaaaccagaaattcacgacgcttccgataagaagtcggaggggagtctgcgtgagtgtctgggccgccagagtcccctctgtccaaaatttgaggttcacacccctaacgggcgaatgggtaccgagaagcaaagtccttcgggcgaaactaggaagaaatccttatctcgggataaaggcttgagaaggcggagatccgctcttagcagagagatattaacaaaagagcgacatcaagagtgttcagattgcggaaaaaccttttttgatcactcctctctcaccaggcatcagaggacccacactggcgagaaaccttacgattgcagagagtgcggaaaggccttttcacacaggagtagcctgagtcgccacttgatgtcgcatacaggagagagcccatacgagtgctctgtctgtagtaaggctttcttcgacaggtcgagcctaaccgtgcatcagaggattcacaccggagagaagccttttcagtgcaacgaatgcggcaaggccttttttgaccggtcatctctgacacggcatcagaggatccacactggggaaagcccatatgagtgtcatcagtgcggaaaggcattctcccagaagagtatactgacgcgccaccaacttattcatactggccggaaaccttacgagtgtaacgaatgtggaaaagcattttacggggtctcctcactgaatcggcatcagaaggcacacgccggcgatccacggtatcaatgcaacgagtgcggaaaggccttcttcgatcgtagttctctgacccagcaccaaaaaattcacacgggtgataaaccgtacgagtgctccgagtgcggaaaggcattcagtcagcgttgccggctcacacgtcatcagcgcgtgcacaccggggaaaagcccttcgaatgcaccgtgtgtggcaaagttttcagcagtaagtcgagtgtgatccagcatcaaagaagatacgcaaaacaggggattgactag

SEQ ID NO: 101143 - DNA, 1167 bp, Artificial Sequence
  derived and/or modified sequence
atggctgctgtgagccccaccacccgctgccaggagagcgtgacctttgaagatgtggccgtggtgttcacagatgaggagtggagccggctggtgcccatccagagggacctgtacaaggaggtgatgctggagaactacaacagcatcgtgtccctggactgggagaccaagccagagatccatgatgccagtgacaagaagtctgagggcagcctgagagaatgtctgggccggcagagccccctgtgccccaagtttgaggtgcacaccccaaatggaaggatgggcacagagaagcagagccccagcggggagaccaggaagaagagcctgagccgggacaagggcctgcggaggagaagaagtgccctgagccgggagatcctgaccaaggagcggcaccaggagtgcagcgactgtgggaagaccttctttgaccacagcagcctgaccaggcaccagaggacccacactggagagaagccctatgactgccgggagtgtgggaaggccttcagccacaggagcagcctgagccgccacctgatgagccacactggagagagcccctatgaatgttctgtgtgcagcaaggccttctttgacaggagcagcctgactgtgcaccagaggatccacactggagagaagcccttccagtgcaatgaatgtgggaaggccttctttgacaggagcagcctgaccaggcaccagaggatccacactggagagagcccctatgagtgccaccagtgtgggaaggccttcagccagaagagcatcctgaccaggcaccagctgatccacactggaaggaagccctatgaatgtaatgaatgtgggaaggccttctacggcgtgagcagcctgaacagacaccagaaggcccatgctggggacccccgctaccagtgcaatgaatgtgggaaggccttctttgacaggagcagcctgacccagcaccagaagatccacactggagacaagccctatgaatgttctgaatgtgggaaggccttcagccagcgctgccgcctgaccaggcaccagagggtgcacactggagagaagccctttgaatgtactgtgtgtgggaaggtgttcagcagcaagagcagcgtcatccagcaccagaggagatatgccaagcagggcattgattag

SEQ ID NO: 101144 - DNA, 1167 bp, Artificial Sequence
  derived and/or modified sequence
atggccgccgtgagccccaccacccggtgccaggagagcgtgacctttgaggatgtcgcggtcgtctttacagacgaggaatggtcacggctcgtgcctatccaacgagacctatacaaagaggtgatgctcgagaattataactctatcgtgtccctggattgggaaactaagcccgagatccacgacgcctcggacaagaagtcagagggctcgctccgagaatgtttaggaagacagtctccattgtgtcctaagttcgaggtccacacccctaacgggagaatgggcacagagaaacagagccctagcggcgagaccagaaagaagtctctttccagggataagggactccgacgacggaggagcgctctgagtagagagatacttaccaaggaacgccaccaagaatgtagtgactgtggcaaaactttctttgatcacagcagtcttaccaggcaccagagaacccacacgggagaaaagccctacgattgcagagaatgcgggaaggccttctcacatcggagctctctgagccgccacctgatgtcccacaccggggaaagcccttacgaatgttctgtttgtagtaaagccttctttgaccgaagcagtctgacagtgcaccagcggatccataccggggaaaagccattccagtgtaacgagtgcggaaaagccttctttgatcggagctccttaaccaggcatcaaaggatccacaccggggagagcccttacgagtgtcaccagtgcgggaaggccttctcgcagaaaagcatccttactagacaccagctcatccacacagggcgcaaaccttacgaatgtaatgagtgtgggaaagcattttacggggtgtcatccctgaatagacaccagaaagcccatgcaggcgatcccaggtatcagtgcaacgaatgcggcaaggcatttttcgatagaagcagccttacccagcaccagaagatacacacaggggataaaccctatgaatgttccgaatgcgggaaggcattttcacagcgatgtaggttaaccagacatcagcgggttcacactggcgaaaaaccatttgagtgcactgtgtgcggcaaggttttcagctcaaagtcttcagtgatccagcaccagagacgctacgccaagcagggcatcgactag

SEQ ID NO: 101145 - DNA, 1167 bp, Artificial Sequence
  derived and/or modified sequence
atggccgcagtcagccccacaaccaggtgccaggagagtgtgacgttcgaagacgtcgcagttgtattcaccgacgaagagtggtctaggttagtaccgatacagcgcgacctttacaaggaggtgatgctggagaattacaattcgattgtttccctggactgggaaactaaaccggaaattcacgacgcctcagataagaaatctgaggggagtttgcgcgaatgcctgggacgtcagtccccactctgccctaagttcgaagtgcatacccccaacgggcgaatgggtaccgaaaaacaatcaccctctggagaaacccgaaagaagagtctctctcgtgataaggggctgcgacggcgtagatccgccctatcaagggagattcttaccaaggaacgccaccaagagtgcagtgattgtggaaagaccttcttcgatcatagttcactgacacgccatcagaggacccacaccggggaaaagccatatgactgtcgggagtgtggcaaggccttcagtcacagatctagcctgtctcggcatctgatgagccacacaggcgaatcgccctatgagtgcagcgtttgctccaaggccttcttcgatagaagttccctgacagttcatcagagaattcacacaggtgagaagcctttccagtgcaatgagtgtggtaaggcgttctttgaccgctcgtccctgactaggcaccagcgaatccacaccggggagtcgccgtacgagtgccaccagtgcggcaaggcatttagccagaaatccatcctgaccaggcaccagctgatccacaccggtcgtaagccatacgaatgtaacgagtgcgggaaggcattctacggcgtgtctagtctcaatagacaccagaaggcgcacgcaggtgacccgagataccagtgcaacgaatgcggcaaggcctttttcgatcgctcttcacttacccagcatcaaaagattcatactggcgataagccatacgagtgctccgaatgtgggaaagcgttttcgcaacggtgtcgtttaacccgccaccagagagtgcacactggggagaaaccattcgaatgtactgtttgcggtaaagtgttctccagcaaatctagcgtgatccagcatcagcgcagatacgcaaagcagggaatagactag

SEQ ID NO: 101146 - DNA, 1627 bp, Artificial Sequence
  derived and/or modified sequence
gtgcgcaggcgcgttggtttcccgacctgaagaggcgccgtcttcccgggtcccgagcactctgtgccggaggactctgcccttgtccacaaggagagcacacaggagagaatggctgctgtgtctccgaccaccagatgccaggaatcagtgacattcgaagacgttgccgtggttttcacagatgaagagtggagtcgtctggtccccatacagagggacctctacaaggaggtgatgctggagaactataacagcattgtgtcattggactgggaaactaagcctgagattcacgatgcttcagacaaaaaatcagaaggatcattgagggaatgccttggaaggcaaagtcctctgtgtcctaaatttgaagttcatacacccaatggcaggatgggaacagaaaagcaaagcccttcaggggagactcgtaagaaatccctctcccgggacaaaggcttgcggcggcgacggtcagccctgtccagggaaattctcactaaagagagacaccaggaatgcagtgactgtgggaagaccttttttgaccactcatccctcacccgccatcagaggactcacactggggagaagccctacgactgccgcgagtgtgggaaagccttcagccacaggagcagcctcagcagacatctgatgtcacacactggggagagcccctacgagtgcagtgtgtgctcaaaagccttctttgaccgttcgtccctaactgtccatcagcgaattcacactggagagaaaccctttcagtgcaacgagtgtggaaaagccttttttgaccgttcatcccttactcgacaccagagaattcacactggagaaagtccttatgaatgtcatcagtgtgggaaagcctttagccagaaaagtattcttactcgccatcagctaatccacactggcaggaagccttatgagtgtaacgagtgcgggaaagctttctatggtgtctcgtctctgaatagacatcagaaagctcatgctggggaccctcgctatcagtgtaacgagtgtggcaaagctttctttgaccgctcatcccttacacagcatcagaagatccacactggagacaagccatatgaatgcagcgaatgcgggaaagcctttagccagcggtgccggctcacgcggcatcagcgtgtccacacgggagagaagccctttgaatgcactgtgtgtgggaaagttttcagttcaaaatcttctgttattcaacatcaacggcgttacgccaaacagggaatagactgagttgggcaaaagcttgggtaggacaagaacttccatacaaatttgagatagatctcgcctgtcttaaagctgccatttgctcattctacccactctggctgccgttgtcctgtcctgcttctgcgccagagtgtttaataagcactcccttcctgctgtgttatagaactgtaggggaggccatggaaatgactctaaagatacaaaattttgaagaggtttgtcagacaataggatagatgttaggaggagacacacctcttgtctgagaacctaggccccaggtatcactgcactttaagaaactggaggctgcaacaggagggaaaggcagaatgatatcacagca

SEQ ID NO: 101147 - DNA, 3740 bp, Artificial Sequence
  derived and/or modified sequence
tcttccccagagctggacacgaggcaccatgatcagagagacacattccctgcggacggcgctcccatcggatactggagggacgcgacactagaggcaggcagtacttcagggtgaccataagtctcccaaacagccacaacggctcgctctcccagctaaggcgacagcgctgccattttggatcctgttcagccacgggaagccggcgtttgcacacattttcggacgtcatattaaagcgcaccggacgccgagacttctgggagatgaagtccttgcgaaggccccgcattgattgggagcgcagtcgccaggaccctgtgcgcaggcgcgttggtttcccgacctgaagaggcgccgtcttcccgggtcccgagcactctgtgccggaggaatcagtgacattcgaagacgttgccgtggttttcacagatgaagagtggagtcgtctggtccccatacagagggacctctacaaggaggtgatgctggagaactataacagcattgtgtcattggactgggaaactaagcctgagattcacgatgcttcagacaaaaaatcagaaggatcattgagggaatgccttggaaggcaaagtcctctgtgtcctaaatttgaagttcatacacccaatggcaggatgggaacagaaaagcaaagcccttcaggggagactcgtaagaaatccctctcccgggacaaaggcttgcggcggcgacggtcagccctgtccagggaaattctcactaaagagagacaccaggaatgcagtgactgtgggaagaccttttttgaccactcatccctcacccgccatcagaggactcacactggggagaagccctacgactgccgcgagtgtgggaaagccttcagccacaggagcagcctcagcagacatctgatgtcacacactggggagagcccctacgagtgcagtgtgtgctcaaaagccttctttgaccgttcgtccctaactgtccatcagcgaattcacactggagagaaaccctttcagtgcaacgagtgtggaaaagccttttttgaccgttcatcccttactcgacaccagagaattcacactggagaaagtccttatgaatgtcatcagtgtgggaaagcctttagccagaaaagtattcttactcgccatcagctaatccacactggcaggaagccttatgagtgtaacgagtgcgggaaagctttctatggtgtctcgtctctgaatagacatcagaaagctcatgctggggaccctcgctatcagtgtaacgagtgtggcaaagctttctttgaccgctcatcccttacacagcatcagaagatccacactggagacaagccatatgaatgcagcgaatgcgggaaagcctttagccagcggtgccggctcacgcggcatcagcgtgtccacacgggagagaagccctttgaatgcactgtgtgtgggaaagttttcagttcaaaatcttctgttattcaacatcaacggcgttacgccaaacagggaatagactgagttgggcaaaagcttgggtaggacaagaacttccatacaaatttgagatagatctcgcctgtcttaaagctgccatttgctcattctacccactctggctgccgttgtcctgtcctgcttctgcgccagagtgtttaataagcactcccttcctgctgtgttatagaactgtaggggaggccatggaaatgactctaaagatacaaaattttgaagaggtttgtcagacaataggatagatgttaggaggagacacacctcttgtctgagaacctaggccccaggtatcactgcactttaagaaactggaggctgcaacaggagggaaaggcagaatgatatcacagcagtactatttttttttttcagaacatttgttttgatggctgttagtccccctctcttggagcattttggggcactaatcttgttctcttgtgtcccagcttttagacctcttacttccactgctagtagctagcacttactgagcacctgcgatgaggtaaagactcagctaagggttttacaggaagtagattaattgatcctgtcaccaaccatatgaagtaggcactgttaccatctgcatctccagatgagcaccctgaggtttagagagattaaatcacttgcccaaggtgaaccagctggtaaaaggtgatgccaggtcttgaagacaggtccaccttcaaaatctattctctttaccattatgctcgatggtttgtttgttttataatttatgtatatgtattatcctctcaactagattgtaagcacttggaggtgtgacttacaggtctttgtatctcacacagtgccttgctaataggtgctcaataaatatttatatgagtgaatgacttttctacttaccaaattctctccattcagaacacctcttggatttgcatactttctctgaattcacagcccagcctatacttttatcatccccagctcccactcctggcagcagtagctttctaattccagttcttcctgctttattgaagagggatgtgctaagctgtggtacagtaacaagcccgcagagagctatgtctcccttaaaacctgacgggaaccattctgtcttattctatcctcattatttggaacatctggcttccaaagtcaccacaagggcggaagagaaagctagaggaatttgtaggatattttcttagacccaggcttacatcacttctgtccacatctaataagccagaacccagcacctagaagctaggaaagtaaacaagcacctcgaaagttggttaataccaagaacctctctcacagttatattttgcatactactgttaagccagtctttgcaaatgaccccttcctgcccatcactgccttcctcaagacctaaaatagctccctatttagtgaaaaattatctgaatatttaaggtctgccttaacgtgatccccattgctgaattttacctcctgactccaaaaactcttctcttccctgggcccagtcctatttttttttttttttttttttttgtgagacagagtctcactctgtcacccaggttggaatgcaatggcacaatctccgctcactgcaagctccgcctcccgggttcacgccattctcctgcctcagcctcccgaatagctgggactacaggtgcccgccaacacgcccggctaattttttgtatttttagtagagacggggtttcaccgtgttagccaggatggtctcaatctcctgacctcgtgatccgcccgcctcggcctcccaaagtgctgggattacagacgtaagtcaccgtgcccggcctatatttttattttattaaaggttaggcactagatgaccttgactctaggcatctgcattctcttgatctttgcttagggtgaagctcagaaaaggacttggttctgaaaggctgtctggaattagattgtcctacgtgattcccagtgaattgagatgaatttcctctggaagttcaagtcggattcgagaagctgaattaccaaacagaccctccccaacctactaacgaccctattactctgttcaccctagagcagacgaacggcagggaagacttgatctgtggacttttgaaagcaacttgaggaaaaacacataacagaatctataggtgtggacaatatgtgatattgctaaataatgtcaagtaggaaataaaagagactattgacaaa

SEQ ID NO: 101148 - protein, 240 aa, Artificial Sequence
  derived and/or modified sequence
MATAESRALQFAEGAAFPAYRAPHAGGALLPPPSPAAALLPAPPAGPGPATFAGFLGRDPGPAPPPPASLGSPAPPKGAAAPSASQRRKRTSFSAEQLQLLELVFRRTRYPDIHLRERLAALTLLPESRIQLLFSPLFQVWFQNRRAKSRRQSGKSFQPLARPEIILNHCAPGTETKCLKPQLPLEVDVNCLPEPNGVGGGISDSSSQGQNFETCSPLSEDIGSKLDSWEEHIFSAFGNF

SEQ ID NO: 101149 - DNA, 723 bp, Artificial Sequence
  derived and/or modified sequence
atggccactgcggagtcaagagcactgcagttcgccgagggggccgcctttcccgcctatagagccccacacgctggcggcgccttgctcccgcccccatcacccgccgccgctctgttacctgcccctccagcgggcccgggacctgccacctttgcgggattcctcggtagggatccgggtccagcacccccacctcccgccagtttgggcagccctgctcctcccaaaggtgctgccgccccctctgccagccagcgccgtaagcgcacctcgttcagtgctgaacagctgcagttgctagagctagtgtttcgtcgaactaggtaccccgatattcacttgcgtgaacgattggccgccctcactttgcttcctgagagtcgcatacaactgctctttagtcccctgttccaggtgtggttccaaaaccggcgggcgaagagccgccgacagagcggtaagtcctttcagcctttagcccggccggaaatcatactaaaccactgtgctccaggtactgagactaagtgcttgaaacctcagttgcccctggaagttgacgtgaactgcctccccgaaccgaatggggttgggggcgggatctccgatagctcatcacagggccaaaactttgaaacgtgttcacctctcagcgaggatattggtagcaagctagattcttgggaagaacatatattttctgcttttggcaacttttag

SEQ ID NO: 101150 - DNA, 723 bp, Artificial Sequence
  derived and/or modified sequence
atggccacagctgagagccgggccctgcagtttgctgagggcgccgccttccctgcctaccgggcccctcatgctggaggagccctgctgcccccacccagccctgctgctgccctgctgcctgcccctcctgctggccctggccctgccacctttgctggcttcctgggccgggaccccggccctgcccctcctcctccagccagcctgggcagccctgccccacccaagggagctgctgcccccagcgccagccagaggaggaagaggaccagcttctctgctgagcagctgcagctgctggagctggtgttccggaggacccgctacccagacatccacctgcgggagcggctggccgccctgaccctgctgcctgagagccgcatccagctgctcttcagccccctcttccaggtgtggttccagaacagaagagccaagagccggcggcagagcggcaagagcttccagcccctggcccggcctgagatcatcctgaaccactgtgcccctggaacagagaccaagtgcctgaagccccagctgcccctggaggtggatgtgaactgcctgcctgagcccaacggggtgggcggcggcatcagtgacagcagcagccagggccagaactttgagacctgcagccccctgtctgaggacatcggcagcaagctggacagctgggaggagcacatcttcagcgcctttggaaacttctag

SEQ ID NO: 101151 - DNA, 839 bp, Artificial Sequence
  derived and/or modified sequence
cctggcccgggagggtataagtgcggcccgcgcccctccgagcggcgcgctgggttccggagcgatggccacagccgagtcccgtgcgctccagtttgccgagggcgccgcgtttccagcgtaccgggccccccacgccggcggggcgctcctgccgcccccgagccctgcggcagccctgctccctgcgccgcccgcgggccccggcccagcgacctttgcgggcttcctcggccgggaccccgggccggccccgccgccccccgccagcctgggctcgcctgcgccccccaaaggcgcggccgccccgtcggcgtcgcagcgccgcaagcgcacgtctttcagcgccgaacagctgcagctgctggagctcgtcttccgccggacccggtaccccgacatccacttgcgcgagcgcctggccgcgctcaccctgctccccgagtccaggatccagcttttattttctcccctcttccaggtatggttccagaacaggcgtgccaagtctcggcgtcagagtgggaaatccttccaacctttggctaggccggagattatcctcaaccactgtgctcctggaactgaaacgaaatgtctgaagccccagctgcctcttgaggtagatgtgaactgcctgcccgaaccaaacggggttggagggggcatctctgactctagctcccaaggtcagaattttgaaacctgttcccctctctctgaagacattggttcaaagctggactcatgggaggaacacatcttttctgcctttggtaacttttgaggattctgggagaattcgggataagctctgaggagccatgactgacagcctg

SEQ ID NO: 101152 - DNA, 723 bp, Artificial Sequence
  derived and/or modified sequence
atggccaccgccgagagccgggccctgcagttcgccgagggcgccgcctttcctgcctatcgcgcccctcatgcaggcggcgccttgctgccccccccctcgccagccgctgcgctgctccccgcaccaccggctggccctggcccggcaacgtttgcgggatttttgggacgggaccccgggccagcgcctcccccacccgcctccttgggaagtccagcccccccaaagggcgctgccgcgccatcagcctctcagagacgaaagagaacttcattttcagcagaacagctccaactgcttgaacttgtattccgccggacacggtatccagatattcacttaagagagcgccttgccgccctgactctccttcctgagagcaggatacagttactcttttcaccactgttccaggtgtggttccagaatcgccgagctaaaagcaggcgtcagtccggcaagagctttcaaccactggcacgccccgaaatcatacttaaccactgcgccccagggacggaaacaaagtgcctcaagccgcaactccccctcgaagtggatgtcaactgccttcccgagccgaatggcgtaggaggcggtatatcagattcctcatcccagggccagaatttcgagacttgctcccccctctctgaagatatcggcagcaagctggatagctgggaggagcacattttttccgcctttggcaacttctag

SEQ ID NO: 101153 - DNA, 723 bp, Artificial Sequence
  derived and/or modified sequence
atggctaccgctgaatccagagccctccaatttgcagagggcgctgcttttcctgcataccgggcaccgcacgccggaggggcattattaccccctccgtccccagcggctgcattacttccagctccccctgccggacccggacccgctacatttgctggctttctgggcagggaccccggtcccgctccccctcctcccgcttccctgggctcccccgcaccgccaaagggcgcagctgccccaagcgctagtcagcgcaggaagagaactagtttctcagctgagcagcttcagttgttggaactggtcttccgcagaacccggtaccccgatattcacttaagagaacgattggcggctctgacactgttacctgagtctaggatccagctgctcttttcacctctgtttcaagtttggttccagaatcgcagagctaaatcccgccgacagtctgggaagagtttccagccattagcaagaccagaaatcattctaaaccattgtgcccctgggactgagacaaagtgtctgaagccacagctgcctcttgaagttgatgtaaattgtctgcccgagcccaacggcgtgggtggcggtattagtgactcctcgagtcaaggacaaaatttcgaaacttgctcccctctttctgaagatataggaagcaaactggattcttgggaggagcatattttctcagcattcggaaatttctag

SEQ ID NO: 101154 - DNA, 723 bp, Artificial Sequence
  derived and/or modified sequence
atggccaccgccgagagcagagccctgcagttcgccgagggcgccgccttccccgcctacagagccccccacgccggcggcgccctgctgcccccccccagccccgccgccgccctgctgcccgccccccccgccggccccggccccgccaccttcgccggcttcctgggcagagaccccggccccgccccccccccccccgccagcctgggcagccccgccccccccaagggcgccgccgcccccagcgccagccagagaagaaagagaaccagcttcagcgccgagcagctgcagctgctggagctggtgttcagaagaaccagataccccgacatccacctgagagagagactggccgccctgaccctgctgcccgagagcagaatccagctgctgttcagccccctgttccaggtgtggttccagaacagaagagccaagagcagaagacagagcggcaagagcttccagcccctggccagacccgagatcatcctgaaccactgcgcccccggcaccgagaccaagtgcctgaagccccagctgcccctggaggtggacgtgaactgcctgcccgagcccaacggcgtgggcggcggcatcagcgacagcagcagccagggccagaacttcgagacctgcagccccctgagcgaggacatcggcagcaagctggacagctgggaggagcacatcttcagcgccttcggcaacttctag

SEQ ID NO: 101155 - DNA, 636 bp, Artificial Sequence
  derived and/or modified sequence
atgtattcaactgtcagcgggtccgagaaaaactctaaaatctattgtcctaccatagatctgtataattggactgctccactggagtggtttaagaactgtcaggcacttcagggtagcaggtacagagctcataagagcttcctagtaattgataatgtgatgactgaagatgccggggactacacctgtaagtttatccataatgagaacggagccaactactccgtgaccgcaaccaggtcttttacggtgaaagatgagcaaggatttagtctttttcctgtcattggggctcctgctcagaatgaaatcaaagaggttgaaattggaaagaatgcaaacctgacatgctctgcttgctttggcaagggcacacagttcctcgccgcagtattatggcagctgaacggcacaaagatcactgatttcggggaaccacggatccaacaagaagaaggacaaaatcaaagcttctctaatggcttggcatgcctggatatggttttgaggatcgccgacgttaaggaagaggacttgctgttacagtacgattgcctcgctctgaatctgcacggcttaaggcgacacactgtgagattgtcaagaaagaacccatcgaaagaatgcttctag

SEQ ID NO: 101156 - DNA, 636 bp, Artificial Sequence
  derived and/or modified sequence
atgtacagcacagtgtctggcagcgagaagaacagcaagatctactgccccaccatcgacctgtacaactggacagcccccctggagtggttcaagaactgccaggccctgcagggcagccgctaccgggcccacaagagcttcctggtgattgacaacgtgatgacagaagatgctggggactacacctgcaagttcatccacaatgaaaatggagccaactacagcgtgacagccaccaggagcttcaccgtgaaggatgagcagggcttcagcctcttccctgtgattggagccccagcccagaatgagatcaaggaggtggagatcggcaagaatgccaacctgacctgcagcgcctgcttcggcaagggcacccagttcctggccgctgtgctgtggcagctgaatggcaccaagatcacagactttggagagccccgcatccagcaggaggagggccagaaccagagcttcagcaatggcctggcctgcctggacatggtgctgagaattgctgatgtgaaggaggaggacctgctgctgcagtatgactgcctggccctgaacctgcacggcctgcggcggcacacagtgcggctgagcaggaagaaccccagcaaagaatgcttctag

SEQ ID NO: 101157 - DNA, 636 bp, Artificial Sequence
  derived and/or modified sequence
atgtacagcaccgtgagcggcagcgagaagaacagcaagatctactgtcccacgattgatctctataactggacagctcctctggagtggtttaagaactgccaggctctgcagggctcaaggtatcgcgcccataagagtttcctggtgatcgacaacgtcatgaccgaagacgcaggcgattatacttgtaagtttatccataatgaaaatggcgctaactattccgtgactgcgacgaggtccttcactgtgaaggatgagcagggcttcagtttgtttccagtgattggggcccctgcccagaatgaaattaaagaggtggaaataggtaagaatgctaatcttacgtgctctgcttgcttcgggaagggtactcaattcttggccgccgtgctgtggcagctcaatgggacaaaaatcactgatttcggcgaaccgcgaattcagcaggaggaggggcagaaccaatctttctccaacggactagcgtgtcttgatatggtcttacgtatcgcagatgtgaaggaagaggatttgctcctgcagtatgattgcttggccctgaacctacatggtctcaggaggcacacagtgcgcctttcgcggaagaacccctccaaggagtgcttctag

SEQ ID NO: 101158 - DNA, 636 bp, Artificial Sequence
  derived and/or modified sequence
atgtatagcaccgttagtggcagcgaaaagaattctaagatttactgtccaacaattgacctgtacaactggactgcaccattagagtggtttaaaaactgccaggctttgcaggggagccgctatagggcgcacaagtctttcctggttatagataacgtcatgaccgaggacgcaggggactacacctgtaagtttatccataacgagaacggggcaaactatagcgtcacagcaacccgctcatttacagtcaaagacgagcaaggcttttcactgtttccagtaatcggagcgccagcccagaatgagattaaagaagtggaaattggaaaaaatgctaacctcacatgtagcgcatgctttggcaaaggcacccagttcctggccgctgttctgtggcagctcaacggcaccaaaattaccgatttcggagagcctaggatacagcaagaggagggccaaaaccaaagcttctcgaatgggctggcctgtctggacatggtgctgcgtattgctgatgttaaggaagaagatctgctgcttcagtacgattgtctggcactgaatttgcatggcttgaggagacacaccgttaggctgtcacgaaagaacccaagtaaagagtgtttttag

SEQ ID NO: 101159 - DNA, 636 bp, Artificial Sequence
  derived and/or modified sequence
atgtacagtacagtatctggctctgagaagaatagcaagatctactgcccaaccatcgatctttataattggacagcgcctcttgaatggtttaagaactgtcaggcattacaagggtctaggtaccgagcccataaatcatttttggtgattgataatgtaatgacggaagacgctggggattatacctgtaagttcatccacaacgaaaacggggccaactattcggtgaccgctaccagatctttcacagtgaaagatgaacagggattctcactgtttcccgtaatcggagcgcccgctcagaatgaaattaaggaggtggaaattggcaaaaatgcaaacctgacctgtagtgcctgcttcggaaaaggcacccaatttttagcagccgttctttggcagttaaatggcacaaaaattactgattttggtgaacctagaattcagcaggaagagggtcaaaaccagtctttcagcaacggtttagcttgcttggatatggtgctgcgcatcgccgatgtaaaagaagaagatttgctcctccaatacgactgcctggccctaaatctgcacggacttcgcagacatactgtgcgacttagcagaaagaatccttccaaagaatgcttctag

SEQ ID NO: 101160 - DNA, 636 bp, Artificial Sequence
  derived and/or modified sequence
atgtactctactgtgagcggatctgaaaaaaattccaaaatctattgcccgactattgatctgtataattggaccgctccactggaatggtttaaaaactgtcaggcactgcaaggctcacgctatagggctcacaaaagctttctggtaatagataatgtaatgacagaggatgcgggggattatacatgcaagttcatacacaacgaaaacggtgcaaattactccgtcaccgccacacgaagtttcaccgtaaaggacgagcaaggctttagcttattccctgtgattggagcacctgcacaaaatgaaattaaggaagtagaaattggtaaaaatgcaaatctgacctgctccgcttgcttcggcaaaggaacccagtttctggcggcagtgctctggcaactcaacggaacaaaaataaccgactttggcgaaccccgcattcaacaagaggaagggcagaaccagtctttctctaatgggttagcctgtctggatatggtgcttagaattgcagacgtgaaagaagaagatctgctcctccagtatgattgcttagcgctcaatcttcacggactcagaagacacaccgtgagactgtcaagaaaaaaccctagcaaagaatgtttttag

SEQ ID NO: 101161 - DNA, 636 bp, Artificial Sequence
  derived and/or modified sequence
atgtacagcaccgtgagcggcagcgagaagaacagcaagatctactgccccaccatcgacctgtacaactggaccgcccccctggagtggttcaagaactgccaggccctgcagggcagcagatacagagcccacaagagcttcctggtgatcgacaacgtgatgaccgaggacgccggcgactacacctgcaagttcatccacaacgagaacggcgccaactacagcgtgaccgccaccagaagcttcaccgtgaaggacgagcagggcttcagcctgttccccgtgatcggcgcccccgcccagaacgagatcaaggaggtggagatcggcaagaacgccaacctgacctgcagcgcctgcttcggcaagggcacccagttcctggccgccgtgctgtggcagctgaacggcaccaagatcaccgacttcggcgagcccagaatccagcaggaggagggccagaaccagagcttcagcaacggcctggcctgcctggacatggtgctgagaatcgccgacgtgaaggaggaggacctgctgctgcagtacgactgcctggccctgaacctgcacggcctgagaagacacaccgtgagactgagcagaaagaaccccagcaaggagtgcttctag

SEQ ID NO: 101162 - protein, 317 aa, Artificial Sequence
  derived and/or modified sequence
MAAERGAGQQQSQEMMEEEHELPVDMETINLDRDAEDVDLNHYRIGKIEGFEVLKKVKTLCLRQNLIKCIENLEELQSLRELDLYDNQIKKIENLEALTELEILDISFNLLRNIEGVDKLTRLKKLFLVNNKISKIENLSNLHQLQMLELGSNRIRAIENIDTLTNLESLFLGKNKITKLQNLDALTNLTVLSMQSNRLTKIEGLQNLVNLRELYLSHNGIEVIEGLENNNKLTMLDIASNRIKKIENISHLTELQEFWMNDNLLESWSDLDELKGARSLETVYLERNPLQKDPQYRRKVMLALPSVRQIDATFVRF

SEQ ID NO: 101163 - DNA, 954 bp, Artificial Sequence
  derived and/or modified sequence
atggccgctgagcgtggtgctgggcagcagcagtcccaggagatgatggaggaagaacacgagctacctgtggacatggagactataaacctggaccgtgacgcggaagacgttgatctgaaccactataggattggtaaaattgaagggttcgaggtcttaaagaaggttaagaccctatgtctgcggcagaacctaatcaagtgtattgagaacctcgaagaactccaatccttgagggaactggacttgtatgacaatcagattaagaagatcgagaacctggaggccctcaccgagctcgagattttggatattagttttaatctcctgcggaacatcgaaggagtggacaagcttactcggctgaaaaaacttttccttgtgaataacaaaatttcgaagatagaaaatctgtcaaatctgcaccaactacagatgctagagctgggaagcaatagaattagggccattgagaacattgatactcttacaaatttggagtcactcttcttgggtaaaaataagattacaaagctgcagaacctggacgcactgacaaaccttacagtgctcagcatgcagtccaacaggttgacgaaaatagaaggcctacaaaacctggtgaacctgcgcgaactctacctttcacataatggaattgaagtcattgaaggtttagaaaataacaacaagttaacaatgctagacattgcgagtaatcgcatcaaaaagattgagaacatatcccatctgactgaactgcaggaattttggatgaacgacaatttgctggagagttggtccgacctcgatgagctgaaaggcgccagatctctagaaaccgtgtaccttgaacggaatccacttcagaaggacccacaataccgacgtaaagtgatgttggctctccctagtgttagacagatagacgccacatttgttagattttag

SEQ ID NO: 101164 - DNA, 954 bp, Artificial Sequence
  derived and/or modified sequence
atggctgctgagagaggagctggccagcagcagagccaggagatgatggaggaggagcacgagctgcctgtggacatggagaccatcaacctggacagagatgctgaagatgtggacctgaaccactacagaattggcaagattgagggctttgaggtgctgaagaaggtgaagaccctgtgcctgcggcagaacctgatcaagtgcatcgagaacctggaggagctgcagagcctgcgggagctggacctgtatgacaaccagatcaagaagattgagaacctggaggccctgacagagctggagatcctggacatctccttcaacctgctgaggaacatcgagggcgtggacaagctgacccggctgaagaagctgttcctggtgaacaacaagatcagcaagattgagaacctgagcaacctgcaccagctgcagatgctggagctgggcagcaaccgcatccgggccattgaaaatattgacaccctgaccaacctggagagcctcttcctgggcaagaacaagatcaccaagctgcagaacctggatgccctgaccaacctgactgtgctgtccatgcagagcaaccggctgaccaagattgagggcctgcagaacctggtgaacctgcgggagctgtacctgagccacaatggaattgaagtcatcgagggcctggagaacaacaacaagctgaccatgctggacatcgccagcaaccgcatcaagaagattgagaacatcagccacctgacagagctgcaggagttctggatgaatgacaacctgctggagagctggagcgacctggatgagctgaagggggcccggagcctggagaccgtgtacctggagaggaaccccctgcagaaggacccccagtacagaaggaaggtgatgctggccctgcccagcgtgcggcagattgatgccacctttgtgcgcttctag

SEQ ID NO: 101165 - DNA, 954 bp, Artificial Sequence
  derived and/or modified sequence
atggccgccgagcggggcgccggccagcagcagagccaggagatgatggaagaggaacacgaactccccgtggacatggagaccatcaatttggacagagacgccgaggacgttgatttaaaccattaccgtatcggaaagatcgaagggttcgaggtactcaagaaagtcaaaactctgtgtctgaggcaaaatttaatcaagtgcatcgagaacctcgaggaactgcagtccctcagggaactggatctttacgataatcaaatcaagaaaatcgagaacctggaggccctgactgagttagagattctggatatatctttcaatcttttgcgaaacatcgaaggggtagataaacttacacgactgaaaaaactgttccttgtcaataataagatctctaagatagagaatctgagcaacctgcaccagttgcagatgcttgagttgggttccaatcgcatccgcgccatcgagaatattgatacattaaccaacttagaatccctgttcctcgggaagaataagatcactaaattgcagaacttggacgcactgaccaaccttactgttctgagtatgcagagtaaccgactgacgaaaatcgaagggctccagaaccttgtgaacctgagagagctctacctcagccacaacggtatagaggtaatcgagggcctggaaaataacaacaagctgacgatgctagacattgccagcaatcgcatcaagaaaatcgagaacatttcgcacctaacggaactccaagagttctggatgaatgataatctgctagagagttggtctgacctggatgagttgaagggcgctaggagtctcgaaacagtgtatctggagcgcaatcctctgcagaaagacccacaatatagacggaaagttatgctggctctgccttccgtccggcagatcgacgccactttcgttcggttctag

SEQ ID NO: 101166 - DNA, 954 bp, Artificial Sequence
  derived and/or modified sequence
atggctgccgagcggggagctggccaacagcagtcccaggagatgatggaggaggagcacgaactgcccgttgatatggaaaccattaatttggatcgggacgccgaggacgtggatctgaaccactacagaattggtaaaatcgagggattcgaggtgttgaaaaaagtaaaaacgctgtgtctgaggcagaatctgatcaagtgcatcgaaaatctggaggaattgcagtcactgcgggagcttgatctgtacgataaccagatcaaaaagatcgagaacctggaagcattgactgagctggagatcctcgacattagcttcaacctcctgcgaaatatcgagggggtcgacaagctcacacggctgaagaagttgttcctggtcaacaacaagattagcaagatcgaaaatctttctaatctacatcagctgcaaatgctggagctggggtccaatcgcattagggccatcgagaatatcgacaccctgactaacttggagagcttgtttctgggaaagaataaaatcacaaagctgcagaacttggacgccctaaccaacctgaccgtgctgagcatgcagagtaacagactcacaaagattgaaggattacaaaacctggttaacttaagggaactgtatctgtctcataatggtattgaggttatcgaaggcctcgagaataataacaagctgaccatgctggatatagcctctaatcgtataaagaaaatcgagaacatctctcacctgaccgaacttcaagaattttggatgaacgataacctcctggaatcttggtcagatctggacgaactgaagggcgctagatctttggaaaccgtgtacctggagcggaaccctttacagaaagatccgcaataccggaggaaggtaatgctggccttgccttccgtcaggcaaattgatgccacgttcgtcaggttctag

SEQ ID NO: 101167 - DNA, 1954 bp, Artificial Sequence
  derived and/or modified sequence
cgcccccgggccgggcagatgcggtttcctcccgactcgcgatcaaaatgggtgagtagcgcagagctcgcctcttggaggcctctttctgaaggcggaggacgcggggcggctcgttcatgggccgggtggctccgcagggtagacgaaggctgcagcgtccgcactgggctgggaacgacttgcaaggggagcccagctggcgccccggagccagccagctggctagcggccccaccagcgcaagtgccccgcacctgcccgcctgctccgagcgtcaagagaaggcggcatttcgcatgggtaaaatccgcgcggggacgccgggagaatgttgttgctcttgccgttcggcccattgtacagacgcagccagcgaggctcgcagaggtcagggatgcacgtaggactggcccgcaccttgcagccacggaaagatccgcctggcccgcggcccctccacgcctccgaggtcgagacagtgacataagtcaactctcaagcccagggcgtctctccactctgcctagacgtccactccgtctgcctgcagctacggctctgtgcgtcccgcttcgactccctctgctttccttcccagcttctcgcctccagactgttccggctccgccgcctgaaattacctgctctgggggaggcgcggcgcgcggcctcatgacggaactacaactcccatgaggcgctgggcccacgcaggcgcggcgcggctgaagtcgccgcgccggaatcccattggcagggccggctctgaggcgggagccctgattggctgaggggtctgaggcgacagattccggaaaggggaagagcagccaacatggcggcggaacgcggcgcggggcagcaacagtcgcaggagatgatggaggaagaacatgagctgcctgtggacatggaaaccatcaacctggacagagatgcagaggatgttgatttgaatcactatcgcatagggaagattgaaggatttgaggtactgaagaaagtgaagactctctgcctccgccaaaatttaattaaatgcattgagaatctggaggagctacagagtcttcgagagctggatctttacgacaaccagatcaagaagattgagaatctggaggcgctaacagagctggagattctagatatttcttttaatctgctgagaaacatcgaaggggttgacaagttgacacgactgaaaaaactcttcttggtcaacaataaaatcagtaaaattgagaacttaagcaacttacatcaactacagatgctagagctgggatctaaccgcatccgggcaatcgaaaatatcgacaccttaaccaacctggagagtttgtttttggggaaaaacaaaattactaaacttcagaacctggatgcgctcaccaacctgacagtcctcagtatgcagagcaaccggctgaccaagatcgagggtctgcagaacctggtgaacctgcgggagctgtaccttagccacaatggcatcgaggtcatcgagggcctggagaacaataacaaactcacgatgttggacattgcatcaaatagaatcaaaaagattgaaaatatcagccatctaacagagctgcaagagttctggatgaacgacaatctccttgagagctggagcgacctcgacgagctgaagggagccaggagcctggagacagtgtacctggagcggaaccccttgcagaaggacccccagtaccggcggaaggtcatgctcgccctcccctccgtgcggcagatcgatgccacgttcgtcaggttctgagtccttcttggctcctcatgtggtccctctcctcggaagaactgcccagccacgggtttttaacccacctgttgctcctgaggtcgtcactatatcaacagtcacaaacccaatggcaataaaggcactgacgatagctggcgcgcgcgacgtcacacacca

SEQ ID NO: 101168 - DNA, 954 bp, Artificial Sequence
  derived and/or modified sequence
atggccgccgagagaggcgccggccagcagcagagccaggagatgatggaggaggagcacgagctgcccgtggacatggagaccatcaacctggacagagacgccgaggacgtggacctgaaccactacagaatcggcaagatcgagggcttcgaggtgctgaagaaggtgaagaccctgtgcctgagacagaacctgatcaagtgcatcgagaacctggaggagctgcagagcctgagagagctggacctgtacgacaaccagatcaagaagatcgagaacctggaggccctgaccgagctggagatcctggacatcagcttcaacctgctgagaaacatcgagggcgtggacaagctgaccagactgaagaagctgttcctggtgaacaacaagatcagcaagatcgagaacctgagcaacctgcaccagctgcagatgctggagctgggcagcaacagaatcagagccatcgagaacatcgacaccctgaccaacctggagagcctgttcctgggcaagaacaagatcaccaagctgcagaacctggacgccctgaccaacctgaccgtgctgagcatgcagagcaacagactgaccaagatcgagggcctgcagaacctggtgaacctgagagagctgtacctgagccacaacggcatcgaggtgatcgagggcctggagaacaacaacaagctgaccatgctggacatcgccagcaacagaatcaagaagatcgagaacatcagccacctgaccgagctgcaggagttctggatgaacgacaacctgctggagagctggagcgacctggacgagctgaagggcgccagaagcctggagaccgtgtacctggagagaaaccccctgcagaaggacccccagtacagaagaaaggtgatgctggccctgcccagcgtgagacagatcgacgccaccttcgtgagattctag

SEQ ID NO: 101169 - protein, 280 aa, Artificial Sequence
  derived and/or modified sequence
MAAERGAGQQQSQEMMEVDRRVESEESGDEEGKKHSSGIVADLSEQSLKDGEERGEEDPEEEHELPVDMETINLDRDAEDVDLNHYRIGKIEGFEVLKKVKTLCLRQNLIKCIENLEELQSLRELDLYDNQIKKIENLEALTELEILDISFNLLRNIEGVDKLTRLKKLFLVNNKISKIENLSNLHQLQMLELGSNRIRAIENIDTLTNLESLFLGKNKITKLQNLDALTNLTVLSMQSNRLTKIEGLQNLVNLRELYLSHNGIEVIEGLENNVQDSLTY

SEQ ID NO: 101170 - DNA, 843 bp, Artificial Sequence
  derived and/or modified sequence
atggccgccgagaggggcgctggccaacagcagtcgcaggaaatgatggaggtagacaggagggtcgagtcagaagaaagcggggatgaggaagggaaaaaacactcatctggtattgtcgccgacttaagtgagcagagcctgaaagatggcgaggagagaggggaggaggaccccgaagaggagcacgaattacctgtggacatggaaacgattaacctggacagagatgccgaagacgtggaccttaatcattatcgcatcggcaagatagaaggcttcgaggttctgaaaaaagtgaaaacactgtgccttaggcagaatctgatcaagtgcatcgaaaacctggaggagcttcagagtctccgggagcttgacctttacgataaccagatcaaaaagatcgaaaatctggaggctctgaccgagttggaaattcttgacatcagcttcaacctcttacggaacattgaaggcgtggataagctcacccgcttgaaaaagctgttcctcgtaaataacaaaatatcaaaaatagagaacctctccaacctgcaccagctgcagatgctcgagttgggttcaaaccggatccgcgcaatagagaatatcgatactctgactaacctggaaagtcttttcctaggaaaaaacaagatcactaagctgcaaaacctcgacgcgctcacaaacttaacagtgttgtccatgcagtctaacagactgactaaaattgaaggacttcaaaacctggtaaatttgcgggagctctacctgtctcacaatggcatagaagtaatagaaggcctggaaaacaacgtccaggatagtctcacttactag

SEQ ID NO: 101171 - DNA, 843 bp, Artificial Sequence
  derived and/or modified sequence
atggctgctgagagaggagctggccagcagcagagccaggagatgatggaggtggaccggcgggtggagagcgaggagagcggagatgaggagggcaagaagcacagcagcggcatcgtggccgacctgtctgagcagagcctgaaggatggagaggagcggggggaggaggaccctgaggaggagcacgagctgcctgtggacatggagaccatcaacctggacagagatgctgaagatgtggacctgaaccactaccgcatcggcaagattgagggctttgaggtgctgaagaaggtgaagaccctgtgcctgcggcagaacctgatcaagtgcatcgagaacctggaggagctgcagagcctgcgggagctggacctgtatgacaaccagatcaagaagattgagaacctggaggccctgacagagctggagatcctggacatctccttcaacctgctgagaaatattgaaggagtggacaagctgacccggctgaagaagctgttcctggtgaacaacaagatcagcaagattgagaacctgagcaacctgcaccagctgcagatgctggagctgggcagcaaccgcatccgggccatcgagaacatcgacaccctgaccaacctggagagcctcttcctgggcaagaacaagatcaccaagctgcagaacctggatgccctgaccaacctgactgtgctgtccatgcagagcaaccggctgaccaagattgagggcctgcagaacctggtgaacctgcgggagctgtacctgagccacaacggcatcgaggtgattgagggcctggagaacaacgtgcaggacagcctgacctactag

SEQ ID NO: 101172 - DNA, 843 bp, Artificial Sequence
  derived and/or modified sequence
atggccgccgagcggggcgccggccagcagcagagccaggagatgatggaggttgacagacgggtcgagagtgaagagagcggcgatgaggaggggaaaaaacacagcagtggcatcgttgcagacctcagtgaacagtcattgaaggatggggaagagaggggtgaagaagaccctgaggaagaacacgagctgcctgttgatatggagacaattaacctggatcgggatgcagaggacgttgacctcaaccactacagaataggtaagatcgaagggttcgaagtgctgaagaaagttaagactctctgtctgcgtcagaatcttattaagtgcatcgaaaatctcgaggaattgcagtccctgcgggaacttgacctgtacgataatcagataaagaagattgagaacctggaagccctgacagaacttgagatcctcgatatcagctttaacctgctccggaatattgaaggcgtggacaaactgacccgccttaaaaagctctttctcgttaataataaaatctccaagatcgagaatcttagcaatctacatcagctacagatgttggaactgggctcgaaccgcatccgggcaatagagaacatcgacacccttactaacctcgagtctctgtttctcggaaaaaataagattactaagctgcagaatctcgacgcactcaccaacctcaccgtgctgagtatgcagtcaaacaggcttacaaagattgagggactgcagaacctggtgaatttaagggagctgtatctatcccacaatgggattgaggtcattgagggtctcgaaaataatgtccaggatagcttgacatattag

SEQ ID NO: 101173 - DNA, 843 bp, Artificial Sequence
  derived and/or modified sequence
atggctgcagaaagaggtgcgggtcagcaacaaagtcaggagatgatggaagtggacagacgagttgagagcgaggaatcaggtgatgaggaaggtaaaaaacactctagtggaattgtggccgacctctccgaacagtctttaaaggatggcgaggaacgcggagaagaagatcctgaagaggaacacgagcttcctgtggatatggaaacgattaatctagacagagacgctgaagacgttgacctaaaccattaccgcatcggcaagatcgaaggttttgaagtgctgaagaaagtcaagacactctgcttgagacagaatctcatcaagtgcatcgaaaatctggaggagctgcagtcactcagagagctggacctttatgataatcaaatcaaaaagatcgagaacctggaagccctcacagagctggaaattctggatatctcatttaaccttctgagaaacatcgagggcgtcgataagctgactaggctcaaaaagctgtttctggtgaataacaaaatatctaagattgaaaacttgagtaatctgcaccagctacagatgctggagttaggctccaatcgcattcgagccattgagaatatcgacactttgaccaatctcgagtcactgttcctcggcaagaacaagatcaccaagctgcagaatctggacgccctcacaaacctgaccgtcctttcgatgcagagcaataggctaacaaaaatagagggcttgcagaatctggtgaacttgcgggaactatacctctcccataacggaatagaggtgatcgagggccttgaaaacaacgtccaggattcgctcacatattag

SEQ ID NO: 101174 - DNA, 965 bp, Artificial Sequence
  derived and/or modified sequence
gggaagagcagccaacatggcggcggaacgcggcgcggggcagcaacagtcgcaggagatgatggaggttgacaggcgggtcgagtctgaagaatccggcgatgaagaagggaagaaacacagcagtggcatcgtggccgacctcagtgaacagagcctgaaggatggggaggagcggggggaggaggacccagaagaagaacatgagctgcctgtggacatggaaaccatcaacctggacagagatgcagaggatgttgatttgaatcactatcgcatagggaagattgaaggatttgaggtactgaagaaagtgaagactctctgcctccgccaaaatttaattaaatgcattgagaatctggaggagctacagagtcttcgagagctggatctttacgacaaccagatcaagaagattgagaatctggaggcgctaacagagctggagattctagatatttcttttaatctgctgagaaacatcgaaggggttgacaagttgacacgactgaaaaaactcttcttggtcaacaataaaatcagtaaaattgagaacttaagcaacttacatcaactacagatgctagagctgggatctaaccgcatccgggcaatcgaaaatatcgacaccttaaccaacctggagagtttgtttttggggaaaaacaaaattactaaacttcagaacctggatgcgctcaccaacctgacagtcctcagtatgcagagcaaccggctgaccaagatcgagggtctgcagaacctggtgaacctgcgggagctgtaccttagccacaatggcatcgaggtcatcgagggcctggagaacaatgtgcaggacagcctcacgtactgaggggaagtgtgctcacagagcccccaccctcctcagctgcctccagctcaccctgctctgccccagtgcggtgttcaagacaaataaaagactttttctcattcaa

SEQ ID NO: 101175 - DNA, 843 bp, Artificial Sequence
  derived and/or modified sequence
atggccgccgagagaggcgccggccagcagcagagccaggagatgatggaggtggacagaagagtggagagcgaggagagcggcgacgaggagggcaagaagcacagcagcggcatcgtggccgacctgagcgagcagagcctgaaggacggcgaggagagaggcgaggaggaccccgaggaggagcacgagctgcccgtggacatggagaccatcaacctggacagagacgccgaggacgtggacctgaaccactacagaatcggcaagatcgagggcttcgaggtgctgaagaaggtgaagaccctgtgcctgagacagaacctgatcaagtgcatcgagaacctggaggagctgcagagcctgagagagctggacctgtacgacaaccagatcaagaagatcgagaacctggaggccctgaccgagctggagatcctggacatcagcttcaacctgctgagaaacatcgagggcgtggacaagctgaccagactgaagaagctgttcctggtgaacaacaagatcagcaagatcgagaacctgagcaacctgcaccagctgcagatgctggagctgggcagcaacagaatcagagccatcgagaacatcgacaccctgaccaacctggagagcctgttcctgggcaagaacaagatcaccaagctgcagaacctggacgccctgaccaacctgaccgtgctgagcatgcagagcaacagactgaccaagatcgagggcctgcagaacctggtgaacctgagagagctgtacctgagccacaacggcatcgaggtgatcgagggcctggagaacaacgtgcaggacagcctgacctactag

SEQ ID NO: 101176 - protein, 237 aa, Artificial Sequence
  derived and/or modified sequence
MAAERGAGQQQSQEMMEEEHELPVDMETINLDRDAEDVDLNHYRIGKIEGFEVLKKVKTLCLRQNLIKCIENLEELQSLRELDLYDNQIKKIENLEALTELEILDISFNLLRNIEGVDKLTRLKKLFLVNNKISKIENLSNLHQLQMLELGSNRIRAIENIDTLTNLESLFLGKNKITKLQNLDALTNLTVLSMQSNRLTKIEGLQNLVNLRELYLSHNGIEVIEGLENNVQDSLTY

SEQ ID NO: 101177 - DNA, 714 bp, Artificial Sequence
  derived and/or modified sequence
atggccgccgagcggggtgctggccaacagcaatctcaagaaatgatggaggaggaacacgaattacctgtggacatggaaaccattaatctcgatagagacgctgaagacgtggacctgaatcattatagaattggtaagatcgaaggcttcgaagtattgaagaaggtgaaaacgctgtgtctgagacagaacctcattaaatgcattgaaaatctcgaggagttgcagagtctgagggaactggatctgtacgacaaccagatcaagaagatcgaaaacctggaggcgctcacggaattagagatattggatatttcctttaacctcctgagaaacatagaaggagtggataagttgactaggcttaagaagttatttctcgtaaacaacaagataagcaaaatagagaacttaagtaacctccatcagcttcagatgctggagttaggttccaatcggataagggccatcgagaatatcgacaccctgaccaatctggaatcactgtttctggggaagaacaaaattaccaagctacagaacctggatgctctcactaatctgaccgtactgtctatgcagtccaatagactcacgaaaattgagggactgcaaaacctggttaatctaagagaactctatctgtctcacaacggtattgaggtgattgagggattggaaaacaatgtgcaggatagcctaacctattag

SEQ ID NO: 101178 - DNA, 714 bp, Artificial Sequence
  derived and/or modified sequence
atggctgctgagagaggagctggccagcagcagagccaggagatgatggaggaggagcacgagctgcctgtggacatggagaccatcaacctggacagagatgctgaagatgtggacctgaaccactacagaattggcaagattgagggctttgaggtgctgaagaaggtgaagaccctgtgcctgcggcagaacctgatcaagtgcatcgagaacctggaggagctgcagagcctgcgggagctggacctgtatgacaaccagatcaagaagattgagaacctggaggccctgacagagctggagatcctggacatctccttcaacctgctgaggaacatcgagggcgtggacaagctgacccggctgaagaagctgttcctggtgaacaacaagatcagcaagattgagaacctgagcaacctgcaccagctgcagatgctggagctgggcagcaaccgcatccgggccattgaaaatattgacaccctgaccaacctggagagcctcttcctgggcaagaacaagatcaccaagctgcagaacctggatgccctgaccaacctgactgtgctgtccatgcagagcaaccggctgaccaagattgagggcctgcagaacctggtgaacctgcgggagctgtacctgagccacaatggaattgaagtcatcgagggcctggagaacaacgtgcaggacagcctgacctactag

SEQ ID NO: 101179 - DNA, 714 bp, Artificial Sequence
  derived and/or modified sequence
atggccgccgagcggggcgccggccagcagcagagccaggagatgatggaggaagaacacgagttgcctgtggatatggaaaccataaatctggatcgcgatgccgaagatgtggatctcaatcactaccggatcgggaaaattgaaggcttcgaagtgcttaaaaaggttaaaacattgtgcttgaggcagaacttgattaagtgcatcgagaatctggaggagctgcagagtctccgcgaactggatctttatgataatcagataaagaaaattgagaaccttgaagctctgaccgagctcgaaatcttagacataagtttcaatctcctccggaacatcgagggtgtcgataaacttacgcggctgaaaaagctgtttttggttaataacaaaattagtaagattgaaaatctgagtaacctccaccagctgcagatgctggaactaggctccaatagaatcagagctatcgaaaacatagacacgcttacaaatctggagagtctatttttggggaaaaataagatcactaagctgcagaatctggacgcgttgacgaatcttactgtgctcagcatgcagtcgaaccggctgactaaaatcgagggccttcagaatctcgtcaacctgagggaactctatctgtcacataatgggattgaggtgattgaagggctggagaacaacgtccaggatagtttgacttattag

SEQ ID NO: 101180 - DNA, 714 bp, Artificial Sequence
  derived and/or modified sequence
atggccgcagagaggggtgctggccagcagcagtctcaggagatgatggaggaagaacatgagctaccagtggacatggaaacaatcaacctggacagagacgcagaagatgttgacttgaatcactacaggatcggtaagattgagggttttgaagtgctcaaaaaggtcaaaactctgtgcctgcggcagaatctcattaaatgtattgaaaatttggaggaactgcagtccctccgcgagcttgacctctatgacaaccagattaagaaaattgaaaacctagaagctctgactgaactggaaattctggatatcagtttcaatctgctgagaaacatagagggggtagacaaattaacgcgcttgaagaagctgttcctggtaaacaataaaatcagcaagatcgagaacttgagtaacctgcaccaattacaaatgctcgagctgggcagtaacagaataagagccattgagaatattgataccttgaccaatttagagtccttgttccttggcaaaaacaaaatcaccaaactgcaaaaccttgatgccctcaccaacctgacagtgttgtccatgcaatcaaatcgacttaccaaaatagaggggttgcagaatttggtgaatttgcgcgagttatacctctctcacaacggcattgaggtcatcgagggccttgagaataatgtccaggacagcctgacctattag

SEQ ID NO: 101181 - DNA, 820 bp, Artificial Sequence
  derived and/or modified sequence
atggcggcggaacgcggcgcggggcagcaacagtcgcaggagatgatggaggaagaacatgagctgcctgtggacatggaaaccatcaacctggacagagatgcagaggatgttgatttgaatcactatcgcatagggaagattgaaggatttgaggtactgaagaaagtgaagactctctgcctccgccaaaatttaattaaatgcattgagaatctggaggagctacagagtcttcgagagctggatctttacgacaaccagatcaagaagattgagaatctggaggcgctaacagagctggagattctagatatttcttttaatctgctgagaaacatcgaaggggttgacaagttgacacgactgaaaaaactcttcttggtcaacaataaaatcagtaaaattgagaacttaagcaacttacatcaactacagatgctagagctgggatctaaccgcatccgggcaatcgaaaatatcgacaccttaaccaacctggagagtttgtttttggggaaaaacaaaattactaaacttcagaacctggatgcgctcaccaacctgacagtcctcagtatgcagagcaaccggctgaccaagatcgagggtctgcagaacctggtgaacctgcgggagctgtaccttagccacaatggcatcgaggtcatcgagggcctggagaacaatgtgcaggacagcctcacgtactgaggggaagtgtgctcacagagcccccaccctcctcagctgcctccagctcaccctgctctgccccagtgcggtgttcaagacaaataaaagactttttctcattcaa

SEQ ID NO: 101182 - DNA, 714 bp, Artificial Sequence
  derived and/or modified sequence
atggccgccgagagaggcgccggccagcagcagagccaggagatgatggaggaggagcacgagctgcccgtggacatggagaccatcaacctggacagagacgccgaggacgtggacctgaaccactacagaatcggcaagatcgagggcttcgaggtgctgaagaaggtgaagaccctgtgcctgagacagaacctgatcaagtgcatcgagaacctggaggagctgcagagcctgagagagctggacctgtacgacaaccagatcaagaagatcgagaacctggaggccctgaccgagctggagatcctggacatcagcttcaacctgctgagaaacatcgagggcgtggacaagctgaccagactgaagaagctgttcctggtgaacaacaagatcagcaagatcgagaacctgagcaacctgcaccagctgcagatgctggagctgggcagcaacagaatcagagccatcgagaacatcgacaccctgaccaacctggagagcctgttcctgggcaagaacaagatcaccaagctgcagaacctggacgccctgaccaacctgaccgtgctgagcatgcagagcaacagactgaccaagatcgagggcctgcagaacctggtgaacctgagagagctgtacctgagccacaacggcatcgaggtgatcgagggcctggagaacaacgtgcaggacagcctgacctactag

SEQ ID NO: 101183 - protein, 1162 aa, Artificial Sequence
  derived and/or modified sequence
MNGHHQQNGVENMMLFEVVKMGKSAMQSVVDDWIESYKHDRDIALLDLINFFIQCSGCKGVVTAEMFRHMQNSEIIRKMTEEFDEDSGDYPLTMAGPQWKKFKSSFCEFIGVLVRQCQYSIIYDEYMMDTVISLLTGLSDSQVRAFRHTSTLAAMKLMTALVNVALNLSINMDNTQRQYEAERNKMIGKRANERLELLLQKRKELQENQDEIENMMNAIFKGVFVHRYRDAIAEIRAICIEEIGIWMKMYSDAFLNDSYLKYVGWTMHDKQGEVRLKCLTALQGLYYNKELNSKLELFTSRFKDRIVSMTLDKEYDVAVQAIKLLTLVLQSSEEVLTAEDCENVYHLVYSAHRPVAVAAGEFLYKKLFSRRDPEEDGMMKRRGRQGPNANLVKTLVFFFLESELHEHAAYLVDSMWDCATELLKDWECMNSLLLEEPLSGEEALTDRQESALIEIMLCTIRQAAECHPPVGRGTGKRVLTAKEKKTQLDDRTKITELFAVALPQLLAKYSVDAEKVTNLLQLPQYFDLEIYTTGRLEKHLDALLRQIRNIVEKHTDTDVLEACSKTYHALCNEEFTIFNRVDISRSQLIDELADKFNRLLEDFLQEGEEPDEDDAYQVLSTLKRITAFHNAHDLSKWDLFACNYKLLKTGIENGDMPEQIVIHALQCTHYVILWQLAKITESSSTKEDLLRLKKQMRVFCQICQHYLTNVNTTVKEQAFTILCDILMIFSHQIMSGGRDMLEPLVYTPDSSLQSELLSFILDHVFIEQDDDNNSADGQQEDEASKIEALHKRRNLLAAFCKLIVYTVVEMNTAADIFKQYMKYYNDYGDIIKETMSKTRQIDKIQCAKTLILSLQQLFNEMIQENGYNFDRSSSTFSGIKELARRFALTFGLDQLKTREAIAMLHKDGIEFAFKEPNPQGESHPPLNLAFLDILSEFSSKLLRQDKRTVYVYLEKFMTFQMSLRREDVWLPLMSYRNSLLAGGDDDTMSVISGISSRGSTVRSKKSKPSTGKRKVVEGMQLSLTEESSSSDSMWLSREQTLHTPVMMQTPQLTSTIMREPKRLRPEDSFMSVYPMQTEHHQTPLDYNRRGTSLMEDDEEPIVEDVMMSSEGRIEDLNEGMDFDTMDIDLPPSKNRRERTELKPDFFDPASIMDESVLGVSMF

SEQ ID NO: 101184 - protein, 1231 aa, Artificial Sequence
  derived and/or modified sequence
MIAAPEIPTDFNLLQESETHFSSDTDFEDIEGKNQKQGKGKTCKKGKKGPAEKGKGGNGGGKPPSGPNRMNGHHQQNGVENMMLFEVVKMGKSAMQSVVDDWIESYKHDRDIALLDLINFFIQCSGCKGVVTAEMFRHMQNSEIIRKMTEEFDEDSGDYPLTMAGPQWKKFKSSFCEFIGVLVRQCQYSIIYDEYMMDTVISLLTGLSDSQVRAFRHTSTLAAMKLMTALVNVALNLSINMDNTQRQYEAERNKMIGKRANERLELLLQKRKELQENQDEIENMMNAIFKGVFVHRYRDAIAEIRAICIEEIGIWMKMYSDAFLNDSYLKYVGWTMHDKQGEVRLKCLTALQGLYYNKELNSKLELFTSRFKDRIVSMTLDKEYDVAVQAIKLLTLVLQSSEEVLTAEDCENVYHLVYSAHRPVAVAAGEFLYKKLFSRRDPEEDGMMKRRGRQGPNANLVKTLVFFFLESELHEHAAYLVDSMWDCATELLKDWECMNSLLLEEPLSGEEALTDRQESALIEIMLCTIRQAAECHPPVGRGTGKRVLTAKEKKTQLDDRTKITELFAVALPQLLAKYSVDAEKVTNLLQLPQYFDLEIYTTGRLEKHLDALLRQIRNIVEKHTDTDVLEACSKTYHALCNEEFTIFNRVDISRSQLIDELADKFNRLLEDFLQEGEEPDEDDAYQVLSTLKRITAFHNAHDLSKWDLFACNYKLLKTGIENGDMPEQIVIHALQCTHYVILWQLAKITESSSTKEDLLRLKKQMRVFCQICQHYLTNVNTTVKEQAFTILCDILMIFSHQIMSGGRDMLEPLVYTPDSSLQSELLSFILDHVFIEQDDDNNSADGQQEDEASKIEALHKRRNLLAAFCKLIVYTVVEMNTAADIFKQYMKYYNDYGDIIKETMSKTRQIDKIQCAKTLILSLQQLFNEMIQENGYNFDRSSSTFSGIKELARRFALTFGLDQLKTREAIAMLHKDGIEFAFKEPNPQGESHPPLNLAFLDILSEFSSKLLRQDKRTVYVYLEKFMTFQMSLRREDVWLPLMSYRNSLLAGGDDDTMSVISGISSRGSTVRSKKSKPSTGKRKVVEGMQLSLTEESSSSDSMWLSREQTLHTPVMMQTPQLTSTIMREPKRLRPEDSFMSVYPMQTEHHQTPLDYNRRGTSLMEDDEEPIVEDVMMSSEGRIEDLNEGMDFDTMDIDLPPSKNRRERTELKPDFFDPASIMDESVLGVSMF

SEQ ID NO: 101185 - DNA, 3489 bp, Artificial Sequence
  derived and/or modified sequence
atgaacggccaccaccagcagaacggcgtggagaacatgatgctgttcgaggtggtgaagatgggcaagagcgccatgcagagcgtggtggacgactggatcgagagctacaagcacgacagagacatcgccctgctggacctgatcaacttcttcatccagtgcagcggctgcaagggcgtggtgaccgccgagatgttcagacacatgcagaacagcgagatcatcagaaagatgaccgaggagttcgacgaggacagcggcgactaccccctgaccatggccggcccccagtggaagaagttcaagagcagcttctgcgagttcatcggcgtgctggtgagacagtgccagtacagcatcatctacgacgagtacatgatggacaccgtgatcagcctgctgaccggcctgagcgacagccaggtgagagccttcagacacaccagcaccctggccgccatgaagctgatgaccgccctggtgaacgtggccctgaacctgagcatcaacatggacaacacccagagacagtacgaggccgagagaaacaagatgatcggcaagagagccaacgagagactggagctgctgctgcagaagagaaaggagctgcaggagaaccaggacgagatcgagaacatgatgaacgccatcttcaagggcgtgttcgtgcacagatacagagacgccatcgccgagatcagagccatctgcatcgaggagatcggcatctggatgaagatgtacagcgacgccttcctgaacgacagctacctgaagtacgtgggctggaccatgcacgacaagcagggcgaggtgagactgaagtgcctgaccgccctgcagggcctgtactacaacaaggagctgaacagcaagctggagctgttcaccagcagattcaaggacagaatcgtgagcatgaccctggacaaggagtacgacgtggccgtgcaggccatcaagctgctgaccctggtgctgcagagcagcgaggaggtgctgaccgccgaggactgcgagaacgtgtaccacctggtgtacagcgcccacagacccgtggccgtggccgccggcgagttcctgtacaagaagctgttcagcagaagagaccccgaggaggacggcatgatgaagagaagaggcagacagggccccaacgccaacctggtgaagaccctggtgttcttcttcctggagagcgagctgcacgagcacgccgcctacctggtggacagcatgtgggactgcgccaccgagctgctgaaggactgggagtgcatgaacagcctgctgctggaggagcccctgagcggcgaggaggccctgaccgacagacaggagagcgccctgatcgagatcatgctgtgcaccatcagacaggccgccgagtgccacccccccgtgggcagaggcaccggcaagagagtgctgaccgccaaggagaagaagacccagctggacgacagaaccaagatcaccgagctgttcgccgtggccctgccccagctgctggccaagtacagcgtggacgccgagaaggtgaccaacctgctgcagctgccccagtacttcgacctggagatctacaccaccggcagactggagaagcacctggacgccctgctgagacagatcagaaacatcgtggagaagcacaccgacaccgacgtgctggaggcctgcagcaagacctaccacgccctgtgcaacgaggagttcaccatcttcaacagagtggacatcagcagaagccagctgatcgacgagctggccgacaagttcaacagactgctggaggacttcctgcaggagggcgaggagcccgacgaggacgacgcctaccaggtgctgagcaccctgaagagaatcaccgccttccacaacgcccacgacctgagcaagtgggacctgttcgcctgcaactacaagctgctgaagaccggcatcgagaacggcgacatgcccgagcagatcgtgatccacgccctgcagtgcacccactacgtgatcctgtggcagctggccaagatcaccgagagcagcagcaccaaggaggacctgctgagactgaagaagcagatgagagtgttctgccagatctgccagcactacctgaccaacgtgaacaccaccgtgaaggagcaggccttcaccatcctgtgcgacatcctgatgatcttcagccaccagatcatgagcggcggcagagacatgctggagcccctggtgtacacccccgacagcagcctgcagagcgagctgctgagcttcatcctggaccacgtgttcatcgagcaggacgacgacaacaacagcgccgacggccagcaggaggacgaggccagcaagatcgaggccctgcacaagagaagaaacctgctggccgccttctgcaagctgatcgtgtacaccgtggtggagatgaacaccgccgccgacatcttcaagcagtacatgaagtactacaacgactacggcgacatcatcaaggagaccatgagcaagaccagacagatcgacaagatccagtgcgccaagaccctgatcctgagcctgcagcagctgttcaacgagatgatccaggagaacggctacaacttcgacagaagcagcagcaccttcagcggcatcaaggagctggccagaagattcgccctgaccttcggcctggaccagctgaagaccagagaggccatcgccatgctgcacaaggacggcatcgagttcgccttcaaggagcccaacccccagggcgagagccacccccccctgaacctggccttcctggacatcctgagcgagttcagcagcaagctgctgagacaggacaagagaaccgtgtacgtgtacctggagaagttcatgaccttccagatgagcctgagaagagaggacgtgtggctgcccctgatgagctacagaaacagcctgctggccggcggcgacgacgacaccatgagcgtgatcagcggcatcagcagcagaggcagcaccgtgagaagcaagaagagcaagcccagcaccggcaagagaaaggtggtggagggcatgcagctgagcctgaccgaggagagcagcagcagcgacagcatgtggctgagcagagagcagaccctgcacacccccgtgatgatgcagaccccccagctgaccagcaccatcatgagagagcccaagagactgagacccgaggacagcttcatgagcgtgtaccccatgcagaccgagcaccaccagacccccctggactacaacagaagaggcaccagcctgatggaggacgacgaggagcccatcgtggaggacgtgatgatgagcagcgagggcagaatcgaggacctgaacgagggcatggacttcgacaccatggacatcgacctgccccccagcaagaacagaagagagagaaccgagctgaagcccgacttcttcgaccccgccagcatcatggacgagagcgtgctgggcgtgagcatgttctag

SEQ ID NO: 101186 - DNA, 3696 bp, Artificial Sequence
  derived and/or modified sequence
atgatcgccgcccccgagatccccaccgacttcaacctgctgcaggagagcgagacccacttcagcagcgacaccgacttcgaggacatcgagggcaagaaccagaagcagggcaagggcaagacctgcaagaagggcaagaagggccccgccgagaagggcaagggcggcaacggcggcggcaagccccccagcggccccaacagaatgaacggccaccaccagcagaacggcgtggagaacatgatgctgttcgaggtggtgaagatgggcaagagcgccatgcagagcgtggtggacgactggatcgagagctacaagcacgacagagacatcgccctgctggacctgatcaacttcttcatccagtgcagcggctgcaagggcgtggtgaccgccgagatgttcagacacatgcagaacagcgagatcatcagaaagatgaccgaggagttcgacgaggacagcggcgactaccccctgaccatggccggcccccagtggaagaagttcaagagcagcttctgcgagttcatcggcgtgctggtgagacagtgccagtacagcatcatctacgacgagtacatgatggacaccgtgatcagcctgctgaccggcctgagcgacagccaggtgagagccttcagacacaccagcaccctggccgccatgaagctgatgaccgccctggtgaacgtggccctgaacctgagcatcaacatggacaacacccagagacagtacgaggccgagagaaacaagatgatcggcaagagagccaacgagagactggagctgctgctgcagaagagaaaggagctgcaggagaaccaggacgagatcgagaacatgatgaacgccatcttcaagggcgtgttcgtgcacagatacagagacgccatcgccgagatcagagccatctgcatcgaggagatcggcatctggatgaagatgtacagcgacgccttcctgaacgacagctacctgaagtacgtgggctggaccatgcacgacaagcagggcgaggtgagactgaagtgcctgaccgccctgcagggcctgtactacaacaaggagctgaacagcaagctggagctgttcaccagcagattcaaggacagaatcgtgagcatgaccctggacaaggagtacgacgtggccgtgcaggccatcaagctgctgaccctggtgctgcagagcagcgaggaggtgctgaccgccgaggactgcgagaacgtgtaccacctggtgtacagcgcccacagacccgtggccgtggccgccggcgagttcctgtacaagaagctgttcagcagaagagaccccgaggaggacggcatgatgaagagaagaggcagacagggccccaacgccaacctggtgaagaccctggtgttcttcttcctggagagcgagctgcacgagcacgccgcctacctggtggacagcatgtgggactgcgccaccgagctgctgaaggactgggagtgcatgaacagcctgctgctggaggagcccctgagcggcgaggaggccctgaccgacagacaggagagcgccctgatcgagatcatgctgtgcaccatcagacaggccgccgagtgccacccccccgtgggcagaggcaccggcaagagagtgctgaccgccaaggagaagaagacccagctggacgacagaaccaagatcaccgagctgttcgccgtggccctgccccagctgctggccaagtacagcgtggacgccgagaaggtgaccaacctgctgcagctgccccagtacttcgacctggagatctacaccaccggcagactggagaagcacctggacgccctgctgagacagatcagaaacatcgtggagaagcacaccgacaccgacgtgctggaggcctgcagcaagacctaccacgccctgtgcaacgaggagttcaccatcttcaacagagtggacatcagcagaagccagctgatcgacgagctggccgacaagttcaacagactgctggaggacttcctgcaggagggcgaggagcccgacgaggacgacgcctaccaggtgctgagcaccctgaagagaatcaccgccttccacaacgcccacgacctgagcaagtgggacctgttcgcctgcaactacaagctgctgaagaccggcatcgagaacggcgacatgcccgagcagatcgtgatccacgccctgcagtgcacccactacgtgatcctgtggcagctggccaagatcaccgagagcagcagcaccaaggaggacctgctgagactgaagaagcagatgagagtgttctgccagatctgccagcactacctgaccaacgtgaacaccaccgtgaaggagcaggccttcaccatcctgtgcgacatcctgatgatcttcagccaccagatcatgagcggcggcagagacatgctggagcccctggtgtacacccccgacagcagcctgcagagcgagctgctgagcttcatcctggaccacgtgttcatcgagcaggacgacgacaacaacagcgccgacggccagcaggaggacgaggccagcaagatcgaggccctgcacaagagaagaaacctgctggccgccttctgcaagctgatcgtgtacaccgtggtggagatgaacaccgccgccgacatcttcaagcagtacatgaagtactacaacgactacggcgacatcatcaaggagaccatgagcaagaccagacagatcgacaagatccagtgcgccaagaccctgatcctgagcctgcagcagctgttcaacgagatgatccaggagaacggctacaacttcgacagaagcagcagcaccttcagcggcatcaaggagctggccagaagattcgccctgaccttcggcctggaccagctgaagaccagagaggccatcgccatgctgcacaaggacggcatcgagttcgccttcaaggagcccaacccccagggcgagagccacccccccctgaacctggccttcctggacatcctgagcgagttcagcagcaagctgctgagacaggacaagagaaccgtgtacgtgtacctggagaagttcatgaccttccagatgagcctgagaagagaggacgtgtggctgcccctgatgagctacagaaacagcctgctggccggcggcgacgacgacaccatgagcgtgatcagcggcatcagcagcagaggcagcaccgtgagaagcaagaagagcaagcccagcaccggcaagagaaaggtggtggagggcatgcagctgagcctgaccgaggagagcagcagcagcgacagcatgtggctgagcagagagcagaccctgcacacccccgtgatgatgcagaccccccagctgaccagcaccatcatgagagagcccaagagactgagacccgaggacagcttcatgagcgtgtaccccatgcagaccgagcaccaccagacccccctggactacaacagaagaggcaccagcctgatggaggacgacgaggagcccatcgtggaggacgtgatgatgagcagcgagggcagaatcgaggacctgaacgagggcatggacttcgacaccatggacatcgacctgccccccagcaagaacagaagagagagaaccgagctgaagcccgacttcttcgaccccgccagcatcatggacgagagcgtgctgggcgtgagcatgttctag

SEQ ID NO: 101187 - DNA, 213 bp, Artificial Sequence
  derived and/or modified sequence
atgatcgccgcccccgagatccccaccgacttcaacctgctgcaggagagcgagacccacttcagcagcgacaccgacttcgaggacatcgagggcaagaaccagaagcagggcaagggcaagacctgcaagaagggcaagaagggccccgccgagaagggcaagggcggcaacggcggcggcaagccccccagcggccccaacagaatgtag

SEQ ID NO: 101188 - DNA, 348 bp, Artificial Sequence
  derived and/or modified sequence
atgatcgccgcccccgagatccccaccgacttcaacctgctgcaggagagcgagacccacttcagcagcgacaccgacttcgaggacatcgagggcaagaaccagaagcagggcaagggcaagacctgcaagaagggcaagaagggccccgccgagaagggcaagggcggcaacggcggcggcaagccccccagcggccccaacagaatgaacggccaccaccagcagaacggcgtggagaacatgatgctgttcgaggtggtgaagatgggcaagagcgccatgcagagcgtggtggacgactggatcgagagctacaagcacgacagagacatcgccctgctgtag

SEQ ID NO: 101189 - DNA, 510 bp, Artificial Sequence
  derived and/or modified sequence
atgatcgccgcccccgagatccccaccgacttcaacctgctgcaggagagcgagacccacttcagcagcgacaccgacttcgaggacatcgagggcaagaaccagaagcagggcaagggcaagacctgcaagaagggcaagaagggccccgccgagaagggcaagggcggcaacggcggcggcaagccccccagcggccccaacagaatgaacggccaccaccagcagaacggcgtggagaacatgatgctgttcgaggtggtgaagatgggcaagagcgccatgcagagcgtggtggacgactggatcgagagctacaagcacgacagagacatcgccctgctggacctgatcaacttcttcatccagtgcagcggctgcaagggcgtggtgaccgccgagatgttcagacacatgcagaacagcgagatcatcagaaagatgaccgaggagttcgacgaggacagcggcgactaccccctgaccatggccggcccccagtggaagtag

SEQ ID NO: 101190 - DNA, 465 bp, Artificial Sequence
  derived and/or modified sequence
atgatcgccgcccccgagatccccaccgacttcaacctgctgcaggagagcgagacccacttcagcagcgacaccgacttcgaggacatcgagggcaagaaccagaagcagggcaagggcaagacctgcaagaagggcaagaagggccccgccgagaagggcaagggcggcaacggcggcggcaagccccccagcggccccaacagaatgaacggccaccaccagcagaacggcgtggagaacatgatgctgttcgaggtggtgaagatgggcaagagcgccatgcagagcgtggtggacgactggatcgagagctacaagcacgacagagacatcgccctgctggacctgatcaacttcttcatccagtgcagcggctgcaagggcgtggtgaccgccgagatgttcagacacatgcagaacagcgagatcatcagaaagatgaccgaggagttcgacgagtag

SEQ ID NO: 101191 - DNA, 627 bp, Artificial Sequence
  derived and/or modified sequence
atgatcgccgcccccgagatccccaccgacttcaacctgctgcaggagagcgagacccacttcagcagcgacaccgacttcgaggacatcgagggcaagaaccagaagcagggcaagggcaagacctgcaagaagggcaagaagggccccgccgagaagggcaagggcggcaacggcggcggcaagccccccagcggccccaacagaatgaacggccaccaccagcagaacggcgtggagaacatgatgctgttcgaggtggtgaagatgggcaagagcgccatgcagagcgtggtggacgactggatcgagagctacaagcacgacagagacatcgccctgctggacctgatcaacttcttcatccagtgcagcggctgcaagggcgtggtgaccgccgagatgttcagacacatgcagaacagcgagatcatcagaaagatgaccgaggagttcgacgaggacagcggcgactaccccctgaccatggccggcccccagtggaagaagttcaagagcagcttctgcgagttcatcggcgtgctggtgagacagtgccagtacagcatcatctacgacgagtacatgatggacaccgtgatcagcctgctgaccggcctgagctag

SEQ ID NO: 101192 - DNA, 3489 bp, Artificial Sequence
  derived and/or modified sequence
atgaatgggcatcatcagcaaaatggtgttgaaaatatgatgctcttcgaagtggtgaagatgggaaagtctgctatgcagtctgttgtggatgattggattgagtcatataaacacgacagggatatcgcgctcctggaccttataaatttttttatccagtgtagcggatgtaaaggcgtcgtgaccgctgaaatgttcagacacatgcaaaatagcgaaatcattagaaagatgactgaagagtttgatgaggattcgggggattaccctttgaccatggccggccctcaatggaagaaatttaaatccagcttctgcgagtttattggcgtgctggtgagacaatgccagtatagcattatatacgacgagtatatgatggatacggtgatctccctcttaacaggactttccgatagccaggtgagagctttccgacataccagcacgctcgctgccatgaagctgatgaccgcccttgtaaacgtggcgctgaacctgagtattaatatggataatacccaacggcagtacgaggccgaacgaaacaagatgattggaaagagagctaacgaacgcctcgagctgctcctgcagaagaggaaggaactccaggagaaccaggatgaaattgagaacatgatgaacgcgatctttaaaggcgtttttgttcaccggtacagagacgctatcgcggaaatcagagctatctgtattgaggagataggaatctggatgaaaatgtactctgacgctttcttgaatgattcgtacctgaaatatgtgggatggactatgcatgataagcaaggcgaggtgaggctgaagtgtttgacagcccttcaggggctgtactataacaaggagcttaattcgaaattggaactcttcacctctcgctttaaggatcgcatcgtctccatgactctggacaaggagtacgatgttgccgttcaggctatcaagctcctgacgcttgtgctccagtcttcagaggaagttctcactgctgaggattgcgaaaacgtctaccatttggtctattctgcgcacaggcctgtcgccgtcgcagcaggagagtttctgtacaaaaagctcttttctagacgcgatcctgaggaagatggaatgatgaaacgtcgaggacgccaaggtcctaatgccaatctggttaagactctagtgttcttttttctggaaagcgaactgcacgagcatgccgcctacttagttgactccatgtgggattgtgcgacagaacttctgaaagactgggaatgcatgaactcgttgctgctggaggagcctctctcaggagaagaggcattgaccgatcgccaagagtcagctctaattgagattatgttatgtaccatcaggcaggcagccgagtgccacccaccggttggcagaggcactgggaaacgcgttctcaccgccaaagagaagaagacccagcttgacgacagaaccaaaattacggagctttttgccgtcgccttgccacagctattggccaaatactctgtggacgccgagaaagtcaccaatttgctgcagttaccgcagtactttgacctggagatctacacgacaggacgactagagaaacatctggacgccttgcttcgccagatccggaatatcgttgaaaaacacaccgatacggacgttctggaggcctgctcaaaaacctatcacgcactgtgtaatgaggagttcacaatatttaatagagtcgacatcagtcggtcgcagcttatcgacgagctcgcagataaattcaaccgcttgctggaggattttctgcaggagggcgaggaacccgacgaagacgatgcctaccaagtgctttctactctcaagcggattactgcctttcacaatgcacatgacctgtcgaagtgggatttattcgcttgtaactacaagctccttaagactggaattgaaaacggcgatatgcccgagcagatcgtgatccacgccctgcagtgtacacattacgtcatcctctggcagctcgctaaaatcaccgaatcttccagcacaaaagaagacctgctgcgcctgaagaaacagatgcgagtgttttgccagatctgtcagcattacttaaccaatgtgaacaccactgtgaaggagcaggcatttaccattctttgtgatattctcatgattttcagtcatcagatcatgagtggtggaagagatatgcttgaacctttggtgtacactccagactccagcttacagtccgagctgctctcgtttattttggatcatgtgtttatcgaacaggacgatgacaataatagcgcggacggccagcaggaggacgaagcttctaagatagaggccctgcataagcgacgtaatctcctagcagctttttgcaagctgatcgtgtatacagtggtggaaatgaatacggctgccgacatctttaaacaatacatgaaatactataatgattatggggatatcattaaggagacgatgtcaaagactcgccagattgacaagatacagtgcgccaagactttgattttgagtctccagcagctgttcaacgaaatgatccaggaaaacggctacaacttcgaccgcagtagttctacctttagtggcatcaaggaactggccaggagattcgctctaacgtttggactggatcagctgaaaacccgtgaagcaatcgcaatgctacataaggacggaatagaattcgccttcaaggaaccgaacccccagggggagtcccatcccccattgaacctcgctttcctggatattctcagtgagttcagcagcaaattactccgccaggataagcgcacagtgtatgtttacctggaaaagtttatgactttccagatgagtcttcgccgggaggacgtgtggctgccgctgatgagttaccgcaattcccttcttgcagggggcgatgatgataccatgtctgtgatttcaggtatatctagtcgcggcagcactgtgcgttccaaaaagagtaaacctagtacaggtaaacgcaaggtggtggaagggatgcagttgagtctgactgaagagagctcatcttccgatagcatgtggctcagtcgcgagcagacactccacacccctgttatgatgcagacgccgcaactgacatctacaatcatgcgagaacccaagcggctaaggcccgaagactcctttatgtcagtttatcctatgcagactgaacatcaccagaccccattggattataaccggcggggtaccagcctgatggaagacgatgaggagcctatcgtcgaggacgtcatgatgagctctgaggggcgcattgaagacttaaacgaggggatggattttgatacaatggatattgatctccctccttctaaaaaccggagagaacgaacggagctgaagccagactttttcgatcctgcctcaatcatggacgaaagtgttctcggcgtctccatgttttag

SEQ ID NO: 101193 - DNA, 3696 bp, Artificial Sequence
  derived and/or modified sequence
atgattgctgctccagaaatcccgacagacttcaaccttctgcaggagtcagagacccactttagctccgatacagattttgaggatatcgaaggtaagaaccagaagcagggcaaaggaaagacctgcaaaaaggggaaaaaaggccccgccgagaagggaaagggaggaaatggcggagggaaacctccctctggcccaaatcggatgaatggacaccatcagcagaacggggtggaaaacatgatgcttttcgaggtcgttaagatggggaaatccgcgatgcagtccgtcgttgatgactggatagagtcatacaagcatgacagagacattgctcttctggatctgatcaatttctttatccagtgctctgggtgcaagggcgtggtcacagcagagatgttccgccacatgcagaatagtgaaatcattagaaagatgacagaggagtttgacgaagatagcggtgactatccactgaccatggcgggtcctcagtggaagaaatttaaatcttcattttgtgaatttatcggggtgttggtcagacaatgtcaatattcaattatttatgacgagtacatgatggataccgtcatctcactactgacaggcttatctgactctcaggtgcgcgccttccgtcatacttccacactggccgcaatgaagctcatgactgccctcgtgaatgtggccctgaacctctccattaatatggacaatacacagaggcagtacgaggcggagcggaataagatgattggaaaacgcgcaaatgagcgccttgagctgctcctacagaagcgcaaggagctgcaggaaaatcaggacgaaattgaaaatatgatgaatgcaatattcaaaggagtgttcgtccatcgctacagggacgctattgccgaaattcgcgccatatgtattgaggagatcggcatttggatgaagatgtacagcgacgcgtttctcaacgacagttatcttaagtacgtcggttggacaatgcacgacaaacagggcgaggtgcgccttaagtgtctgaccgccctgcagggactgtattataataaggagctgaacagtaagctcgaactgttcacaagcaggttcaaagaccgaatagtcagcatgacactggataaggagtacgacgtcgccgtccaggctatcaagctgctgactctagtgttgcaaagtagcgaggaggtacttacggccgaggactgcgaaaacgtgtatcatttggtgtatagtgcccataggcctgtcgccgtcgctgccggcgagttcctgtacaagaaactcttctctaggagggacccagaagaagatggcatgatgaaacgaagaggccgtcaaggtccaaatgctaatttggttaagacattggtgtttttctttctggaatctgaactccatgaacatgctgcttatttggtggattcaatgtgggactgtgccaccgagttactgaaagactgggaatgcatgaactcacttctgctggaggagccactaagcggcgaggaagccctgacagatcgtcaagagtccgcactaatcgaaataatgttgtgcaccatccggcaggccgccgagtgtcatccgcccgtagggcgcggaaccggcaaaagggtgcttaccgctaaggagaaaaagactcagttggacgatcgaacaaagattacagaactttttgccgtggcactgccacagcttctcgctaaatatagcgtggatgcagagaaagtgacaaatcttctgcagctccctcagtattttgaccttgagatttatactaccgggcggctggaaaagcacctggatgccttactccgacagattcgaaatatcgtagagaaacacactgatacagacgtgctagaggcatgttctaagacctaccacgccctctgtaacgaagaatttactatttttaatcgagtggatatctccagaagccagctgattgatgagcttgccgacaaattcaatcgcctgctcgaggatttcttgcaggaaggcgaagaaccggacgaggacgacgcttatcaggtgctctctacgctcaaaaggattacagcgttccacaacgctcacgatttatccaaatgggacctattcgcctgtaattacaaacttctgaagactggtatagagaatggagacatgcccgagcagatcgttatacacgccctccaatgcacccattacgtaatcctgtggcagctggctaagatcactgagtcttcgagcactaaggaagatttattacgtcttaaaaaacaaatgcgtgttttttgtcaaatatgtcagcactatcttacgaatgttaatacaacggtgaaggaacaggcctttacgatactttgtgacatcttaatgatcttctctcaccagatcatgagtggagggcgcgacatgctcgaacccttagtgtatacccctgatagctccttgcaatccgaattgctcagctttattctggaccacgtctttattgagcaggatgatgacaataattcagcagatggtcaacaagaagacgaggcgtccaagatcgaggcactgcacaaaagacgaaatttgcttgcagccttctgtaaactcatagtgtataccgtcgtagaaatgaacactgccgccgatattttcaagcaatacatgaagtattacaatgactatggggacattatcaaggagacaatgtcaaagactcggcagatcgacaagatccaatgcgctaaaactttgatcctttccctgcagcagttattcaacgagatgattcaggagaatggctacaatttcgatcgatcttccagcacatttagtggtataaaggagcttgcacggcgtttcgccttaacttttggactggaccaactgaaaacccgagaggctatcgctatgctgcacaaggatgggatcgaatttgctttcaaagaacctaacccgcaaggcgagtcacaccctcccctgaacttggcattcttggacattcttagtgagttctcttccaaactgctccggcaggacaagcgcacagtatacgtttatctggaaaaattcatgactttccagatgtcactgcggcgggaggatgtctggttgccattgatgtcttaccggaactccctgctagccggcggggatgacgacacaatgagcgtcatatcgggcattagtagtagggggtcaaccgtgcgttccaagaagtctaagccgtcaacaggaaaaagaaaggtggtggagggaatgcagttgtcattaaccgaggagagctcatcttctgatagcatgtggctgagcagagaacagactctgcataccccggtaatgatgcagactccccagttgaccagtactattatgagggagccaaaacgattgcgacccgaagattcattcatgtccgtctacccaatgcagaccgagcaccatcagacccccctcgattacaacagacgaggcactagcttaatggaagacgacgaagaacctatcgtggaggacgtgatgatgtccagtgagggccgtatcgaggacctgaacgaaggcatggacttcgatacaatggatatagatcttcccccgagcaagaaccggagagagagaacggagctcaaaccagactttttcgaccccgcttccatcatggacgagagcgttctgggggtctccatgttttag

SEQ ID NO: 101194 - DNA, 3696 bp, Artificial Sequence
  derived and/or modified sequence
atgatcgccgcgcccgagattccaactgactttaacctgcttcaggaaagcgagacccacttcagctctgacacggactttgaagacatcgagggaaaaaaccaaaaacaaggtaagggaaaaacatgtaagaagggcaagaaaggaccagcagagaaaggcaaaggaggtaatggggggggcaaaccaccctctggacctaacagaatgaacggacaccatcagcagaatggggtggaaaatatgatgttgtttgaagttgtgaaaatgggaaagtccgcgatgcaatccgtcgtggacgactggatagaatcgtataaacatgatcgggacatcgccctgctagacctgataaacttcttcatccagtgcagcgggtgtaagggggttgtgaccgctgaaatgtttagacacatgcagaattctgaaatcattcggaaaatgacggaagaatttgatgaagactcaggcgactatccactcactatggcaggtccacagtggaagaaatttaagtcttccttctgcgaatttattggtgttctcgtgagacagtgtcagtactccattatctacgacgagtatatgatggacaccgtcatttcattactcaccggtctcagtgactcccaggtacgggcctttagacatacatctaccctggctgccatgaaactgatgaccgcactggttaacgtggcacttaatctgtccatcaatatggacaacacccaacgccagtatgaagccgaacgtaataaaatgatcgggaagcgcgcgaatgagcggcttgagctgctcctccagaaacgcaaagagctccaggagaaccaggacgaaattgagaatatgatgaatgctatttttaaaggtgtgtttgtccaccgttacagagacgctatcgctgagatccgtgccatatgtatcgaggagataggaatctggatgaagatgtattccgatgcctttctgaatgattcgtacctaaagtatgtggggtggactatgcacgataaacagggcgaggtacgtctgaagtgcctgacagctctccagggcctgtactacaacaaagaactgaactcaaagttagaactgttcacttcaagattcaaagatcgtatagtgtccatgacgcttgacaaggaatacgacgtggccgttcaggcgatcaaactgctgactttggtgctccagtcttcagaggaggtcctaactgcagaggactgcgagaacgtgtaccacttagtttatagcgcccatagaccagtggccgtggccgctggagagtttctgtataagaagctcttcagcaggcgggacccagaagaagatggtatgatgaaaaggagagggagacagggtcccaatgcaaaccttgtgaagaccttagtatttttttttttggaaagcgaattacatgagcacgcggcatatcttgtagacagtatgtgggactgtgctaccgaattgctgaaagactgggagtgcatgaactctctgctgctcgaagagcctctcagcggagaggaagcacttactgaccgccaagagagcgctctaattgagatcatgttgtgtaccatccgacaagccgcagaatgtcaccctccagttggccgggggaccggcaagcgcgttctgacggccaaggagaaaaagacacagctggacgacaggactaaaattaccgagctcttcgcagtggctctccctcaattgctcgccaagtacagcgtggatgcagagaaagtcacaaatctcctccaactccctcagtacttcgacctggagatctacaccaccggccggcttgagaagcacctggatgcactgctgcgccagatcagaaatattgtagagaaacataccgacactgatgttctcgaagcctgttctaaaacgtatcacgcattgtgcaatgaggagtttacgatcttcaatagggtggatatctcccgaagccaacttatagatgaactggctgataagtttaatcgtctgctggaggactttctgcaggagggggaagagccagatgaggacgatgcgtaccaggtcctgtcgacccttaagcgaattaccgctttccataacgcccatgacctgtcaaaatgggatctattcgcctgtaattacaaactgctgaagaccggcatcgagaacggcgatatgcccgagcagatcgtcattcacgctctgcaatgtacccattatgtcattctgtggcagcttgccaagattaccgagagcagtagcactaaagaggacctgttacggctaaagaagcaaatgcgcgtgttttgtcagatttgccagcattacctgactaacgtgaacaccacagtgaaagagcaagcattcactatcctttgcgatatcttgatgatcttttcacatcagattatgtcaggcggccgcgatatgttagaaccgctcgtctataccccggatagttccctccagagcgaacttctctcttttatattggatcatgtgttcatcgagcaggacgatgacaacaactctgcggacgggcaacaggaagatgaggcgagtaagattgaagccttacacaagcgcagaaatctgctggccgcattctgtaaactcattgtgtacactgtagtggagatgaacacggccgcagatatctttaaacagtacatgaaatattacaacgattacggagacattattaaagagaccatgagtaagacacgacagatcgacaagatccagtgtgctaagaccctaattctcagtttgcagcagctcttcaacgaaatgatccaggagaacggttacaattttgataggagctccagcaccttcagtggcattaaagaactggcacgtagattcgcactcacctttggactggaccaactcaaaacaagggaggccattgccatgctgcacaaggacggcatcgaatttgcgttcaaggaacctaaccctcagggggagagccaccctccactcaacctggccttcctggacattctttctgagttttcatcgaagttattgcgtcaggacaagaggaccgtgtatgtataccttgagaagttcatgacattccaaatgagtcttagacgggaagacgtatggctgcccttgatgtcctaccggaattctttgctggccggtggagacgacgataccatgagtgttatctctggcatcagttcaagaggaagtactgtcagatccaaaaagtctaaaccgagtacagggaagcgaaaagtggtggaaggtatgcagctatctctgaccgaagagtctagctcgagtgactcaatgtggctgagccgtgagcagacactacacacacctgtgatgatgcaaacaccccagctgacctcaacaattatgcgagagcctaagcgactgcggcccgaggactcgttcatgtccgtttaccccatgcagacagaacatcatcagactccattagattacaacaggcgaggtacatcactgatggaagatgatgaggagccaattgtagaggatgttatgatgagcagcgagggcagaattgaggacctgaatgaggggatggactttgacacaatggatattgatctgccgccctccaaaaatcgccgagaacggactgagctgaagcccgatttctttgacccggccagcatcatggatgagtctgtattaggagtgagcatgttctag

SEQ ID NO: 101195 - DNA, 3696 bp, Artificial Sequence
  derived and/or modified sequence
atgatagcagccccagaaatccctacggactttaatcttctgcaggagtctgaaactcactttagctctgataccgacttcgaggacattgagggtaaaaaccagaagcagggtaaggggaaaacttgtaagaagggcaaaaagggtcccgccgagaagggtaagggaggaaacggaggaggcaaacccccaagtggccccaaccgcatgaatggccatcatcaacagaatggagttgagaatatgatgctctttgaagtcgttaagatgggtaaatccgccatgcagtccgtggtggacgattggatagaatcttataagcacgatcgagatatcgcactgcttgatttaattaacttttttatacagtgctctggatgcaagggtgtcgtgacagcagaaatgtttcgacatatgcagaactcagaaatcatccggaaaatgaccgaagagtttgatgaggatagcggggactaccccctgacaatggccggaccccaatggaagaagtttaagagctccttctgtgagtttattggagtcctcgtaagacagtgtcagtacagcattatctatgacgaatacatgatggacacagtaattagcttgctgaccggtctgtctgattcccaggtgcgcgcctttcggcatacctcaacattggccgctatgaaactcatgactgcactggtcaatgttgcactgaacttaagtatcaatatggacaacacacagcgccagtacgaggctgagagaaataagatgatcggtaaacgcgcaaatgagaggctcgagctgttgctgcaaaagaggaaggagttgcaggagaatcaagatgaaattgagaacatgatgaatgccatattcaagggcgtgtttgtgcatcgttacagggacgcaattgccgagatccgcgccatttgcatcgaagagatcggaatctggatgaaaatgtattccgatgcattcctgaatgacagctatcttaaatacgtcgggtggacgatgcatgacaaacagggtgaggtgcgactgaaatgtctcaccgccttgcagggcttatattataacaaagaattgaattcgaagcttgagctcttcaccagccggttcaaggaccgaattgtgagcatgacattagacaaagaatatgacgtcgccgtccaggctataaagttgctcacacttgtgctgcaatcatcagaggaagtgctaactgccgaggattgcgagaatgtctatcacctcgtgtactccgcgcatcgaccagtggctgtcgccgctggggaatttctgtacaagaagctgttctcgcgcagggatccggaagaggacggcatgatgaaacgacgtggccggcagggacctaacgccaacctcgtgaagacactcgttttctttttcctggagagtgaactacacgagcatgctgcctatctggtggactcaatgtgggactgcgcgacggagctgttaaaagactgggaatgcatgaacagcctactattggaggagcctctctctggcgaggaggctctaacagatcgccaagagagtgcactcattgagatcatgctatgcaccatcaggcaagccgcagagtgccacccccctgttggcagggggacaggcaagcgcgtcctgaccgctaaggaaaagaagacccagctggatgatagaactaagataaccgagttgttcgctgtggcgttgccccaactgttggccaaatactcagtggacgctgagaaagtaacaaacttgctgcagcttcctcaatattttgacctggagatttatacaacaggccgtctcgagaagcacctcgatgccctgctccgtcagattcgaaatattgtagagaagcacactgacacggatgtgctggaagcctgttcaaagacttaccatgctctttgtaacgaggaattcacaatcttcaacagagtggacatatcccggtcacaactgattgacgagttggccgataagttcaacagattgctagaagattttctccaggagggtgaggaacccgatgaggacgacgcttaccaggtgttaagcacgcttaagcggattacagccttccataatgctcatgatctgtccaagtgggatctgttcgcgtgtaactataaacttttgaagacgggtattgagaatggcgatatgccagagcagattgtcattcacgctctacagtgtactcactatgtcatcctgtggcagttggcaaaaatcacggagtcctcttccacaaaagaagacctactgagactgaaaaaacagatgcgggtcttctgccagatctgtcagcattacctgaccaatgtcaatacaactgtgaaagagcaggctttcactatactctgcgacatcctaatgatcttcagccatcagatcatgagcggagggagagacatgcttgagcccctggtgtacacacccgactcaagcctgcagagcgagctcttgagcttcatactggaccacgtctttatagaacaggacgatgataacaatagtgcggacggtcaacaggaggacgaagcgtccaagatcgaggcactgcacaaaagacgtaatctcctggcagccttttgcaagctcatcgtatacaccgtggtggaaatgaatacggcggcagacatcttcaagcaatatatgaaatactataatgattacggcgacatcatcaaagaaaccatgagcaagacgagacagattgacaagatacaatgcgcaaaaaccctcattctctccttgcagcagctgtttaatgagatgatccaggaaaacggctacaattttgacaggtctagcagcactttcagtgggatcaaggagctcgctaggcgttttgccctgacctttgggctggaccagttaaagacaagagaagctatagccatgctccataaggatggcatcgagtttgctttcaaagaaccaaacccccaaggcgagtctcatcccccattgaatctagcctttctggatattcttagcgagttctccagcaaattgttgagacaggataagcggaccgtctacgtttaccttgaaaagtttatgactttccagatgtcattgaggcgggaagatgtgtggttaccactgatgtcgtaccgaaacagccttctggccggaggcgatgacgacactatgtccgtgattagcggaatctcctctcggggaagcaccgtccggtcgaaaaagagcaagccttcaactgggaagaggaaggtcgttgagggaatgcagctcagccttaccgaagagtcaagctctagcgacagcatgtggctgtcacgcgagcagaccctgcatacaccagtgatgatgcagacccctcagctgacctccaccattatgcgggagccaaaaagactaagacccgaagatagctttatgtccgtgtatccgatgcagaccgaacaccaccagaccccacttgactacaaccgtcgaggcacctccctcatggaagatgatgaagaacctattgtcgaagatgtcatgatgtcttcagaggggcgaatagaggatctgaacgaaggcatggatttcgacactatggatatcgatttgccccccagtaaaaaccgccgggaaaggactgaactcaaaccggatttctttgatcctgccagtatcatggacgagagcgtgctcggcgtgtctatgttctag

SEQ ID NO: 101196 - DNA, 213 bp, Artificial Sequence
  derived and/or modified sequence
atgatcgcggccccggagattcccacagattttaacttgctccaggaaagcgaaacccacttctcaagcgatacggacttcgaggatatagaagggaaaaaccagaagcagggcaaaggaaaaacttgtaagaagggaaagaagggccccgccgaaaaaggcaaaggggggaacggcggagggaagcccccctcaggcccaaatcggatgtag

SEQ ID NO: 101197 - DNA, 348 bp, Artificial Sequence
  derived and/or modified sequence
atgattgctgccccagagatcccaactgactttaatctgttgcaggagtccgagactcacttctcgtctgatacagacttcgaggacattgagggtaagaatcaaaagcagggaaagggaaagacatgcaaaaaagggaaaaaggggcctgcggaaaaaggtaagggaggtaacggtggcggcaagccaccgagcggacctaatagaatgaacggccaccatcaacaaaatggagtggaaaatatgatgctgtttgaggttgtgaagatgggaaagtcggccatgcaatcagtcgtggacgactggatcgaatcgtacaagcacgacagggatattgctctgctgtag

SEQ ID NO: 101198 - DNA, 510 bp, Artificial Sequence
  derived and/or modified sequence
atgattgctgcccccgaaatcccaaccgatttcaacttattgcaggagtccgaaacacattttagtagcgatactgattttgaggatatcgagggcaagaaccagaaacaggggaaagggaagacttgcaaaaagggcaagaagggtcccgccgaaaaggggaaaggggggaatggaggcggaaaaccaccttccggaccaaacagaatgaacggccatcaccagcagaatggcgtggaaaatatgatgctttttgaggtcgtcaagatggggaaaagcgctatgcagagtgtggtcgatgactggattgaatcgtacaagcatgaccgcgacatagcccttctggacctaattaacttttttatccagtgctccgggtgcaagggcgtcgtcaccgcagagatgttccggcacatgcaaaacagcgaaatcattcggaagatgacagaggaatttgacgaggattctggcgattacccattaacaatggcaggaccccagtggaaatag

SEQ ID NO: 101199 - DNA, 465 bp, Artificial Sequence
  derived and/or modified sequence
atgatcgcagcccccgagatacccaccgacttcaatctgctccaggagagtgagacccactttagtagtgatacagactttgaggacatcgagggtaaaaaccaaaagcagggaaaaggcaaaacctgcaagaaaggtaagaaagggcccgccgaaaagggcaaaggaggtaacgggggtggcaaacccccctcaggtcccaacagaatgaacggccaccaccaacaaaacggcgtggagaacatgatgctgtttgaggtggtcaaaatgggcaagtccgccatgcagtcggtggttgacgactggatcgagtcttacaagcatgaccgagatatcgcactcctggatctcatcaactttttcatccaatgcagcgggtgcaaaggagttgttactgctgagatgtttcgccatatgcagaatagcgagatcatcagaaaaatgactgaggagtttgatgagtag

SEQ ID NO: 101200 - DNA, 627 bp, Artificial Sequence
  derived and/or modified sequence
atgattgcagcccccgaaatcccaaccgactttaacctcctccaagagtcagagacacactttagctctgacactgatttcgaagacatagagggtaagaatcagaaacagggcaaaggaaagacatgtaagaaggggaaaaaaggccctgcagagaagggcaagggaggcaacggaggtggcaaaccgccatccggtccgaacagaatgaacggacatcaccaacagaatggagttgagaatatgatgttatttgaggtggttaagatgggcaaatccgccatgcagagcgtggttgatgactggatcgagtcttataagcatgatagggatatcgccttactggatctgattaatttcttcatccagtgttcaggctgcaagggcgtcgttacagccgaaatgtttcgtcacatgcagaattcagagataattaggaaaatgacagaggagttcgacgaagactcgggagattaccctcttaccatggccggaccccagtggaaaaagttcaagtcctccttttgtgaattcatcggcgtgcttgttaggcagtgtcagtacagtatcatctacgatgaatatatgatggataccgtgatctcacttcttacaggcttgtcttag

SEQ ID NO: 101201 - DNA, 3489 bp, Artificial Sequence
  derived and/or modified sequence
atgaatggccaccaccagcagaatggagtggagaacatgatgctgtttgaggtggtgaagatgggcaagagcgccatgcagagcgtggtggatgactggattgagagctacaagcatgaccgggacatcgccctgctggacctgatcaacttcttcatccagtgcagcggctgcaagggcgtggtgacagctgagatgttccgccacatgcagaacagcgagatcatcaggaagatgacagaggagtttgatgaagattctggggactaccccctgaccatggccggcccccagtggaagaagttcaagagcagcttctgtgagttcatcggcgtgctggtgcggcagtgccagtacagcatcatctatgatgagtacatgatggacaccgtcatcagcctgctgaccggcctgagtgacagccaggtgcgggccttccgccacaccagcaccctggccgccatgaagctgatgacagccctggtgaatgtggccctgaacctgagcatcaacatggacaacacccagaggcagtatgaagctgagaggaacaagatgattggcaagagggccaatgaaaggctggagctgctgctgcagaagaggaaggagctgcaggagaaccaggatgaaattgagaacatgatgaatgccatcttcaagggcgtgtttgtgcaccgctacagagatgccatcgccgagatccgggccatctgcatcgaggagatcggcatctggatgaagatgtacagtgatgccttcctgaatgacagctacctgaagtatgtgggctggaccatgcatgacaagcagggcgaggtgcggctgaagtgcctgacagccctgcagggcctgtactacaacaaggagctgaacagcaagctggagctgttcaccagccgcttcaaggaccgcatcgtgtccatgaccctggacaaggagtatgatgtggccgtgcaggccatcaagctgctgaccctggtgctgcagagcagcgaggaggtgctgacagctgaggactgtgaaaatgtgtaccacctggtgtacagcgcccacaggcctgtggccgtggccgccggggagttcctgtacaagaagctgttcagccggcgggaccctgaagaagatggcatgatgaagagaagaggccggcagggccccaatgccaacctggtgaagaccctggtgttcttcttcctggagagcgagctgcatgaacatgctgcctacctggtggacagcatgtgggactgtgccacagagctgctgaaggactgggagtgcatgaacagcctgctgctggaggagcccctgtctggagaggaggccctgacagaccggcaggagagcgccctgattgagatcatgctgtgcaccatccggcaggccgctgagtgccacccccctgtgggccggggcaccgggaagagggtgctgacagccaaggagaagaagacccagctggatgacaggaccaagatcacagagctgtttgctgtggccctgccccagctgctggccaagtacagcgtggatgctgagaaggtgaccaacctgctgcagctgccccagtactttgacctggagatctacaccaccggccgcctggagaagcacctggatgccctgctgcggcagatccggaacatcgtggagaagcacacagacacagatgtgctggaggcctgcagcaagacctaccacgccctgtgcaatgaggagttcaccatcttcaacagagtggacatcagccgcagccagctgattgatgagctggccgacaagttcaaccggctgctggaggacttcctgcaggagggggaggagccagatgaagatgatgcctaccaggtgctgagcaccctgaagaggatcacagccttccacaatgcccatgacctgagcaagtgggacctgtttgcctgcaactacaagctgctgaagacaggaattgaaaatggagacatgcctgagcagatcgtcatccacgccctgcagtgcacccactacgtgatcctgtggcagctggccaagatcacagagagcagcagcaccaaggaggacctgctgcggctgaagaagcagatgagggtcttctgccagatctgccagcactacctgaccaacgtgaacaccaccgtgaaggagcaggccttcaccatcctgtgtgacatcctgatgatcttcagccaccagatcatgtctgggggccgggacatgctggagcccctggtgtacaccccagacagcagcctgcagagcgagctgctgtccttcatcctggaccacgtgttcatcgagcaggatgatgacaacaacagcgcagatggccagcaggaggatgaggccagcaagattgaggccctgcacaagagaagaaacctgctggccgccttctgcaagctgattgtgtacacagtggtggagatgaacacagctgctgacatcttcaagcagtacatgaagtactacaatgactatggagacatcatcaaggagaccatgagcaagacccggcagattgacaagatccagtgtgccaagaccctcatcctgagcctgcagcagctgttcaatgagatgatccaggagaatggctacaactttgacaggagcagcagcaccttcagcggcatcaaggagctggccaggagatttgccctgaccttcggcctggaccagctgaagacccgggaggccatcgccatgctgcacaaggatggcattgaatttgccttcaaggagcccaacccccagggcgagagccacccccccctgaacctggccttcctggacatcctgtctgagttcagcagcaagctgctgcggcaggacaagaggacagtgtatgtgtacctggagaagttcatgaccttccagatgagcctgcggcgggaggatgtgtggctgcccctgatgagctacagaaacagcctgctggccggaggagatgatgacaccatgtctgtcatcagcggcatcagcagccggggcagcacagtgcgcagcaagaagagcaagcccagcacaggcaagaggaaggtggtggagggcatgcagctgagcctgacagaggagagcagcagcagtgacagcatgtggctgagccgggagcagaccctgcacacccctgtgatgatgcagaccccccagctgaccagcaccatcatgagggagcccaagaggctgcggcctgaggacagcttcatgtctgtgtaccccatgcagacagagcaccaccagacccccctggactacaacagaagaggcaccagcctgatggaggatgatgaggagcccatcgtggaggatgtgatgatgagcagcgagggcagaattgaggacctgaatgaaggcatggactttgacaccatggacatcgacctgccccccagcaagaacagaagagagaggacagagctgaagccagacttctttgatcctgccagcatcatggatgaatctgtgctgggcgtgtccatgttttag

SEQ ID NO: 101202 - DNA, 3696 bp, Artificial Sequence
  derived and/or modified sequence
atgattgctgcccctgagatccccacagacttcaacctgctgcaggagagcgagacccacttcagcagtgacacagactttgaggacatcgagggcaagaaccagaagcagggcaagggcaagacctgcaagaagggcaagaagggccctgctgagaagggcaaaggaggaaatggaggcggcaagcccccatctggccccaacaggatgaatggccaccaccagcagaatggagtggagaacatgatgctgtttgaggtggtgaagatgggcaagagcgccatgcagagcgtggtggatgactggattgagagctacaagcatgaccgggacatcgccctgctggacctgatcaacttcttcatccagtgcagcggctgcaagggcgtggtgacagctgagatgttccgccacatgcagaacagcgagatcatcaggaagatgacagaggagtttgatgaggacagcggggactaccccctgaccatggccggcccccagtggaagaagttcaagagcagcttctgtgagttcatcggcgtgctggtgcggcagtgccagtacagcatcatctatgatgagtacatgatggacaccgtcatcagcctgctgaccggcctgagtgacagccaggtgcgggccttccgccacaccagcaccctggccgccatgaagctgatgacagccctggtgaatgtggccctgaacctgagcatcaacatggacaacacccagaggcagtatgaggccgagaggaacaagatgattggcaagagggccaatgaaaggctggagctgctgctgcagaagaggaaggagctgcaggagaaccaggatgaaattgagaacatgatgaatgccatcttcaagggcgtgtttgtgcaccgctacagagatgccatcgccgagatccgggccatctgcatcgaggagatcggcatctggatgaagatgtacagtgatgccttcctgaatgacagctacctgaagtatgtgggctggaccatgcatgacaagcagggcgaggtgcggctgaagtgcctgacagccctgcagggcctgtactacaacaaggagctgaacagcaagctggagctgttcaccagccgcttcaaggacagaattgtgtccatgaccctggacaaggagtatgatgtggccgtgcaggccatcaagctgctgaccctggtgctgcagagcagcgaggaggtgctgacagctgaggactgtgaaaatgtgtaccacctggtgtacagcgcccacaggcctgtggccgtggccgccggggagttcctgtacaagaagctgttcagcagaagagatcctgaggaggatggcatgatgaagaggcggggccggcagggccccaatgccaacctggtgaagaccctggtgttcttcttcctggagagcgagctgcacgagcacgccgcctacctggtggacagcatgtgggactgtgccacagagctgctgaaggactgggagtgcatgaacagcctgctgctggaggagcccctgagcggggaggaggccctgacagaccggcaggagagcgccctgattgagatcatgctgtgcaccatccggcaggccgctgagtgccacccccctgtgggccggggcaccgggaagagggtgctgacagccaaggagaagaagacccagctggatgacaggaccaagatcacagagctgtttgctgtggccctgccccagctgctggccaagtacagcgtggatgctgagaaggtgaccaacctgctgcagctgccccagtactttgacctggagatctacaccaccggccgcctggagaagcacctggatgccctgctgcggcagatcagaaatattgtggagaagcacacagacacagatgtgctggaggcctgcagcaagacctaccacgccctgtgcaatgaggagttcaccatcttcaacagagtggacatcagccgcagccagctgattgatgagctggccgacaagttcaaccggctgctggaggacttcctgcaggagggggaggagccagatgaagatgatgcctaccaggtgctgagcaccctgaagaggatcacagccttccacaatgcccatgacctgagcaagtgggacctgtttgcctgcaactacaagctgctgaagacaggaattgaaaatggagacatgcctgagcagatcgtcatccacgccctgcagtgcacccactacgtgatcctgtggcagctggccaagatcacagagagcagcagcaccaaggaggacctgctgcggctgaagaagcagatgagggtcttctgccagatctgccagcactacctgaccaacgtgaacaccaccgtgaaggagcaggccttcaccatcctgtgtgacatcctgatgatcttcagccaccagatcatgtctgggggccgggacatgctggagcccctggtgtacaccccagacagcagcctgcagagcgagctgctgtccttcatcctggaccacgtgttcatcgagcaggatgatgacaacaacagcgcagatggccagcaggaggatgaggccagcaagattgaggccctgcacaagagaagaaacctgctggccgccttctgcaagctgattgtgtacacagtggtggagatgaacacagctgctgacatcttcaagcagtacatgaagtactacaatgactatggagacatcatcaaggagaccatgagcaagacccggcagattgacaagatccagtgtgccaagaccctcatcctgagcctgcagcagctgttcaatgagatgatccaggagaatggctacaactttgacaggagcagcagcaccttcagcggcatcaaggagctggccaggagatttgccctgaccttcggcctggaccagctgaagacccgggaggccatcgccatgctgcacaaggatggcatcgagtttgccttcaaggagcccaacccccagggcgagagccacccccccctgaacctggccttcctggacatcctgtctgagttcagcagcaagctgctgcggcaggacaagaggacagtgtatgtgtacctggagaagttcatgaccttccagatgagcctgcggagagaagatgtgtggctgcccctgatgagctacagaaacagcctgctggccggaggagatgatgacaccatgtctgtcatcagcggcatcagcagccggggcagcacagtgcgcagcaagaagagcaagcccagcacaggcaagaggaaggtggtggagggcatgcagctgagcctgacagaggagagcagcagcagtgacagcatgtggctgagccgggagcagaccctgcacacccctgtgatgatgcagaccccccagctgaccagcaccatcatgagggagcccaagaggctgcggccagaagattccttcatgtctgtgtaccccatgcagacagagcaccaccagacccccctggactacaacagaagaggcaccagcctgatggaggatgatgaggagcccatcgtggaggatgtgatgatgagcagcgagggcagaattgaggacctgaatgaaggcatggactttgacaccatggacatcgacctgccccccagcaagaacagaagagagaggacagagctgaagccagacttctttgatcctgccagcatcatggatgagagcgtgctgggcgtgtccatgttttag

SEQ ID NO: 101203 - DNA, 213 bp, Artificial Sequence
  derived and/or modified sequence
atgattgctgcccctgagatccccacagacttcaacctgctgcaggagagcgagacccacttcagcagtgacacagactttgaggacatcgagggcaagaaccagaagcagggcaagggcaagacctgcaagaagggcaagaagggccctgctgagaagggcaaaggaggaaatggaggcggcaagcccccatctggccccaacaggatgtag

SEQ ID NO: 101204 - DNA, 348 bp, Artificial Sequence
  derived and/or modified sequence
atgattgctgcccctgagatccccacagacttcaacctgctgcaggagagcgagacccacttcagcagtgacacagactttgaggacatcgagggcaagaaccagaagcagggcaagggcaagacctgcaagaagggcaagaagggccctgctgagaagggcaaaggaggaaatggaggcggcaagcccccatctggccccaacaggatgaatggccaccaccagcagaatggagtggagaacatgatgctgtttgaggtggtgaagatgggcaagagcgccatgcagagcgtggtggatgactggattgagagctacaagcatgaccgggacatcgccctgctgtag

SEQ ID NO: 101205 - DNA, 510 bp, Artificial Sequence
  derived and/or modified sequence
atgattgctgcccctgagatccccacagacttcaacctgctgcaggagagcgagacccacttcagcagtgacacagactttgaggacatcgagggcaagaaccagaagcagggcaagggcaagacctgcaagaagggcaagaagggccctgctgagaagggcaaaggaggaaatggaggcggcaagcccccatctggccccaacaggatgaatggccaccaccagcagaatggagtggagaacatgatgctgtttgaggtggtgaagatgggcaagagcgccatgcagagcgtggtggatgactggattgagagctacaagcatgaccgggacatcgccctgctggacctgatcaacttcttcatccagtgcagcggctgcaagggcgtggtgacagctgagatgttccgccacatgcagaacagcgagatcatcaggaagatgacagaggagtttgatgaggacagcggggactaccccctgaccatggccggcccccagtggaagtag

SEQ ID NO: 101206 - DNA, 465 bp, Artificial Sequence
  derived and/or modified sequence
atgattgctgcccctgagatccccacagacttcaacctgctgcaggagagcgagacccacttcagcagtgacacagactttgaggacatcgagggcaagaaccagaagcagggcaagggcaagacctgcaagaagggcaagaagggccctgctgagaagggcaaaggaggaaatggaggcggcaagcccccatctggccccaacaggatgaatggccaccaccagcagaatggagtggagaacatgatgctgtttgaggtggtgaagatgggcaagagcgccatgcagagcgtggtggatgactggattgagagctacaagcatgaccgggacatcgccctgctggacctgatcaacttcttcatccagtgcagcggctgcaagggcgtggtgacagctgagatgttccgccacatgcagaacagcgagatcatcaggaagatgacagaggagtttgatgaatag

SEQ ID NO: 101207 - DNA, 627 bp, Artificial Sequence
  derived and/or modified sequence
atgattgctgcccctgagatccccacagacttcaacctgctgcaggagagcgagacccacttcagcagtgacacagactttgaggacatcgagggcaagaaccagaagcagggcaagggcaagacctgcaagaagggcaagaagggccctgctgagaagggcaaaggaggaaatggaggcggcaagcccccatctggccccaacaggatgaatggccaccaccagcagaatggagtggagaacatgatgctgtttgaggtggtgaagatgggcaagagcgccatgcagagcgtggtggatgactggattgagagctacaagcatgaccgggacatcgccctgctggacctgatcaacttcttcatccagtgcagcggctgcaagggcgtggtgacagctgagatgttccgccacatgcagaacagcgagatcatcaggaagatgacagaggagtttgatgaggacagcggggactaccccctgaccatggccggcccccagtggaagaagttcaagagcagcttctgtgagttcatcggcgtgctggtgcggcagtgccagtacagcatcatctatgatgagtacatgatggacaccgtcatcagcctgctgaccggcctgtcctag

SEQ ID NO: 101208 - DNA, 3489 bp, Artificial Sequence
  derived and/or modified sequence
atgaacggccaccaccagcagaacggcgtggagaacatgatgctgtttgaggtggtgaaaatggggaaatccgccatgcagagtgtggtggatgactggatagagagttacaaacacgatagggatattgccctattggacttaataaacttctttatacagtgcagtggctgtaaaggcgtagtaacggccgagatgtttcgccatatgcagaatagcgagataatccggaagatgactgaggagttcgatgaggatagcggggactatcctcttacaatggcaggcccacagtggaaaaagtttaagagttctttttgcgagttcatcggagtgctagtgcgccaatgtcagtattccataatctatgatgagtacatgatggacacagtcattagcctcctgactggccttagcgattcccaggttcgggcatttcgccatacttcgaccctagctgcaatgaagttaatgaccgctctggttaacgtggctctgaatctatccataaatatggacaacacccagcgtcagtatgaagcagagcgaaataaaatgatcggaaagagagcgaacgagagactggagctcttgttacagaagcggaaggaactccaggagaatcaggatgagattgagaatatgatgaacgccatctttaaaggtgtatttgtgcaccgatatagagacgcgattgccgagatccgcgccatctgtatagaggaaattgggatctggatgaagatgtacagcgacgcttttctgaacgatagctatctgaaatatgtgggttggactatgcacgataaacagggcgaggtgcgcctaaagtgtctcacggcactgcagggcctgtattacaataaagagctgaattccaagctggagctattcacctcccggtttaaggaccggattgtgtccatgactctcgacaaggagtacgatgtcgccgtgcaggccatcaagttgctaacactcgtcctgcagagcagcgaggaagtgctgactgccgaagactgcgaaaacgtttaccatttggtttactccgctcacagacccgttgccgttgcagccggcgagtttctgtacaagaagttgttttctagaagggatccggaggaagatggcatgatgaagaggaggggccggcaaggtccaaatgctaatcttgtgaaaaccctggtttttttctttctggagagcgagctccacgagcatgctgcctatcttgtggactccatgtgggattgtgcaacagagcttctcaaggattgggagtgtatgaattctctgttactggaggagcctctgtccggagaagaagcactcaccgaccggcaggagagcgctctaatagagatcatgctgtgtacaataaggcaggccgctgagtgccacccacctgtaggaaggggtaccgggaagcgggtactgaccgccaaggagaaaaagactcaactggacgaccgcacgaaaattactgagctcttcgcggtggcgttaccacaacttctagccaagtatagcgtcgacgccgaaaaagtaaccaacctgctccagctgccccagtacttcgacttagagatctataccacggggcgtttggagaaacatttagacgctttgttgaggcagattaggaacattgtggagaagcatactgacacagacgtcctcgaagcctgttctaaaacttaccatgctctctgtaatgaggaatttaccatctttaatagggtcgacatctccagatcgcagctaatcgatgagctcgctgataagttcaaccgtctgctggaagacttcctccaggaaggtgaagagcccgatgaggatgacgcctaccaggttttatccacactcaaaagaataaccgcatttcataacgcccatgatttaagcaaatgggatctgttcgcatgcaattacaaactgctgaaaaccggtattgaaaacggagacatgccagagcagatcgtgatacacgccctgcagtgcactcattacgtgatactatggcagctcgccaagatcaccgagtcgtcttctacaaaggaagacttgctccggctgaagaaacagatgagggtcttttgccaaatttgccagcactatctgactaacgtcaacactacagtcaaggagcaggcgttcacaatactgtgtgacattctgatgatattctcccaccagataatgtctggagggagggacatgctagaaccgttggtttatacacctgattcctctctccagtctgaactcctgtcctttattctcgatcacgtattcatagaacaagatgacgacaataactcagccgacggccagcaggaggatgaggcgagcaaaatcgaagccttgcacaagaggcgaaatcttctggctgcattctgcaagctaattgtgtataccgtggtggaaatgaataccgcagctgacatatttaagcagtatatgaaatattataatgattatggagatattattaaggaaactatgtcgaaaactcggcagatcgacaaaattcagtgcgccaaaacattgatactctcactgcagcagttgttcaatgagatgattcaggaaaatggatacaactttgacaggagctcttctaccttctccggtattaaagagcttgcaagacgctttgcccttacatttgggttagatcagctgaagactcgggaggcaattgcaatgctccataaagacggaattgaatttgccttcaaagaaccaaatcctcagggagagtcccaccctcccctgaacctggcgttcctcgatatactatctgagttcagctccaaattgttacggcaggataaacgaaccgtgtatgtttacctcgagaaattcatgaccttccaaatgtctctccgccgggaagatgtgtggttaccgctgatgtcctaccggaatagtctcctggcagggggggacgacgacaccatgagcgtgatctcaggtatctcgtcaaggggctcaacagtaagaagcaagaaatccaaaccatccacggggaagaggaaggtagtggaaggtatgcagttatcacttactgaagagagttcatctagcgactcaatgtggctctctcgggagcaaacgttgcatacacccgtgatgatgcagacaccacaactcactagcacaattatgcgggagccaaagagactgcgcccagaggattccttcatgtcagtgtaccccatgcagaccgagcaccaccagaccccactggactataaccgacgggggacatctctgatggaggatgacgaggagcctatcgtggaagatgtcatgatgagtagcgagggacgcatcgaagatctgaacgaaggcatggatttcgatacgatggacatcgacctgccaccatccaagaaccggcgggagagaaccgagctcaaacctgatttttttgatcctgcctcgatcatggatgagagcgtgcttggtgtgtccatgttttag

SEQ ID NO: 101209 - DNA, 3696 bp, Artificial Sequence
  derived and/or modified sequence
atgatcgccgcccccgagatccccaccgacttcaacctgctgcaggaatccgagacacactttagctctgacactgactttgaagatatagaaggcaaaaaccagaagcaagggaagggcaagacctgtaaaaagggaaaaaagggcccagcggaaaaagggaaaggaggtaatggcggggggaaacctcctagcggcccaaatagaatgaacggccaccaccagcaaaacggcgtcgaaaacatgatgctgttcgaagtcgttaagatgggtaaatctgccatgcagagtgttgtcgatgactggattgagtcttacaagcatgaccgcgacatagcattgctggacctcatcaactttttcattcagtgctccggctgtaagggtgtggtcacagccgagatgtttagacacatgcagaacagtgaaatcattaggaagatgaccgaggagttcgatgaagactctggagattatcccctcacgatggctggaccacaatggaagaaattcaaaagtagtttttgtgaatttatcggcgtgctggtccgtcagtgccaatattccatcatttacgacgagtacatgatggacactgtcatttctctgttgactgggttgtccgactctcaggtgagggcattccgacacaccagcactctcgctgctatgaaactgatgaccgccctcgtaaatgtcgccctgaatcttagcatcaacatggataatacccaacgccagtacgaggctgaaagaaataagatgattggcaaaagggcaaacgagcgtctggaattactgctacaaaagaggaaggagctgcaggagaatcaggatgaaattgagaatatgatgaacgctatctttaaaggagtatttgtccatcgatatcgtgatgctatcgccgagattagagccatctgtatcgaagagattggaatctggatgaaaatgtacagcgatgcattcctcaatgactcttacctgaagtatgtcggttggacaatgcacgacaaacagggggaggtcagacttaagtgccttaccgccttgcagggcctgtattacaacaaagagctgaattccaaattggagctgttcacatcgcggttcaaggataggatcgtgtcaatgacgcttgataaagagtacgacgtggctgtgcaagctattaaactgctcactcttgtcctgcagtcttcggaggaggtcctcaccgccgaggactgcgaaaatgtttatcacttagtttattctgcacaccgtcccgttgccgtcgcagcaggagagttcctctacaaaaaattgttctccagacgggaccccgaagaagatggaatgatgaagcgcaggggtcgccaaggcccgaacgccaacctggtcaaaacacttgtatttttctttctggagtctgaactgcatgagcacgcagcctatttagtagatagtatgtgggactgcgccacagagcttcttaaagattgggagtgtatgaactctcttctgctagaagagcctttgtccggagaggaggctctgacagaccgccaggaatctgcactgatagaaatcatgttgtgtacaattaggcaggcggccgaatgccaccctccagtggggcgagggacaggaaagcgcgtacttaccgccaaagagaagaaaacccagctagatgatcgtaccaagatcactgagctctttgccgtggccctaccccagttacttgcaaagtattctgtggacgctgagaaagtgactaatcttctccagttgccacagtacttcgacctggaaatatacactaccggcagattggaaaaacacctagatgccctgcttcgacaaatccggaatatagtggagaagcatactgacacagacgttcttgaggcctgtagcaagacctaccacgctctttgcaacgaggagttcacgatcttcaaccgggtggatatcagccgctctcagctgatcgacgaactcgccgacaaatttaatcgcctccttgaggacttcttacaagagggcgaagagccagacgaggacgacgcttaccaggtcctctcgacgctgaaaagaatcacagctttccataatgctcacgacttgtcaaaatgggatctgtttgcctgtaactacaaattacttaagacaggcattgaaaacggcgacatgccagagcagatagttatccacgccctgcagtgtacacactacgtgatcctgtggcagctggctaagataactgaaagctcctcaactaaggaggacctgttgagactcaaaaagcagatgagagtgttttgccagatctgtcaacattacctcaccaacgtgaacactacggtcaaagagcaggcattcacgatcctatgcgacatcctgatgattttttctcaccaaataatgagcggtggacgcgacatgctcgagcccttagtctacacgcctgacagttctttgcagagcgaactgttgtcattcatcctggaccacgtatttatcgagcaggatgatgacaataactcagctgatgggcagcaagaggatgaggctagcaaaatagaggccttgcataagaggaggaatctactggcagccttctgcaagctgatcgtgtacacggttgtggagatgaacacggctgccgatattttcaagcagtatatgaaatactataacgactacggggacattattaaggaaacaatgtcgaagacgagacaaattgataagattcagtgcgctaagactctaattctgtctttacagcagctgtttaatgaaatgattcaggagaacgggtacaatttcgaccgcagtagctccacttttagtggaatcaaagaacttgcccgccgattcgccctgacctttggacttgatcagttaaaaacacgtgaggcaattgctatgctccacaaagatggtatagagtttgcttttaaggagcctaaccctcagggcgagtcccacccacctctcaatctggcattcctggacattctctctgaattctcttctaaacttctgcgccaggataagagaacagtgtatgtgtatctcgaaaagtttatgaccttccagatgtccctgcgaagggaggacgtttggttgccactgatgtcttaccgcaattccctgctggccggtggcgatgatgacactatgtccgtgatcagcggtataagcagcagaggttctactgtgcggagcaagaaaagtaagccaagcaccggcaaacgtaaggtcgtggagggcatgcagctgagcctcacagaggaatctagttccagcgactctatgtggctgtcacgggagcagaccctgcatacccccgtgatgatgcagacaccgcaactcacatccaccattatgagggagcccaaacgtctgcgacctgaagattcttttatgtcagtgtaccccatgcaaacagagcatcatcaaacccccttggattataaccgcagaggaacgtccctaatggaggacgacgaggagcccatcgtggaggacgtgatgatgtcgtccgaaggacgaatagaggacttgaatgaggggatggattttgataccatggacatagatctgccgcctagcaaaaacagacgtgagagaactgaattgaagcctgacttttttgatcccgctagcatcatggacgaatcagtactcggagtctccatgttttag

SEQ ID NO: 101210 - DNA, 3696 bp, Artificial Sequence
  derived and/or modified sequence
atgatcgccgcccccgagatccccaccgacttcaacctgctgcaggagtcagaaacccactttagttcggatacagactttgaggacattgaagggaaaaaccaaaagcaggggaagggcaagacatgcaaaaagggcaagaaggggcctgctgagaaagggaagggtggcaatggagggggaaagcctccctccggcccaaaccggatgaatggtcaccatcagcagaatggggtcgaaaacatgatgttatttgaagtggtcaaaatgggcaaaagcgccatgcagagcgttgtggatgactggatcgaatcctacaagcatgatagagatatcgcattacttgatcttatcaatttcttcatccaatgtagcggctgtaagggagtggtaacggcggaaatgttccggcatatgcagaactctgagattattcgcaagatgacagaagaattcgatgaggatagtggggactatccacttaccatggcaggcccacaatggaagaagtttaagagctccttctgcgagtttattggagtgctggtacgacagtgccagtatagtattatttatgatgagtatatgatggataccgttatcagtctgctcactggactctctgattcccaggtgcgtgcgttccgccatactagcactctcgccgccatgaaacttatgaccgctttagtcaatgtggctttgaatttatccatcaatatggataacacccagcggcagtacgaagcagagagaaataagatgattggcaaacgcgcaaatgaacgcctggaattactgctgcaaaagagaaaggagcttcaggagaaccaagatgaaatcgaaaatatgatgaacgctatctttaagggtgtattcgtccaccggtaccgtgatgcgattgcagaaatacgtgctatctgcatcgaggagatcggcatctggatgaagatgtattctgacgcatttcttaatgacagttacttgaaatacgttggctggaccatgcacgataagcagggcgaagtgaggttaaagtgcctgaccgcattgcaaggcttgtattacaacaaggaattgaactctaaactggagctcttcacctcgaggtttaaagatcggattgtatcaatgaccttggataaggagtatgacgtggccgtacaggcgatcaagctccttaccctagtgctgcagagcagcgaagaggtcctgaccgctgaggattgcgaaaatgtctaccatttggtttattcagcacataggcccgtcgctgtcgcagccggggagttcctgtataagaagcttttctcaaggcgcgacccagaggaggatggtatgatgaaacgccgggggcgacagggtccgaacgccaacctggtgaagaccctggtgtttttttttctcgagtctgaacttcatgaacacgctgcctaccttgtggatagcatgtgggactgtgctaccgaactgcttaaggactgggaatgcatgaattcgttgttactggaagaaccactgtcaggcgaagaggccctgactgaccgccaggagtcggcactgatcgagattatgctttgtacaattagacaagccgccgaatgtcatcctcctgttggcaggggtactggaaagcgcgtgttaacagccaaagaaaaaaagactcaactcgacgatcggaccaaaattacagagctatttgcggtggccctgccacagttgcttgccaaatactctgtagatgccgaaaaggtcacaaatctgttgcagctacctcagtattttgaccttgaaatttatacaacaggccgcctggagaaacatctcgacgcattgctcaggcagattaggaatatagtggagaagcatactgatactgacgtgctggaggcctgctccaaaacataccacgctctgtgcaatgaagagttcactatctttaaccgtgtggatatttcaaggtcgcaactgatcgacgagctcgctgacaagtttaatcgcctgcttgaagattttttgcaggaaggcgaagagcccgatgaggatgacgcctaccaggtgttgagcacattgaaacggatcactgcatttcataacgcccacgacctgagcaagtgggacctctttgcctgtaattataaattactaaagacaggaattgaaaatggagatatgcccgaacagattgtgatccacgccctgcagtgcacccattacgtgatcttgtggcaactcgccaaaatcactgagtcttcctctacaaaggaggacctgttgcggctaaagaagcagatgcgcgtattctgtcagatctgccaacactatttaaccaatgtcaacactacggtcaaggaacaggcattcactattctctgtgacatcctcatgatattttctcaccagattatgtcaggtggaagggatatgctcgaaccactggtgtatacacccgattcatcactccaatctgaactactctcttttatactggaccacgtgttcatagagcaggatgatgacaacaatagtgccgatggtcagcaggaagatgaggcatccaagattgaggcactgcataagaggaggaacctgctggcagcattctgtaagctgatcgtgtatactgtggtggaaatgaatacagcagccgacatttttaagcagtatatgaaatactacaacgattatggtgatattattaaggagaccatgtcaaaaaccagacagattgacaagatccagtgcgctaaaacactgatattgtctctgcaacagctgttcaatgagatgatccaggagaatggatacaatttcgaccggagctcctctactttctctggaatcaaggagctggctcggaggttcgctttaaccttcggcctggaccagcttaaaacacgagaagctatcgcaatgctgcataaagatggcattgagtttgctttcaaggaacctaatccccagggggagtcgcatccgccccttaacctggccttcctagacatcctgtctgagttctcgagcaagctcctgagacaggataaaaggactgtgtacgtgtacctggaaaaattcatgactttccaaatgagtctacgccgggaagacgtctggttgcccctgatgtcataccgtaacagtctcctggccgggggcgatgacgacaccatgtccgtgatatctggcattagtagcagaggttcgactgtgcgatccaaaaagtctaaaccttctactggaaagcgcaaggtagtggagggcatgcagctgtcgctaactgaggaatcttccagcagcgattcaatgtggctgtcccgtgaacagacactacacacaccagtcatgatgcagacccctcagcttacgagtactattatgcgagaacctaaacgcctgcgcccagaggactcttttatgagcgtttatccaatgcaaaccgagcaccatcagacccccctggactataatcgccgtggtacctccttaatggaggacgacgaggagcctattgttgaagatgtgatgatgtcttctgaagggagaatcgaggacctgaacgaaggtatggattttgacactatggacatagacctgccacctagcaaaaatcgcagggaacgtaccgagctcaaacccgatttcttcgaccccgcaagtattatggacgaatctgtgttgggcgtttcaatgttttag

SEQ ID NO: 101211 - DNA, 3696 bp, Artificial Sequence
  derived and/or modified sequence
atgatcgccgcccccgagatccccaccgacttcaacctgctgcaggagagcgaaactcatttcagttctgacactgatttcgaggatatcgaaggcaaaaatcagaaacagggcaaggggaagacatgcaagaaggggaaaaaaggccccgcagaaaagggcaaaggagggaatggagggggcaagccgccttccgggccgaatagaatgaatggccaccaccagcagaatggggtcgaaaacatgatgttattcgaggtggtgaagatgggaaagagcgccatgcaaagtgttgtggatgactggatcgagtcctataagcatgatcgggatatcgccttactggacctgataaacttcttcatccagtgttccgggtgcaaaggggtagtgaccgccgaaatgttcaggcatatgcagaattcggagatcatccgtaaaatgaccgaggagttcgacgaggatagtggagattaccctctgaccatggccgggccacagtggaaaaaatttaaatcaagcttctgcgagttcatcggagtcctagttcggcagtgccagtatagtatcatttacgatgagtacatgatggacacagtgatttctttactgacaggactttctgacagtcaggtcagggcctttagacatacatcaacgttagccgcgatgaaactgatgactgcactcgtgaatgtcgccttgaacctgtccattaacatggacaacacacagagacagtatgaggcagaaaggaataagatgattggcaaaagggctaacgagaggctagagctcttgctgcagaagcgaaaagagttgcaggaaaaccaagacgagatcgaaaatatgatgaacgcgatctttaagggggtgttcgtgcaccgctacagagatgccatagcggaaatcagagcaatctgtatcgaagagatcggtatttggatgaaaatgtacagcgacgcgttcctcaacgattcctatctaaaatacgtcggatggacaatgcatgataaacagggggaggttcgtctgaaatgtcttactgccttgcagggcctgtactacaacaaggagctaaatagcaagcttgaactattcacgtcccggtttaaagatcgcatagtgtccatgacactcgataaagagtatgatgtggccgtgcaggcaatcaaactgcttacgctggttctacagtcttcggaggaagtccttacagcggaggattgtgaaaatgtgtatcatctagtatacagcgcccaccgacccgtagccgtagcagcaggggaattcctgtacaagaagctgtttagtcggagggaccctgaggaggatggtatgatgaaaagacgaggtcggcagggccccaacgccaacctggttaaaaccctggtctttttttttctcgaatcagaactgcatgagcatgcagcatacctcgtggactctatgtgggattgtgcgaccgagcttctgaaagattgggagtgtatgaactcactcctgctggaggaacccctgagtggtgaagaagctcttaccgatcggcaggaaagcgcattgattgagatcatgctgtgcacaattcggcaggcagcagagtgtcatccacccgttggccgggggaccggtaaaagagtgctgactgctaaagagaagaagacccaattggacgacaggacaaagataactgaattatttgccgttgcgctgccccagctactggctaagtattctgtcgatgctgaaaaagttacaaatcttctgcaattgccccagtacttcgatctggagatctataccaccggaagattagaaaaacaccttgacgcattgctccgccagatccggaacattgttgaaaagcataccgatactgatgtgctggaagcctgttccaagacgtatcatgccctttgcaatgaagagtttaccatttttaatcgggtggacattagtagaagccagctgatcgatgaactggcggacaaattcaaccggctgctggaagatttcctgcaggaaggagaggagcctgatgaagatgacgcctaccaagttctcagtacactgaagcgcattactgcttttcataacgcccacgacctctcaaagtgggatctctttgcgtgtaattataagcttttaaagacagggattgagaacggtgatatgcctgagcagattgtcattcacgcgctacagtgtactcactacgtcatcttgtggcagctcgctaagataaccgaatcttcctccacaaaagaagacctgctgcggctaaagaagcagatgcgagtattttgccaaatttgccagcattatctcaccaatgtgaacaccacagtcaaggagcaggctttcactattctctgcgatatactcatgattttctctcaccagatcatgagcggggggcgggatatgctggaacctctggtttacacgcccgatagctctttgcagagcgagctgctgtcctttatcttggaccacgtattcattgagcaggatgacgacaataactccgcagatggacaacaagaagacgaagcttccaagatagaagctctgcacaagcggaggaacctactggccgcattctgcaagttgatcgtgtatactgttgtggaaatgaacactgccgctgatatctttaagcagtacatgaagtattacaacgattacggagatatcatcaaagagacgatgagcaagacccgccagatcgacaaaatccagtgcgcgaaaacccttatattgtcacttcaacagctgttcaacgagatgatccaagaaaacggatacaatttcgacagaagtagttcgacatttagtggaattaaagaactggcacgacgcttcgccttaacattcgggctggaccagctaaaaacaagagaggcaatcgctatgttgcacaaggatggcatcgagtttgcatttaaggaaccaaacccgcagggagaatcacaccccccattaaatctggcttttctcgacattctcagcgaattctcatctaagcttctgagacaggacaagaggacagtttacgtgtatctagagaaattcatgacatttcagatgagtctgcgccgagaggatgtgtggctccccctgatgagctaccgaaacagtctgctagccgggggggatgatgataccatgagcgttatcagcgggatttccagccgggggagtacagtgcgatcaaagaaatccaaaccctcaaccggaaaacgtaaggtagtcgagggtatgcagctgtcactaacggaggagagctcaagtagtgatagcatgtggctcagcagggagcagacgctacacacccccgtgatgatgcagacccctcagctaacatctactatcatgagagagccaaaacgcctcaggccagaggatagtttcatgagcgtgtacccgatgcagacagagcatcatcagacccccctggattacaaccgtcgagggactagcttaatggaggacgacgaggaaccaatcgtagaggacgtgatgatgtcatccgaggggaggatcgaagacttgaatgaaggcatggacttcgacactatggatatcgatctgcctcctagcaaaaaccggcgcgaacgaacagagttgaagcccgattttttcgaccctgccagtatcatggacgaatcagttctgggcgttagcatgttctag

SEQ ID NO: 101212 - DNA, 213 bp, Artificial Sequence
  derived and/or modified sequence
atgatcgccgcccccgagatccccaccgacttcaacctgctgcaggagtctgagactcactttagctctgacaccgactttgaggatatcgaggggaagaatcagaagcagggaaaagggaaaacttgtaaaaaaggtaagaaagggcccgcggagaaagggaaaggagggaacggcggaggtaagccccctagcgggccgaatagaatgtag

SEQ ID NO: 101213 - DNA, 348 bp, Artificial Sequence
  derived and/or modified sequence
atgatcgccgcccccgagatccccaccgacttcaacctgctgcaggaatctgaaacccacttttcatcagatactgatttcgaagatatagaggggaaaaatcagaaacaggggaaaggcaaaacatgcaaaaaagggaagaaaggccccgccgagaagggtaagggcgggaacggcggcggcaaacctccctctgggccaaataggatgaacgggcatcaccagcaaaatggggtggagaatatgatgcttttcgaggtggtgaagatgggcaagagcgctatgcagtccgtagttgatgattggatcgaatcatataagcatgatcgtgatattgccctcctgtag

SEQ ID NO: 101214 - DNA, 510 bp, Artificial Sequence
  derived and/or modified sequence
atgatcgccgcccccgagatccccaccgacttcaacctgctgcaggagagcgagactcattttagctccgacactgattttgaggatatcgaagggaaaaatcagaagcagggcaagggaaagacatgcaaaaaaggcaaaaagggccctgccgaaaaaggcaagggtggcaatggaggcgggaagcccccgtctggccctaacaggatgaacggccaccaccaacaaaatggagttgaaaatatgatgctattcgaggttgttaaaatgggcaaatcagctatgcaatccgtcgttgacgactggatcgagtcgtacaagcatgatcgtgacattgcgctcctcgaccttatcaacttcttcattcagtgctccggttgtaaaggcgtcgttactgctgaaatgttcagacacatgcagaactcagaaatcatcagaaagatgacagaggagtttgatgaggactccggggactaccctctgaccatggccggacctcagtggaaatag

SEQ ID NO: 101215 - DNA, 465 bp, Artificial Sequence
  derived and/or modified sequence
atgatcgccgcccccgagatccccaccgacttcaacctgctgcaggaatccgagacacatttctcctccgataccgactttgaggacattgaagggaagaatcagaaacaagggaagggaaaaacgtgcaagaaaggtaagaagggacctgcagagaaggggaagggagggaatggtgggggcaaacccccttccggcccgaaccggatgaatggccatcatcagcagaacggcgtcgaaaacatgatgctgttcgaggtcgtgaagatgggaaagtccgctatgcagtctgtagtagacgactggattgagagttacaagcacgacagagacattgcactccttgacctgatcaacttttttattcaatgcagtgggtgtaaaggcgtcgtcaccgccgaaatgttcagacacatgcagaactctgagatcattagaaaaatgacagaggagtttgatgaatag

SEQ ID NO: 101216 - DNA, 627 bp, Artificial Sequence
  derived and/or modified sequence
atgatcgccgcccccgagatccccaccgacttcaacctgctgcaggaatctgagacgcacttttctagcgacaccgatttcgaagatattgagggcaaaaaccagaaacagggaaagggaaagacctgtaagaaaggtaagaagggacccgctgagaaaggcaaggggggcaacggaggaggtaagcctccgagcgggcccaaccgcatgaatggacatcaccagcaaaatggggttgaaaatatgatgctcttcgaagtggtgaaaatgggtaaatccgccatgcagtctgtcgtggatgattggatcgaaagttacaagcacgatagagatattgctttgctggatctgattaatttcttcatccaatgctccgggtgcaagggggttgtgactgcagagatgtttcgccacatgcagaactcagaaatcattcgtaaaatgacagaggaattcgacgaggattcgggagactatcctctcactatggccgggcctcagtggaagaagttcaaatctagcttctgcgagttcataggtgtactggtcaggcagtgtcagtactcaattatctatgatgagtatatgatggatactgttatcagtcttctgaccgggctgtcatag

SEQ ID NO: 101217 - DNA, 3489 bp, Artificial Sequence
  derived and/or modified sequence
atgaatgggcatcaccagcagaatggagtcgagaatatgatgctgttcgaggtagtgaaaatgggcaaatcggctatgcagtcagtggtggacgattggatagagtcttacaaacacgaccgagacatcgccctcctagacctcatcaacttcttcatccagtgtagcggctgtaagggcgttgttacagctgagatgttccgacacatgcaaaactcggaaataatcagaaaaatgaccgaggagtttgacgaggactctggagattacccactgacgatggccggaccccaatggaagaaatttaaatcctctttttgcgagttcatcggagtgcttgttcgtcaatgccagtactctatcatctacgatgaatacatgatggatactgttatcagccttctcactggactcagtgattcccaagtccgcgcttttcggcatacctcgaccctggctgctatgaaactgatgacggccttagttaatgtcgccctgaatctgtctattaatatggataacacacaaaggcagtatgaagctgaacggaacaagatgattggaaagagagcgaatgagcgtctcgagctgctgctgcagaagagaaaggagctgcaggagaaccaggacgaaatcgagaatatgatgaacgcaatcttcaagggagttttcgtccatcggtacagggatgccattgcagagattcgcgctatctgtatcgaagagataggtatttggatgaagatgtactctgacgcgttcctaaacgattcttaccttaaatatgtggggtggacaatgcacgacaaacaaggagaagtgcggcttaagtgcctcacagcgctccaaggactctactacaacaaagagctgaactccaagctggagctgtttacctctaggttcaaggatcggatcgtgtccatgactctcgacaaagaatatgacgtggccgttcaagcaattaagctcctgacactggtgctgcagtcatccgaggaggttctgaccgccgaagattgtgagaatgtataccaccttgtgtacagtgcccacagaccggtcgccgtggccgctggggaattcttatataagaaattgttctcaagaagagatccggaggaagatggaatgatgaagcgccgaggccgtcagggcccaaatgccaatctcgtgaagacgctggttttcttcttcctcgaatccgaactccacgagcatgccgcatatctggtagactctatgtgggattgcgctacagagctgctcaaggactgggaatgcatgaacagcttattgctggaagagcccctgtccggagaagaggccctcactgatcgccaagagtctgctctcattgagatcatgctgtgcactatcagacaggcggcagaatgccatccaccggtcggaagagggactggtaaacgggtgctgaccgctaaagagaaaaagacacaactggacgatcgtactaaaattacagagctctttgcagtggcactacctcaacttttagctaaatactctgtggatgccgaaaaggtgactaatctgcttcaactgccccagtacttcgacctcgagatttacactacgggtcggttagagaaacatctggacgctctgcttagacagatccgcaacatcgttgaaaaacacaccgacaccgatgtgttggaagcctgttctaagacttatcatgccctgtgtaacgaagagtttaccatcttcaatcgagtggacattagtcgatcacagctgatcgacgagctggctgataagtttaataggctgctcgaggactttctgcaggagggggaggagccggacgaggatgacgcatatcaagtcctgtcaacactgaagaggattacggctttccataatgctcacgacctgtccaaatgggatctgttcgcatgtaactacaagcttctgaaaacagggatcgagaatggtgacatgcctgagcaaatcgtgattcatgcattgcaatgcactcactacgttatcttgtggcagttagcgaaaataactgagagctcttctaccaaagaagatttattgcgattaaagaagcagatgcgagtgttctgccagatctgtcagcactacctgactaatgtgaatacgaccgtcaaggaacaagcctttaccatcctctgcgacattctaatgatctttagtcaccagatcatgtccggaggacgggatatgttagagcccttggtctatacaccggatagcagccttcagtccgagttactttcttttatcctcgatcatgtctttattgagcaggatgacgataacaattccgcagacggccaacaggaggacgaggccagtaagatcgaggcactccacaaaagaaggaatctgttggctgccttttgcaaactcattgtctatactgtggtggagatgaacacggccgctgacatctttaaacaatatatgaagtactacaacgattacggcgacattataaaggagacaatgagcaagacgcggcaaattgacaagatacagtgcgccaaaacactgattctctcattgcagcaattgttcaacgagatgatccaggagaacgggtacaactttgaccggagttcttcgactttcagtggcattaaagagctggctcggagatttgcactcacatttggactggaccagcttaaaacacgggaggctattgccatgcttcacaaggatggcatcgaatttgcatttaaggagcctaatccccagggggagtctcacccaccactaaacctggcatttctggacatcctgtctgagtttagctcaaaactcttgcgccaggataaacgcacggtatacgtatatttggagaaatttatgacatttcaaatgtctctgagacgcgaggacgtgtggctgccactcatgtcataccggaattctctgctggccggaggcgacgatgacaccatgtcagtgatttctggcatatctagcagaggatccacagtgcgctcaaaaaagagcaagccctcgaccggcaagcgcaaagtggtggaaggcatgcagctgagtttaactgaggaaagttcttcctctgattcaatgtggctgagtcgagagcagaccctgcacactcctgtcatgatgcagaccccccagctgacgtcgactatcatgcgggaaccaaagcggctgcgacccgaagactccttcatgtcagtctacccgatgcagactgagcaccaccaaaccccgctcgattacaacagacggggaacttcactgatggaggacgatgaggagcctattgtcgaagatgtgatgatgtcctcagaaggccgtattgaagacctgaacgaaggtatggattttgacactatggacattgatctacctccttccaagaacagacgagagcgaacagaacttaaacctgattttttcgaccccgctagcatcatggatgagtctgtcctgggcgttagtatgttctag

SEQ ID NO: 101218 - DNA, 3696 bp, Artificial Sequence
  derived and/or modified sequence
atgatcgccgcacccgagattcctactgacttcaatctgttacaggaatctgagacgcatttctcgtcggataccgacttcgaggacattgagggaaagaatcaaaagcaggggaagggcaaaacttgtaaaaaggggaagaagggtccagccgagaagggcaagggcggtaatggaggcggtaagcccccaagcggacctaatagaatgaatggccatcaccagcagaacggcgtggaaaatatgatgcttttcgaagtcgtcaagatgggcaagtctgccatgcagtctgtggtagacgactggatcgagtcttataaacacgatcgggacatcgcactccttgacctgatcaatttttttatccagtgtagcggctgtaagggggtggtcaccgccgagatgttccgccatatgcagaattccgagatcatcaggaagatgaccgaagagtttgacgaggacagtggggactaccccctgacaatggctgggcctcaatggaagaagtttaagagctctttttgcgaattcattggcgtactcgtgcgccagtgccaatatagtataatctacgatgaatacatgatggataccgtgatttccctactcactggattaagtgatagccaggtgcgcgcattccggcatacttcgacgcttgctgctatgaaactaatgacagctttggtaaatgtcgctctgaatctaagcataaatatggacaatactcagaggcagtacgaggccgaacggaataagatgattggcaaacgggctaatgaaagactggagctgctcctgcagaaaagaaaagagctgcaggagaatcaggatgaaatcgagaatatgatgaatgcgattttcaagggcgtgtttgtccacagatatagagacgcgattgcagaaatccgggcaatctgtatcgaagagattggaatttggatgaagatgtactctgacgccttccttaatgactcttacttaaagtacgtgggatggactatgcacgataagcaaggtgaggttcggctaaagtgtctcacggcccttcaaggactctactataacaaagagctcaactctaagcttgagctgttcactagccggtttaaagacagaatcgtaagcatgacacttgacaaggagtacgacgtggccgtgcaagccatcaagctgctcactctcgtgctccagtcctccgaagaggtgctgactgccgaggactgtgagaacgtgtatcacctggtgtacagtgcccaccggccagtggctgtggcggcaggcgagtttctatataaaaaacttttctcacgccgagacccggaagaggatggaatgatgaagagacgcggaaggcagggccctaacgccaacttggtgaaaacccttgttttctttttcctcgaatctgaactccacgaacacgcagcatatttagttgattcaatgtgggactgtgctactgagctactgaaagactgggaatgcatgaactctctgctcctggaagaacctctatctggcgaggaggctctaaccgacagacaggaatccgccctcatcgagatcatgctgtgtacaatcaggcaggccgcagagtgtcacccacccgtagggcgaggcacagggaaacgcgtgctgaccgccaaggaaaagaagacacagctggacgacaggacaaaaatcacagagctgttcgcagtggctttgccacaactgctggccaagtattctgtagacgccgagaaggtgaccaacctactccagctcccccagtatttcgatctggagatttatacaaccggaaggctggagaagcacctggatgcgctccttagacagattcgaaacatcgtggaaaaacataccgacactgatgtgctggaggcatgctcaaagacttatcacgctctctgcaatgaagagttcaccattttcaacagggtggacatcagccgtagtcaactgatcgacgaacttgccgacaagttcaatcgacttctggaagactttttacaggagggtgaggaacctgatgaggatgacgcataccaagttctgtccacccttaaacgaataacggccttccataatgcacatgatctaagcaaatgggatctgtttgcctgtaactataaacttttaaagactgggattgagaacggggacatgcccgaacaaatcgtgattcacgcgctccagtgcacgcactatgtgattctgtggcagttggccaagattacggaatcctctagcactaaggaggatttactccgactgaagaagcagatgcgagtattctgtcagatttgccagcattacttaactaacgtgaacactactgtgaaggagcaggcctttaccatcttgtgcgacatcctcatgatattcagtcaccagattatgagtgggggtcgcgacatgttagaacctcttgtctatacaccggactcgtctttgcagtctgaacttttgagcttcattctggatcacgtattcatagagcaggacgatgacaacaactcagccgatggacagcaggaagacgaagcctccaagatcgaggccctccataaacgccgaaacttattggctgcattctgcaagctcattgtctataccgtagtggagatgaataccgccgcagatatcttcaagcagtacatgaagtattacaatgactatggcgatataatcaaggagactatgtcaaagacaaggcagattgataagattcagtgtgctaaaaccctgatcttgtccttacagcagttgtttaatgagatgattcaggagaacgggtataatttcgatagaagtagctcaacattctctggcatcaaggaactcgccaggcgttttgccctgacttttgggctggatcagcttaaaacaagagaagcgattgcaatgctccataaagatggtatagagttcgcttttaaggaacctaacccacagggcgaatcccacccacctctaaacctggcgtttttggatatcctgagtgaatttagcagcaagctgcttcgccaggacaaaagaacagtgtacgtgtatctagaaaagttcatgacctttcaaatgtccctgcgaagggaggatgtctggctgccactcatgtcctacagaaactccctactggccggaggagacgatgatacgatgagcgtcatatcaggcatcagtagtcgtggctctaccgtccggagcaaaaagagcaagccttccacagggaagagaaaggtggtggaggggatgcaactgagtttgacagaggaaagctctagtagcgacagtatgtggctgtccagggagcaaactctgcacacgcccgtgatgatgcaaacacctcagctgacctctactattatgcgcgaacccaaaaggttacggcctgaggactcctttatgtctgtgtacccaatgcagaccgaacaccatcagactccactggactacaaccgcagagggactagtctcatggaggatgacgaggaacccatagtggaggacgtaatgatgtcctctgagggacgcattgaagatcttaacgaagggatggactttgacacgatggatatcgacttgcccccttcaaaaaatagacgcgaaagaaccgagttgaagccggattttttcgatccagctagcattatggacgaaagtgtgctcggcgttagcatgttttag

SEQ ID NO: 101219 - DNA, 3696 bp, Artificial Sequence
  derived and/or modified sequence
atgatcgcagcacccgagataccaaccgattttaatttgctgcaagagtccgaaacacactttagctcggacaccgacttcgaagatatcgaggggaagaatcagaagcagggaaaaggcaagacctgtaagaagggcaagaaaggcccagccgagaagggcaaaggagggaatgggggagggaaacctccctcaggtcctaaccggatgaatgggcaccaccagcagaacggtgtggagaacatgatgttgttcgaggtagtgaagatggggaaatctgccatgcagagcgtggtagatgattggattgaatcttacaaacacgatagggacattgcgctgcttgacttgatcaattttttcatacagtgttctgggtgcaaaggcgttgtaacagccgaaatgttccggcatatgcagaactctgaaattatcagaaagatgacggaagaatttgatgaagacagcggcgattatccactgaccatggccggtcctcagtggaagaaatttaagtcttcattctgcgaattcatcggtgtcttagtgcggcaatgccaatactcaattatttacgatgaatatatgatggacacagtcatctctctgctcactgggctctccgatagccaggtgcgcgcattccgacatactagtactctcgcggcaatgaagcttatgactgccctggttaatgtggcccttaatctgagtataaatatggataacacgcagcgccaatatgaggccgaacggaacaaaatgatcggcaagcgcgcaaatgagagactcgaactactgctgcaaaaaagaaaggagttgcaggagaaccaagatgaaatagaaaacatgatgaacgctatcttcaagggcgttttcgtccaccgctatcgagacgcaattgcagagattagagcgatctgcatcgaagaaattggaatctggatgaagatgtactcggacgcatttctgaacgacagttatctgaagtatgttggctggaccatgcatgacaaacagggagaagttaggctaaaatgtcttaccgctctacaaggactctattataacaaggagctaaatagtaagcttgagttgtttacctctcggtttaaggacagaatcgtgagtatgactctcgacaaagaatatgacgttgcagtccaggcaataaagctgctgactttagtgctccaaagctcagaggaggttctaacggcagaagattgtgaaaacgtgtaccatcttgtgtactccgcgcacagacccgtggccgttgccgctggggagttcttatataagaaactcttctcccgtagggacccagaggaggacggcatgatgaagagacggggacgacagggacccaacgcgaatctcgtgaaaactttggtgttttttttcctggagtctgaactgcatgaacatgccgcttaccttgtagactcaatgtgggattgcgctacagagctgctcaaggactgggaatgtatgaattccttactgctggaggaaccgcttagtggcgaagaagccctcacggatagacaggagagtgccctaattgagattatgttgtgtaccattcgccaggccgctgagtgtcacccgcctgttggacggggtactggcaagcgtgtcttgactgctaaagagaagaaaacgcagctggacgatcgcaccaaaataactgagctcttcgcagtcgccctgcctcagctccttgctaagtattcagtcgacgcagagaaagtgaccaatctgcttcagctcccccagtatttcgacctcgaaatttatacaactgggcgactagaaaaacacttggacgccctgcttagacagattaggaatattgtcgagaagcataccgacaccgatgtgctcgaggcatgttccaagacctaccatgctctttgcaacgaagaatttacgattttcaatcgagttgacatcagccgcagccagttaatagacgaactcgcagacaaattcaatcgactcctcgaggattttctccaggaaggtgaggagccagacgaggacgatgcctatcaagttctttctactctcaaacgaattaccgccttccacaatgctcacgatctgtccaaatgggacctgttcgcatgcaattacaaacttctgaaaacaggaatcgaaaacggggacatgccagagcagatagtgatacatgccttgcagtgtacacattatgtgatactatggcagctggcaaaaattactgaatccagcagcaccaaggaagatctcctgcgattaaaaaaacagatgagagtcttttgccaaatctgccaacattatttaacaaacgtgaacaccaccgtgaaagaacaggcctttacaatactatgtgatatcctgatgatcttcagccaccaaatcatgagcgggggtcgagatatgctggaacctctggtttacacccccgacagctcactgcagagtgagctcctctccttcatactcgaccatgtgtttatcgaacaagacgatgacaacaactccgccgacgggcagcaggaggatgaagccagcaagatcgaggccctgcacaagcgcaggaacctcctcgcagctttttgtaaactgattgtgtacacagtggtggaaatgaacacggcggctgacatcttcaagcagtacatgaagtattacaacgattacggggacattatcaaggagacgatgagtaagacacgacaaatagataaaatacagtgcgctaagaccttgatcctaagtctccagcagttatttaacgagatgatccaggagaatggctacaacttcgatcgctccagctccacctttagcggcatcaaagagctcgcgagaaggttcgctttgacttttggtttagaccagctgaaaactagagaggctatcgctatgctccataaggacggtatagaattcgctttcaaggagcctaacccccagggggaaagccatccccctctgaatctggccttcctggacattctgagtgaattttctagcaaattgctgcgacaagacaaaaggaccgtgtatgtgtacctagaaaagtttatgacctttcagatgtccctgcgcagagaagatgtctggctcccactgatgagctatagaaattctctgctggcgggaggcgacgacgataccatgtccgtcatttccgggatctcttcccgaggcagtacagtaaggagcaagaagtccaagccttctacaggcaagcgtaaagtggtggaaggcatgcagctctctctgactgaagagtcctctagctccgattcaatgtggctgtccagggaacagacactgcacactcccgtcatgatgcaaacacctcagctgaccagcacaattatgcgtgaacccaaacgtctgcggccagaggattcatttatgagtgtgtacccgatgcagactgagcaccatcagactccccttgattacaacaggagaggcacttccttgatggaagatgatgaagaaccaatagtagaggatgtcatgatgtcatctgaagggaggattgaggatctgaacgaagggatggatttcgacaccatggatattgatttaccacccagtaaaaatcggagagagcggacagagttgaagcccgatttctttgaccccgcttctattatggacgaatccgtgctgggggtgagtatgttttag

SEQ ID NO: 101220 - DNA, 3696 bp, Artificial Sequence
  derived and/or modified sequence
atgattgccgctcctgagatccccacggattttaaccttctgcaggaatcggagacgcatttctcctccgacacagacttcgaggatatcgaaggcaagaatcagaagcaaggcaagggcaagacctgtaagaaggggaaaaaggggccagccgagaagggaaaggggggaaatgggggaggtaagccgcctagtggtcccaaccgaatgaacggacatcaccaacagaatggcgtggagaatatgatgctgtttgaagtggtcaagatgggcaagtccgcaatgcagagtgtagtggacgactggatcgaaagctataaacatgacagggatattgcccttctcgatctcattaacttctttatccaatgctcaggctgtaagggcgtcgtgaccgctgaaatgttccggcatatgcaaaactctgaaattatccggaagatgaccgaggaatttgatgaggattcaggggattaccccctgacaatggctggcccacagtggaagaaattcaaatccagtttctgtgaatttatcggtgtactcgtacgccagtgtcagtattccatcatctacgatgagtacatgatggacaccgtgatttctttattgacggggctgtctgactcccaggtgcgggctttcagacacacttcaactttggccgctatgaagcttatgaccgcattagtgaatgtggcacttaacctttccatcaacatggataatacccagcgccagtacgaagcggagcggaataaaatgattggtaagagagccaacgaaagactggagctactgcttcagaaacgaaaggagctgcaagaaaatcaggacgagatcgagaacatgatgaatgccatttttaaaggagtgtttgtacataggtacagagacgccatcgcggaaatcagagcaatttgtatcgaggaaataggcatatggatgaagatgtatagcgatgcgttccttaacgactcctatctcaaatacgtagggtggactatgcacgacaaacagggggaagtgaggttaaagtgtcttactgcactgcaagggttgtattacaataaggagttgaactcaaagctagagctgtttaccagtagatttaaggatcgaatagtgtcaatgactctggataaggagtacgacgtggctgtgcaggcgattaagcttttgaccttggtcctacaatcaagcgaggaagtgctcaccgccgaggattgtgagaatgtgtatcatctggtgtacagcgcccatagacccgtggctgtagcggcaggcgagtttctctacaaaaaactgttcagcagacgcgaccccgaggaagacgggatgatgaaacggagaggtagacagggacccaacgctaatctcgttaaaacactcgtctttttcttccttgaatctgaactacatgaacatgctgcttacctggtcgacagcatgtgggactgtgccactgaactgctgaaagattgggagtgcatgaacagcctcctcctggaggagcctttaagtggtgaggaggctctgaccgatagacaggaaagcgcgcttattgaaatcatgctgtgtaccatcagacaagccgctgagtgccaccccccagtcgggaggggcacgggcaagagggtccttaccgccaaagagaaaaagactcaattggacgaccggacaaaaattaccgaactgttcgcggtggctctgccacaacttctcgcgaaatacagcgtggatgccgagaaagtgacgaatcttctccagctgccccaatattttgatctggagatctacaccaccggacggctggagaagcaccttgatgctctgctgcgtcagattcggaatatcgtcgagaaacacactgacacagatgtgctcgaagcctgctcaaagacataccatgcgctttgtaatgaagagttcactatttttaacagagtagacatttccagatcacagttaatagatgagctggcagataagtttaacaggctgttagaagattttttgcaggaaggagaagagccagatgaggatgacgcatatcaggtgctatcaaccctgaaaaggatcactgccttccataacgcccatgatttgtctaaatgggatctctttgcatgcaattataagctcctcaaaacaggaatagaaaacggtgatatgccggaacaaatcgttatccacgcccttcagtgtacccactacgtcattctgtggcagttggctaagatcactgaaagctcgagtactaaagaagacttgctgagactcaaaaaacaaatgcgagtgttctgtcagatctgccagcactatttaaccaatgtcaacacgactgtgaaagaacaggctttcactattttgtgcgatatcctgatgatcttttcgcatcagatcatgtcaggcggtcgggatatgcttgagccactagtctatacccctgactcaagcttacagtccgagctcctatccttcattctggatcacgtattcatcgaacaggacgacgacaataatagtgccgacggccagcaggaagacgaagcatccaaaatcgaggccttgcataaaaggcgaaatctactggctgcattttgtaaactgattgtctacaccgtggtcgagatgaataccgcagcagacatcttcaagcagtacatgaagtactacaacgactatggcgacatcattaaagagacaatgtccaagacgagacaaatagataagatccagtgtgcaaaaacactgattctctcgttgcaacagctttttaatgagatgatacaagaaaacggatataactttgatcgaagctcttccacatttagtggcatcaaagagctcgctcggaggttcgccctcactttcggccttgaccaactcaagactagagaggctatcgccatgctgcacaaggacggaattgaattcgcattcaaagaaccgaacccacaaggcgagtcccatccaccactgaatctagcttttctcgatatccttagcgagttctccagcaaactgttgaggcaggataaacggaccgtttatgtttaccttgagaaatttatgaccttccagatgagtcttcggagggaagacgtctggctgcctctcatgtcttaccggaattctctacttgcgggaggcgatgacgatacgatgtctgtcatcagcggtatctcttctcggggatccacagtccgttctaagaagagcaagccatctaccggaaagcggaaggtggttgaggggatgcaacttagcctaaccgaggaatcctcaagcagtgatagcatgtggctgtcccgtgagcagactctgcataccccagtgatgatgcagacacctcaattgacgtcaactatcatgcgagagccgaagcggctaaggccagaagattcctttatgagcgtgtaccctatgcagacagaacaccaccagactccattggactacaaccggagaggcacatctcttatggaggacgacgaagagcccattgtagaagatgtgatgatgtcctctgaagggagaatcgaggacttaaacgagggcatggatttcgatactatggacatcgacttgcccccttctaaaaacaggcgagaacggaccgaattaaagcctgatttcttcgaccctgcctctataatggacgagagtgtgctgggagtatctatgttttag

SEQ ID NO: 101221 - DNA, 213 bp, Artificial Sequence
  derived and/or modified sequence
atgattgccgcaccggaaattccgactgatttcaacctgctgcaagagtcagaaactcatttctcttccgataccgattttgaggatatcgagggaaaaaaccagaagcagggcaagggtaaaacatgtaagaaaggtaaaaagggtcccgctgagaaaggcaaaggtgggaatggcggtggaaaaccaccctccggccctaacagaatgtag

SEQ ID NO: 101222 - DNA, 348 bp, Artificial Sequence
  derived and/or modified sequence
atgattgctgccccagaaattccaacagatttcaacctgctgcaggagagcgagacccacttttcatctgataccgactttgaggatatcgaaggcaagaaccaaaagcaggggaaaggtaaaacgtgcaagaagggcaagaagggaccagccgaaaagggcaagggagggaacggtgggggaaaaccaccttctggtccaaacaggatgaacggtcatcaccagcagaacggggtggaaaacatgatgctgttcgaagtcgtcaagatgggaaaatcagcgatgcaaagcgtggtagacgactggatcgagagctataagcacgatagggacattgccctgctgtag

SEQ ID NO: 101223 - DNA, 510 bp, Artificial Sequence
  derived and/or modified sequence
atgatcgcagctccagaaatccctactgacttcaacctgttgcaggagtccgaaacgcacttctctagcgataccgactttgaggatatcgaaggcaagaaccaaaagcagggcaaagggaagacctgcaaaaaaggcaaaaaaggccctgcagaaaagggcaaaggcggaaacggcggagggaagcctccaagtggcccaaatcggatgaatggtcaccaccagcagaatggggtagagaacatgatgttgtttgaagtcgtaaagatgggaaaatctgctatgcagtccgtcgtcgacgattggattgagtcatacaagcatgacagggatatcgccctcttagatctgattaacttcttcattcagtgttctgggtgcaagggagtcgtaacggccgaaatgttcaggcatatgcagaatagcgaaatcatcagaaaaatgacggaggagttcgacgaggatagcggagactaccctctcacgatggcaggcccacagtggaagtag

SEQ ID NO: 101224 - DNA, 465 bp, Artificial Sequence
  derived and/or modified sequence
atgatcgccgctccagaaattcccacagattttaatctgctccaggagtcagagactcacttttcctctgacactgatttcgaggatattgagggaaaaaatcagaaacagggaaaggggaaaacctgtaagaaaggaaagaaggggccagccgagaagggtaagggagggaacggcggaggcaaaccccctagcggcccaaatcgcatgaacgggcatcatcagcaaaacggggttgaaaatatgatgctctttgaggtagtcaagatgggaaaatccgctatgcagagcgttgtggacgattggatcgagtcttacaagcacgaccgtgatatcgcgctcttggatctgatcaacttttttattcagtgcagcgggtgcaagggagtggtcacagctgagatgttccgtcatatgcaaaatagcgagattatcaggaagatgacggaagaatttgatgaatag

SEQ ID NO: 101225 - DNA, 627 bp, Artificial Sequence
  derived and/or modified sequence
atgatcgccgcacctgagataccaaccgattttaacctgctccaggagagcgaaacacacttcagctctgatacagatttcgaggacattgaaggaaaaaaccagaagcagggcaaagggaagacctgcaagaaggggaaaaagggcccagcggaaaagggaaaaggcggaaacggaggtggaaagcctccgagcggtcctaaccgaatgaatggccatcaccaacagaacggtgtcgaaaatatgatgctattcgaagttgtaaagatgggcaaatctgccatgcagagcgtggtcgacgactggatcgaatcctacaagcacgaccgtgacattgccctgctcgatctgattaatttcttcatccagtgctcaggatgcaaaggcgtcgtcaccgctgagatgtttagacatatgcagaattctgaaatcatcagaaagatgaccgaggaattcgatgaagactccggagattatcccttgactatggcaggccctcagtggaaaaagtttaagagctctttttgcgagttcattggggttctggtgaggcagtgccagtattcgattatttacgacgagtacatgatggacacagtgatctcattactgaccgggctgtcttag

SEQ ID NO: 101226 - DNA, 3838 bp, Artificial Sequence
  derived and/or modified sequence
aggcgaacagtctcgttgctgcctctgtgtacgctgaggggggaggaattgtcttagaagaaagaaggcaagccaccattttacccacgtaaatatatgaatatatttctgacattgaggtgttccagaagatgataaagaaatgatagcagctccagaaataccaactgattttaatctactacaggagtcagaaacacatttttcttctgacacagattttgaagatatcgaaggaaaaaaccaaaagcaaggcaaaggcaaaacttgtaaaaaaggcaaaaagggcccagcagaaaagggcaaaggtggaaatggaggaggaaaacctccttctggtccaaaccgaatgaatggtcatcaccaacagaatggagtggaaaacatgatgttgtttgaagttgttaaaatgggcaagagtgctatgcagtcggtggtagatgattggatagaatcatacaagcatgaccgagatatagcacttcttgaccttatcaacttttttattcagtgttcaggctgtaaaggagttgtcacagcagaaatgtttagacatatgcagaactctgagataattcgaaaaatgactgaagaattcgatgaggatagtggagattatccacttaccatggctggtcctcagtggaagaagttcaaatccagtttttgtgaattcattggcgtgttagtacggcaatgtcaatatagtatcatatatgatgagtatatgatggatacagtcatttcacttcttacaggattgtctgactcacaagtcagagcatttcgacatacaagcaccctggcagctatgaagttgatgacagctttggtgaatgtggcactaaatcttagcattaatatggataatacacaaagacaatatgaagcagaacggaataaaatgattggaaaacgagccaatgagaggctagaactcctgctacaaaagcggaaagagcttcaggaaaatcaagatgaaatagaaaatatgatgaatgcaatatttaaaggagtgtttgtacatagataccgtgatgcgatagctgaaattcgagctatttgcattgaagagattggcatttggatgaagatgtatagtgatgcctttcttaatgacagttatttaaaatatgttggttggactatgcatgataagcaaggtgaagtaagactcaaatgtcttactgctctacaagggctttattataacaaagagcttaattccaaactggaactttttaccagtcggttcaaggatagaattgtgtctatgacccttgacaaagaatatgatgttgcagtacaagcaataaaattactcactcttgttttacagagtagtgaagaagttctcactgcagaagattgtgaaaatgtctatcatctggtttattcagctcaccggccagtagcagtagcagctggagaatttctctacaaaaagctcttcagtcgtagagatccagaggaggatggaatgatgaaaagaagaggaagacaaggtccaaatgccaaccttgttaagacattggtttttttctttctagaaagtgagttacatgagcatgcagcataccttgtggatagcatgtgggactgtgctactgagctgctgaaagactgggaatgtatgaatagcttgttactggaagagccacttagtggagaggaagcactaacagataggcaagagagtgctctgattgaaataatgctttgtaccattagacaagcggctgaatgtcatcctcccgtgggaagagggacaggaaaaagggtgcttacagcaaaggagaagaagacacagttggatgataggacaaaaatcactgagctttttgccgtggcccttcctcagttattagcaaaatactctgtagatgcagaaaaggtgactaacttgttgcagttgcctcagtactttgatttggaaatatataccactggacgattagaaaagcatttggatgccttattgcgacagatccggaatattgtagagaagcacacagatacagatgttttggaagcatgttctaaaacttaccatgcactctgtaatgaagagttcacaatcttcaacagagtagatatttcaagaagtcaactgatagatgaattggcagataaatttaaccggcttcttgaagattttctgcaagagggtgaagaacctgatgaagatgatgcatatcaggtattgtcaacattgaagaggatcactgcttttcataatgcccatgacctttcaaagtgggatttatttgcttgtaattacaaactcttgaaaactggaatcgaaaatggagacatgcctgagcagattgttattcacgcactgcagtgtactcactatgtaatcctttggcaacttgctaagataactgaaagcagctctacaaaggaggacttgctgcgtttaaagaaacaaatgagagtattttgtcagatatgtcaacattacctgaccaacgtgaatactactgttaaggaacaggccttcactattctgtgtgatattttgatgatcttcagccatcagattatgtcaggagggcgtgacatgttagagccattagtgtatacccctgattcttcattgcagtctgagttgctcagctttattttggatcatgtcttcattgaacaggatgatgataataatagtgcagatggtcagcaagaggatgaagccagtaaaattgaagctctgcacaagagaagaaatttacttgcagcattttgtaagctaattgtatatactgtggtggagatgaatacagctgcagatatcttcaaacagtatatgaagtattataatgactatggagatatcatcaaagaaacaatgagtaaaacaaggcagatagacaaaattcagtgtgctaagacccttattctcagtctgcaacagctttttaatgaaatgatacaagaaaatggctataattttgatagatcatcctctacatttagtggcataaaagaacttgctcgacgttttgctttaacttttggacttgatcagttgaaaacaagagaagccattgccatgctacacaaagatggcatagaatttgcttttaaagagcctaatccgcaaggggagagccatccacctttaaatttggcatttcttgatattctgagtgaattttcttctaaactacttcgacaagacaaaagaacagtgtatgtttacttggaaaagttcatgacctttcagatgtcactccgaagagaggatgtgtggcttccactgatgtcttaccgaaattctttgctagctggtggtgatgatgacaccatgtcagtcattagtggaatcagcagccgggggtcaacagtacggagtaaaaaatcaaaaccatctacaggaaaacggaaagtggttgagggcatgcagctttcactcactgaagaaagtagtagtagtgacagtatgtggttaagcagagaacaaacactgcacacccctgttatgatgcagacaccacaactcacctccactattatgagagagcccaaaagattacggcctgaggatagcttcatgagtgtttatccaatgcagactgaacatcatcaaacacctcttgattataatcggcgtggcacaagcctaatggaagatgatgaagagccaattgtggaagatgttatgatgtcctcagaagggaggattgaggatcttaatgagggaatggattttgacaccatggatatagatttgccaccatcaaagaacagacgagagagaacagaactgaagcctgatttctttgatccagcttcaattatggatgaatcagttcttggagtgtcaatgttttaa

SEQ ID NO: 101227 - DNA, 4281 bp, Artificial Sequence
  derived and/or modified sequence
ttcatgtgacgggcccctctgcttctcccccgccccatcatctccagcgcgtggtgggggaactgctggggaaggcgattggcatcgatctctccatcccttccgaggcccgacttcggtggccaccgagtactaaattcacttgggaataaaagaaaaacataagaaaattataagagaaaggaattgtcttagaagaaagaaggcaagccaccattttacccacgtaaatatatgaatatatttctgacattgaggtgttccagaagatgataaagaaatgatagcagctccagaaataccaactgattttaatctactacaggagtcagaaacacatttttcttctgacacagattttgaagatatcgaaggaaaaaaccaaaagcaaggcaaaggcaaaacttgtaaaaaaggcaaaaagggcccagcagaaaagggcaaaggtggaaatggaggaggaaaacctccttctggtccaaaccgaatgaatggtcatcaccaacagaatggagtggaaaacatgatgttgtttgaagttgttaaaatgggcaagagtgctatgcagtcggtggtagatgattggatagaatcatacaagcatgaccgagatatagcacttcttgaccttatcaacttttttattcagtgttcaggctgtaaaggagttgtcacagcagaaatgtttagacatatgcagaactctgagataattcgaaaaatgactgaagaattcgatgaggatagtggagattatccacttaccatggctggtcctcagtggaagaagttcaaatccagtttttgtgaattcattggcgtgttagtacggcaatgtcaatatagtatcatatatgatgagtatatgatggatacagtcatttcacttcttacaggattgtctgactcacaagtcagagcatttcgacatacaagcaccctggcagctatgaagttgatgacagctttggtgaatgtggcactaaatcttagcattaatatggataatacacaaagacaatatgaagcagaacggaataaaatgattggaaaacgagccaatgagaggctagaactcctgctacaaaagcggaaagagcttcaggaaaatcaagatgaaatagaaaatatgatgaatgcaatatttaaaggagtgtttgtacatagataccgtgatgcgatagctgaaattcgagctatttgcattgaagagattggcatttggatgaagatgtatagtgatgcctttcttaatgacagttatttaaaatatgttggttggactatgcatgataagcaaggtgaagtaagactcaaatgtcttactgctctacaagggctttattataacaaagagcttaattccaaactggaactttttaccagtcggttcaaggatagaattgtgtctatgacccttgacaaagaatatgatgttgcagtacaagcaataaaattactcactcttgttttacagagtagtgaagaagttctcactgcagaagattgtgaaaatgtctatcatctggtttattcagctcaccggccagtagcagtagcagctggagaatttctctacaaaaagctcttcagtcgtagagatccagaggaggatggaatgatgaaaagaagaggaagacaaggtccaaatgccaaccttgttaagacattggtttttttctttctagaaagtgagttacatgagcatgcagcataccttgtggatagcatgtgggactgtgctactgagctgctgaaagactgggaatgtatgaatagcttgttactggaagagccacttagtggagaggaagcactaacagataggcaagagagtgctctgattgaaataatgctttgtaccattagacaagcggctgaatgtcatcctcccgtgggaagagggacaggaaaaagggtgcttacagcaaaggagaagaagacacagttggatgataggacaaaaatcactgagctttttgccgtggcccttcctcagttattagcaaaatactctgtagatgcagaaaaggtgactaacttgttgcagttgcctcagtactttgatttggaaatatataccactggacgattagaaaagcatttggatgccttattgcgacagatccggaatattgtagagaagcacacagatacagatgttttggaagcatgttctaaaacttaccatgcactctgtaatgaagagttcacaatcttcaacagagtagatatttcaagaagtcaactgatagatgaattggcagataaatttaaccggcttcttgaagattttctgcaagagggtgaagaacctgatgaagatgatgcatatcaggtattgtcaacattgaagaggatcactgcttttcataatgcccatgacctttcaaagtgggatttatttgcttgtaattacaaactcttgaaaactggaatcgaaaatggagacatgcctgagcagattgttattcacgcactgcagtgtactcactatgtaatcctttggcaacttgctaagataactgaaagcagctctacaaaggaggacttgctgcgtttaaagaaacaaatgagagtattttgtcagatatgtcaacattacctgaccaacgtgaatactactgttaaggaacaggccttcactattctgtgtgatattttgatgatcttcagccatcagattatgtcaggagggcgtgacatgttagagccattagtgtatacccctgattcttcattgcagtctgagttgctcagctttattttggatcatgtcttcattgaacaggatgatgataataatagtgcagatggtcagcaagaggatgaagccagtaaaattgaagctctgcacaagagaagaaatttacttgcagcattttgtaagctaattgtatatactgtggtggagatgaatacagctgcagatatcttcaaacagtatatgaagtattataatgactatggagatatcatcaaagaaacaatgagtaaaacaaggcagatagacaaaattcagtgtgctaagacccttattctcagtctgcaacagctttttaatgaaatgatacaagaaaatggctataattttgatagatcatcctctacatttagtggcataaaagaacttgctcgacgttttgctttaacttttggacttgatcagttgaaaacaagagaagccattgccatgctacacaaagatggcatagaatttgcttttaaagagcctaatccgcaaggggagagccatccacctttaaatttggcatttcttgatattctgagtgaattttcttctaaactacttcgacaagacaaaagaacagtgtatgtttacttggaaaagttcatgacctttcagatgtcactccgaagagaggatgtgtggcttccactgatgtcttaccgaaattctttgctagctggtggtgatgatgacaccatgtcagtcattagtggaatcagcagccgggggtcaacagtacggagtaaaaaatcaaaaccatctacaggaaaacggaaagtggttgagggcatgcagctttcactcactgaagaaagtagtagtagtgacagtatgtggttaagcagagaacaaacactgcacacccctgttatgatgcagacaccacaactcacctccactattatgagagagcccaaaagattacggcctgaggatagcttcatgagtgtttatccaatgcagactgaacatcatcaaacacctcttgattataatcggcgtggcacaagcctaatggaagatgatgaagagccaattgtggaagatgttatgatgtcctcagaagggaggattgaggatcttaatgagggaatggattttgacaccatggatatagatttgccaccatcaaagaacagacgagagagaacagaactgaagcctgatttctttgatccagcttcaattatggatgaatcagttcttggagtgtcaatgttttaataccagtacacaattaaatctgtggtgaagtcattttctaagtggaagaggaaattttaaagtgtggtagatacagtgaaattctgtacagatttttctctaaggagaatatgacatgcttatgcttaccaagatcaagtgcattgaggggcagttttgtttgcctgaataaacgtaaaggacaagtaaacaatttgatgataagctacagtttttcttagaaagtaaatattttatttatgcgctgttagttggcttttgaatcgattatttcatgcttttttttaaaaaaaaaaaaaaacaaa

SEQ ID NO: 101228 - DNA, 5991 bp, Artificial Sequence
  derived and/or modified sequence
cttcctagagagggaacaacattcatgtgacgggcccctctgcttctcccccgccccatcatctccagcgcgtggtgggggaactgctggggaaggcgattggcatcgatctctccatcccttccgaggcccgacttcggaattgtcttagaagaaagaaggcaagccaccattttacccacgtaaatatatgaatatatttctgacattgaggtgttccagaagatgataaagaaatgatagcagctccagaaataccaactgattttaatctactacaggagtcagaaacacatttttcttctgacacagattttgaagatatcgaaggaaaaaaccaaaagcaaggcaaaggcaaaacttgtaaaaaaggcaaaaagggcccagcagaaaagggcaaaggtggaaatggaggaggaaaacctccttctggtccaaaccgaatgaatggtcatcaccaacagaatggagtggaaaacatgatgttgtttgaagttgttaaaatgggcaagagtgctatgcagtcggtggtagatgattggatagaatcatacaagcatgaccgagatatagcacttcttgaccttatcaacttttttattcagtgttcaggctgtaaaggagttgtcacagcagaaatgtttagacatatgcagaactctgagataattcgaaaaatgactgaagaattcgatgaggatagtggagattatccacttaccatggctggtcctcagtggaagaagttcaaatccagtttttgtgaattcattggcgtgttagtacggcaatgtcaatatagtatcatatatgatgagtatatgatggatacagtcatttcacttcttacaggattgtctgactcacaagtcagagcatttcgacatacaagcaccctggcagctatgaagttgatgacagctttggtgaatgtggcactaaatcttagcattaatatggataatacacaaagacaatatgaagcagaacggaataaaatgattggaaaacgagccaatgagaggctagaactcctgctacaaaagcggaaagagcttcaggaaaatcaagatgaaatagaaaatatgatgaatgcaatatttaaaggagtgtttgtacatagataccgtgatgcgatagctgaaattcgagctatttgcattgaagagattggcatttggatgaagatgtatagtgatgcctttcttaatgacagttatttaaaatatgttggttggactatgcatgataagcaaggtgaagtaagactcaaatgtcttactgctctacaagggctttattataacaaagagcttaattccaaactggaactttttaccagtcggttcaaggatagaattgtgtctatgacccttgacaaagaatatgatgttgcagtacaagcaataaaattactcactcttgttttacagagtagtgaagaagttctcactgcagaagattgtgaaaatgtctatcatctggtttattcagctcaccggccagtagcagtagcagctggagaatttctctacaaaaagctcttcagtcgtagagatccagaggaggatggaatgatgaaaagaagaggaagacaaggtccaaatgccaaccttgttaagacattggtttttttctttctagaaagtgagttacatgagcatgcagcataccttgtggatagcatgtgggactgtgctactgagctgctgaaagactgggaatgtatgaatagcttgttactggaagagccacttagtggagaggaagcactaacagataggcaagagagtgctctgattgaaataatgctttgtaccattagacaagcggctgaatgtcatcctcccgtgggaagagggacaggaaaaagggtgcttacagcaaaggagaagaagacacagttggatgataggacaaaaatcactgagctttttgccgtggcccttcctcagttattagcaaaatactctgtagatgcagaaaaggtgactaacttgttgcagttgcctcagtactttgatttggaaatatataccactggacgattagaaaagcatttggatgccttattgcgacagatccggaatattgtagagaagcacacagatacagatgttttggaagcatgttctaaaacttaccatgcactctgtaatgaagagttcacaatcttcaacagagtagatatttcaagaagtcaactgatagatgaattggcagataaatttaaccggcttcttgaagattttctgcaagagggtgaagaacctgatgaagatgatgcatatcaggtattgtcaacattgaagaggatcactgcttttcataatgcccatgacctttcaaagtgggatttatttgcttgtaattacaaactcttgaaaactggaatcgaaaatggagacatgcctgagcagattgttattcacgcactgcagtgtactcactatgtaatcctttggcaacttgctaagataactgaaagcagctctacaaaggaggacttgctgcgtttaaagaaacaaatgagagtattttgtcagatatgtcaacattacctgaccaacgtgaatactactgttaaggaacaggccttcactattctgtgtgatattttgatgatcttcagccatcagattatgtcaggagggcgtgacatgttagagccattagtgtatacccctgattcttcattgcagtctgagttgctcagctttattttggatcatgtcttcattgaacaggatgatgataataatagtgcagatggtcagcaagaggatgaagccagtaaaattgaagctctgcacaagagaagaaatttacttgcagcattttgtaagctaattgtatatactgtggtggagatgaatacagctgcagatatcttcaaacagtatatgaagtattataatgactatggagatatcatcaaagaaacaatgagtaaaacaaggcagatagacaaaattcagtgtgctaagacccttattctcagtctgcaacagctttttaatgaaatgatacaagaaaatggctataattttgatagatcatcctctacatttagtggcataaaagaacttgctcgacgttttgctttaacttttggacttgatcagttgaaaacaagagaagccattgccatgctacacaaagatggcatagaatttgcttttaaagagcctaatccgcaaggggagagccatccacctttaaatttggcatttcttgatattctgagtgaattttcttctaaactacttcgacaagacaaaagaacagtgtatgtttacttggaaaagttcatgacctttcagatgtcactccgaagagaggatgtgtggcttccactgatgtcttaccgaaattctttgctagctggtggtgatgatgacaccatgtcagtcattagtggaatcagcagccgggggtcaacagtacggagtaaaaaatcaaaaccatctacaggaaaacggaaagtggttgagggcatgcagctttcactcactgaagaaagtagtagtagtgacagtatgtggttaagcagagaacaaacactgcacacccctgttatgatgcagacaccacaactcacctccactattatgagagagcccaaaagattacggcctgaggatagcttcatgagtgtttatccaatgcagactgaacatcatcaaacacctcttgattataatcggcgtggcacaagcctaatggaagatgatgaagagccaattgtggaagatgttatgatgtcctcagaagggaggattgaggatcttaatgagggaatggattttgacaccatggatatagatttgccaccatcaaagaacagacgagagagaacagaactgaagcctgatttctttgatccagcttcaattatggatgaatcagttcttggagtgtcaatgttttaataccagtacacaattaaatctgtggtgaagtcattttctaagtggaagaggaaattttaaagtgtggtagatacagtgaaattctgtacagatttttctctaaggagaatatgacatgcttatgcttaccaagatcaagtgcattgaggggcagttttgtttgcctgaataaacgtaaaggacaagtaaacaatttgatgataagctacagtttttcttagaaagtaaatattttatttatgcgctgttagttggcttttgaatcgattatttcatgcttttttttaaaaaaaaaaaaaaacaaaataacaatctgaagaggcatttggtacagatatgaattctcttacatttatttactggttgtactaaataatgatgacctctgctggatttctgtttacatccagaaaacaatgttaaggatgtatttattcccctaccctgaagaaagtgtaggatagaattgtttttagcattctaaatttaaatgcttaaaacgtcaatcaacaaaactttgttttaaatattgtaattgtggagaaaagtaaacttataagcagaacttttacaattttttcatctaaaagtattttaagatatttttaaaatccaagagcttctctatacttttcagaaatatccagatgcagtgaactgccagaaggtaaccagtctcaaacatgcttatcccattatcaaccctgaaagtttgcttgtcctttaagataaaaatgtaatgttgtgatattccttccagtaatgccactgtattttgtctccaaataaaagaagcttattgtagtatgtttgcagaaaaattctaaacaaaaattatacagcttattagagtgtgggaatagggatctaaattttaaataaaattatatatatatataaattggtgctgattttataattgcgcagtttgtttagttttttcttacttttaaattccaacttaaaattatgaggtttcagaaatatattgaaagtttaacaatgtttaaaaatagaaaagcatgagtgttcatgctttaaaatgatttttaaatttgtattttatattgttttatctatctgtctttgcaagcagtcttcaggttaaagatacttctaacaggttacagtacatttcctctgtatgtaaattagatgggataatagaattcataacccataatattctttgaaagctaagctttaaacttcattttatgtcctttcacaaataaattagtttaaaacagaaagtggctacttgccattttgacatcaactcattttgcgaggcttaggcagctagacatcgtttaaaacaaaatattaacttatattacatgtgtatctatctattgtcagtcgtctctcagttcttgaggtatattattttaatcattccatgccttaatatgcttgcaatacaagaatatcttcagatgggtgaataccaaaaggctttcagtttttagtcagaaatcaagcattgggctgtggtagccaaaaaccataggttagctaaaaagatcatgatacaattattttattaagtcatggttaataacaaatgaatccagacttgtctaacagattttccatcaacaaatattgttatgtgcaaaagtattgcctatgttgttttacacaccactgcattaactagaactgctgagaggactgtatatatgattttaaacctaagttgattttttttctcactcttgaaaggagtacttctttgtgaaagcagttcttacagctttgttttcaaccagctaaaaatgttttatatattactctaacctgttgtcctccacattctattgtcctaattgtactgttttctgatttgtatttatgtcttgagacagtaactttttgaataaaaataaacctacagtatgttgtatgttttctcttgtactcaaagggggagggtggctataaatggtttgcaaatttatatctattatcacatcttttaatgtgtttggggaataatttatagagaataccatcagtttatatttttaataaatcatatgtatttacaatgaaa

SEQ ID NO: 101229 - DNA, 6045 bp, Artificial Sequence
  derived and/or modified sequence
gggtggcccaaaatggagaacgcggagcagcgcaagatggaggctccgcttctctgtgtagcagtagatttaggttccttttctccggcaggctcctaagcctaggagagcccgaactggagcgcgtggtgggggaactgctggggaaggcgattggcatcgatctctccatcccttccgaggcccgacttcggaattgtcttagaagaaagaaggcaagccaccattttacccacgtaaatatatgaatatatttctgacattgaggtgttccagaagatgataaagaaatgatagcagctccagaaataccaactgattttaatctactacaggagtcagaaacacatttttcttctgacacagattttgaagatatcgaaggaaaaaaccaaaagcaaggcaaaggcaaaacttgtaaaaaaggcaaaaagggcccagcagaaaagggcaaaggtggaaatggaggaggaaaacctccttctggtccaaaccgaatgaatggtcatcaccaacagaatggagtggaaaacatgatgttgtttgaagttgttaaaatgggcaagagtgctatgcagtcggtggtagatgattggatagaatcatacaagcatgaccgagatatagcacttcttgaccttatcaacttttttattcagtgttcaggctgtaaaggagttgtcacagcagaaatgtttagacatatgcagaactctgagataattcgaaaaatgactgaagaattcgatgaggatagtggagattatccacttaccatggctggtcctcagtggaagaagttcaaatccagtttttgtgaattcattggcgtgttagtacggcaatgtcaatatagtatcatatatgatgagtatatgatggatacagtcatttcacttcttacaggattgtctgactcacaagtcagagcatttcgacatacaagcaccctggcagctatgaagttgatgacagctttggtgaatgtggcactaaatcttagcattaatatggataatacacaaagacaatatgaagcagaacggaataaaatgattggaaaacgagccaatgagaggctagaactcctgctacaaaagcggaaagagcttcaggaaaatcaagatgaaatagaaaatatgatgaatgcaatatttaaaggagtgtttgtacatagataccgtgatgcgatagctgaaattcgagctatttgcattgaagagattggcatttggatgaagatgtatagtgatgcctttcttaatgacagttatttaaaatatgttggttggactatgcatgataagcaaggtgaagtaagactcaaatgtcttactgctctacaagggctttattataacaaagagcttaattccaaactggaactttttaccagtcggttcaaggatagaattgtgtctatgacccttgacaaagaatatgatgttgcagtacaagcaataaaattactcactcttgttttacagagtagtgaagaagttctcactgcagaagattgtgaaaatgtctatcatctggtttattcagctcaccggccagtagcagtagcagctggagaatttctctacaaaaagctcttcagtcgtagagatccagaggaggatggaatgatgaaaagaagaggaagacaaggtccaaatgccaaccttgttaagacattggtttttttctttctagaaagtgagttacatgagcatgcagcataccttgtggatagcatgtgggactgtgctactgagctgctgaaagactgggaatgtatgaatagcttgttactggaagagccacttagtggagaggaagcactaacagataggcaagagagtgctctgattgaaataatgctttgtaccattagacaagcggctgaatgtcatcctcccgtgggaagagggacaggaaaaagggtgcttacagcaaaggagaagaagacacagttggatgataggacaaaaatcactgagctttttgccgtggcccttcctcagttattagcaaaatactctgtagatgcagaaaaggtgactaacttgttgcagttgcctcagtactttgatttggaaatatataccactggacgattagaaaagcatttggatgccttattgcgacagatccggaatattgtagagaagcacacagatacagatgttttggaagcatgttctaaaacttaccatgcactctgtaatgaagagttcacaatcttcaacagagtagatatttcaagaagtcaactgatagatgaattggcagataaatttaaccggcttcttgaagattttctgcaagagggtgaagaacctgatgaagatgatgcatatcaggtattgtcaacattgaagaggatcactgcttttcataatgcccatgacctttcaaagtgggatttatttgcttgtaattacaaactcttgaaaactggaatcgaaaatggagacatgcctgagcagattgttattcacgcactgcagtgtactcactatgtaatcctttggcaacttgctaagataactgaaagcagctctacaaaggaggacttgctgcgtttaaagaaacaaatgagagtattttgtcagatatgtcaacattacctgaccaacgtgaatactactgttaaggaacaggccttcactattctgtgtgatattttgatgatcttcagccatcagattatgtcaggagggcgtgacatgttagagccattagtgtatacccctgattcttcattgcagtctgagttgctcagctttattttggatcatgtcttcattgaacaggatgatgataataatagtgcagatggtcagcaagaggatgaagccagtaaaattgaagctctgcacaagagaagaaatttacttgcagcattttgtaagctaattgtatatactgtggtggagatgaatacagctgcagatatcttcaaacagtatatgaagtattataatgactatggagatatcatcaaagaaacaatgagtaaaacaaggcagatagacaaaattcagtgtgctaagacccttattctcagtctgcaacagctttttaatgaaatgatacaagaaaatggctataattttgatagatcatcctctacatttagtggcataaaagaacttgctcgacgttttgctttaacttttggacttgatcagttgaaaacaagagaagccattgccatgctacacaaagatggcatagaatttgcttttaaagagcctaatccgcaaggggagagccatccacctttaaatttggcatttcttgatattctgagtgaattttcttctaaactacttcgacaagacaaaagaacagtgtatgtttacttggaaaagttcatgacctttcagatgtcactccgaagagaggatgtgtggcttccactgatgtcttaccgaaattctttgctagctggtggtgatgatgacaccatgtcagtcattagtggaatcagcagccgggggtcaacagtacggagtaaaaaatcaaaaccatctacaggaaaacggaaagtggttgagggcatgcagctttcactcactgaagaaagtagtagtagtgacagtatgtggttaagcagagaacaaacactgcacacccctgttatgatgcagacaccacaactcacctccactattatgagagagcccaaaagattacggcctgaggatagcttcatgagtgtttatccaatgcagactgaacatcatcaaacacctcttgattataatcggcgtggcacaagcctaatggaagatgatgaagagccaattgtggaagatgttatgatgtcctcagaagggaggattgaggatcttaatgagggaatggattttgacaccatggatatagatttgccaccatcaaagaacagacgagagagaacagaactgaagcctgatttctttgatccagcttcaattatggatgaatcagttcttggagtgtcaatgttttaataccagtacacaattaaatctgtggtgaagtcattttctaagtggaagaggaaattttaaagtgtggtagatacagtgaaattctgtacagatttttctctaaggagaatatgacatgcttatgcttaccaagatcaagtgcattgaggggcagttttgtttgcctgaataaacgtaaaggacaagtaaacaatttgatgataagctacagtttttcttagaaagtaaatattttatttatgcgctgttagttggcttttgaatcgattatttcatgcttttttttaaaaaaaaaaaaaaacaaaataacaatctgaagaggcatttggtacagatatgaattctcttacatttatttactggttgtactaaataatgatgacctctgctggatttctgtttacatccagaaaacaatgttaaggatgtatttattcccctaccctgaagaaagtgtaggatagaattgtttttagcattctaaatttaaatgcttaaaacgtcaatcaacaaaactttgttttaaatattgtaattgtggagaaaagtaaacttataagcagaacttttacaattttttcatctaaaagtattttaagatatttttaaaatccaagagcttctctatacttttcagaaatatccagatgcagtgaactgccagaaggtaaccagtctcaaacatgcttatcccattatcaaccctgaaagtttgcttgtcctttaagataaaaatgtaatgttgtgatattccttccagtaatgccactgtattttgtctccaaataaaagaagcttattgtagtatgtttgcagaaaaattctaaacaaaaattatacagcttattagagtgtgggaatagggatctaaattttaaataaaattatatatatatataaattggtgctgattttataattgcgcagtttgtttagttttttcttacttttaaattccaacttaaaattatgaggtttcagaaatatattgaaagtttaacaatgtttaaaaatagaaaagcatgagtgttcatgctttaaaatgatttttaaatttgtattttatattgttttatctatctgtctttgcaagcagtcttcaggttaaagatacttctaacaggttacagtacatttcctctgtatgtaaattagatgggataatagaattcataacccataatattctttgaaagctaagctttaaacttcattttatgtcctttcacaaataaattagtttaaaacagaaagtggctacttgccattttgacatcaactcattttgcgaggcttaggcagctagacatcgtttaaaacaaaatattaacttatattacatgtgtatctatctattgtcagtcgtctctcagttcttgaggtatattattttaatcattccatgccttaatatgcttgcaatacaagaatatcttcagatgggtgaataccaaaaggctttcagtttttagtcagaaatcaagcattgggctgtggtagccaaaaaccataggttagctaaaaagatcatgatacaattattttattaagtcatggttaataacaaatgaatccagacttgtctaacagattttccatcaacaaatattgttatgtgcaaaagtattgcctatgttgttttacacaccactgcattaactagaactgctgagaggactgtatatatgattttaaacctaagttgattttttttctcactcttgaaaggagtacttctttgtgaaagcagttcttacagctttgttttcaaccagctaaaaatgttttatatattactctaacctgttgtcctccacattctattgtcctaattgtactgttttctgatttgtatttatgtcttgagacagtaactttttgaataaaaataaacctacagtatgttgtatgttttctcttgtactcaaagggggagggtggctataaatggtttgcaaatttatatctattatcacatcttttaatgtgtttggggaataatttatagagaataccatcagtttatatttttaataaatcatatgtatttacaatgaaa

SEQ ID NO: 101230 - DNA, 385 bp, Artificial Sequence
  derived and/or modified sequence
tcccctcgacaccccactaaagacagaagaaccgcggctcgatcgggtccgcggcggaagcgcggccaaacgaatgagaattgtcttagaagaaagaaggcaagccaccattttacccacgtaaatatatgaatatatttctgacattgaggtgttccagaagatgataaagaaatgatagcagctccagaaataccaactgattttaatctactacaggagtcagaaacacatttttcttctgacacagattttgaagatatcgaaggaaaaaaccaaaagcaaggcaaaggcaaaacttgtaaaaaaggcaaaaagggcccagcagaaaagggcaaaggtggaaatggaggaggaaaacctccttctggtccaaaccgaatga

SEQ ID NO: 101231 - DNA, 676 bp, Artificial Sequence
  derived and/or modified sequence
attcctggctctagcagggcctgctcgggagctgctggtgtttgttactgtcctcgcagcacttttctgccaaccttctctctctgcgtattggttaggagcaaaagcaggaggcggtctcctaattctgtctgtagcctagcgcgttgcgtttaagggtatatctgaacttattttgttaaaaaaaaggctctgggaagtggatgcatttgtttaatgacatataattcaggaattgtcttagaagaaagaaggcaagccaccattttacccacgtaaatatatgaatatatttctgacattgaggtgttccagaagatgataaagaaatgatagcagctccagaaataccaactgattttaatctactacaggagtcagaaacacatttttcttctgacacagattttgaagatatcgaaggaaaaaaccaaaagcaaggcaaaggcaaaacttgtaaaaaaggcaaaaagggcccagcagaaaagggcaaaggtggaaatggaggaggaaaacctccttctggtccaaaccgaatgaatggtcatcaccaacagaatggagtggaaaacatgatgttgtttgaagttgttaaaatgggcaagagtgctatgcagtcggtggtagatgattggatagaatcatacaagcatgaccgagatatagcacttcttga

SEQ ID NO: 101232 - DNA, 678 bp, Artificial Sequence
  derived and/or modified sequence
agtgctgcttttcattcccacccccacccgcactgtctttctcaaggcacgaactgagctgatccttgccccaggaattgtcttagaagaaagaaggcaagccaccattttacccacgtaaatatatgaatatatttctgacattgaggtgttccagaagatgataaagaaatgatagcagctccagaaataccaactgattttaatctactacaggagtcagaaacacatttttcttctgacacagattttgaagatatcgaaggaaaaaaccaaaagcaaggcaaaggcaaaacttgtaaaaaaggcaaaaagggcccagcagaaaagggcaaaggtggaaatggaggaggaaaacctccttctggtccaaaccgaatgaatggtcatcaccaacagaatggagtggaaaacatgatgttgtttgaagttgttaaaatgggcaagagtgctatgcagtcggtggtagatgattggatagaatcatacaagcatgaccgagatatagcacttcttgaccttatcaacttttttattcagtgttcaggctgtaaaggagttgtcacagcagaaatgtttagacatatgcagaactctgagataattcgaaaaatgactgaagaattcgatgaggatagtggagattatccacttaccatggctggtcctcagtggaag

SEQ ID NO: 101233 - DNA, 742 bp, Artificial Sequence
  derived and/or modified sequence
ggcccaaaatggagaacgcggagcagcgcaagatggaggctccgcttctctgtgtagcagtagatttaggttccttttctccggcaggctcctaagcctaggagagcccgaactggaggtggccaccgagtactaaattcacttgggaataaaagaaaaacataagaaaattataagagaaaggaattgtcttagaagaaagaaggcaagccaccattttacccacgtaaatatatgaatatatttctgacattgaggtgttccagaagatgataaagaaatgatagcagctccagaaataccaactgattttaatctactacaggagtcagaaacacatttttcttctgacacagattttgaagatatcgaaggaaaaaaccaaaagcaaggcaaaggcaaaacttgtaaaaaaggcaaaaagggcccagcagaaaagggcaaaggtggaaatggaggaggaaaacctccttctggtccaaaccgaatgaatggtcatcaccaacagaatggagtggaaaacatgatgttgtttgaagttgttaaaatgggcaagagtgctatgcagtcggtggtagatgattggatagaatcatacaagcatgaccgagatatagcacttcttgaccttatcaacttttttattcagtgttcaggctgtaaaggagttgtcacagcagaaatgtttagacatatgcagaactctgagataattcgaaaaatgactgaagaattcgatgag

SEQ ID NO: 101234 - DNA, 798 bp, Artificial Sequence
  derived and/or modified sequence
atccttgccccaggtggccaccgagtactaaattcacttgggaataaaagaaaaacataagaaaattataagagaaaggaattgtcttagaagaaagaaggcaagccaccattttacccacgtaaatatatgaatatatttctgacattgaggtgttccagaagatgataaagaaatgatagcagctccagaaataccaactgattttaatctactacaggagtcagaaacacatttttcttctgacacagattttgaagatatcgaaggaaaaaaccaaaagcaaggcaaaggcaaaacttgtaaaaaaggcaaaaagggcccagcagaaaagggcaaaggtggaaatggaggaggaaaacctccttctggtccaaaccgaatgaatggtcatcaccaacagaatggagtggaaaacatgatgttgtttgaagttgttaaaatgggcaagagtgctatgcagtcggtggtagatgattggatagaatcatacaagcatgaccgagatatagcacttcttgaccttatcaacttttttattcagtgttcaggctgtaaaggagttgtcacagcagaaatgtttagacatatgcagaactctgagataattcgaaaaatgactgaagaattcgatgaggatagtggagattatccacttaccatggctggtcctcagtggaagaagttcaaatccagtttttgtgaattcattggcgtgttagtacggcaatgtcaatatagtatcatatatgatgagtatatgatggatacagtcatttcacttcttacaggattgtc

SEQ ID NO: 101235 - DNA, 296 bp, Artificial Sequence
  derived and/or modified sequence
gaggtaagttataaaatggcggaggcgaagcttctagaagtttggaggggcacccggagggcgcttggcccaccgtgaggaattgtcttagaagaaagaaggcaagccaccattttacccacgtaaatatatgaatatatttctgacattgaggtgttccagaagatgataaagaaatgatagcagctccagaaataccaactgattttaatctactacaggagtcagaaacacatttttcttctgacacagattttgaagatatcgaaggaaaaaaccaaaagcaaggcaaaggc

SEQ ID NO: 101236 - protein, 116 aa, Artificial Sequence
  derived and/or modified sequence
MPYRVGQTTGLVGLAVCNTPHERLRILYTKILDVLEEIPKNAAYRKYTEQITNEKLAMVKAEPDVKKLEDQLQGGQLEEVILQAEHELNLARKMREWKLWEPLVEEPPADQWKWPI

SEQ ID NO: 101237 - DNA, 351 bp, Artificial Sequence
  derived and/or modified sequence
atgccctatagggtggggcaaacgacagggttagtgggtctggctgtctgcaacaccccacatgagcggctcagaatcctgtacacaaagatattagacgttcttgaagagatccctaagaatgcagcctatcggaagtatactgagcagattactaatgagaaactggccatggtgaaggcagaacccgacgttaaaaagttggaagaccagctgcagggcggtcagctcgaggaagtgatcctgcaggccgaacacgagctcaacttggcacggaaaatgagagaatggaagttatgggagcccctcgtggaggagccgccagccgatcaatggaagtggcctatttag

SEQ ID NO: 101238 - DNA, 351 bp, Artificial Sequence
  derived and/or modified sequence
atgccctacagagtgggccagaccaccggcctggtgggcctggccgtgtgcaacacccctcatgagcggctgcgcatcctgtacaccaagatcctggatgtgctggaggagatccccaagaatgctgcctacaggaagtacacagagcagatcaccaatgagaagctggccatggtgaaggccgagccagatgtgaagaagctggaggaccagctgcagggcggccagctggaggaggtgatcctgcaggccgagcacgagctgaacctggccaggaagatgagggagtggaagctgtgggagcccctggtggaggagcccccagctgaccagtggaagtggcccatctag

SEQ ID NO: 101239 - DNA, 5608 bp, Artificial Sequence
  derived and/or modified sequence
aagaaggtgagacgaatggaggtcactgttggaatttagactgtgggggtagactcagtccgatagccctacttcccgcgggtgttgacccctactgtcgcgggctcggcggtgcttttcggggactcgttctgcatgccttaccgggtagggcagaccactggccttgtgggattggctgtgtgcaatactcctcacgagaggctaagaatattgtacacaaagattcttgatgttcttgaggaaatccctaaaaatgcagcatatagaaagtatacagaacagattacaaatgagaagctggctatggttaaagcggaaccagatgttaaaaaattagaagaccaacttcaaggcggtcaattagaagaggtgattcttcaggctgaacatgaactaaatctggcaagaaaaatgagggaatggaaactatgggagccattagtggaagagcctcctgccgatcagtggaaatggccaatataattattaagtgactttggtgtgttcatgggaaactgatgtaattaaatattctgttatattaagagcgtgttcttattactgacattttgtaatcaagaaaagtgatatagaaaatatgtaggagactgttaaaattggtgattatggtaatatggtcatgtgaatcaatttttgatttataaagtactcacacaagttgtttcaaagatgatatttctgtgaacagagaggccatgggaagatttgaaaattattaaagaaaaattcctacagattttcaatgcagagaccataatcaaaaagtaaactttctttagtagtatgttcaatacatcatttaattttttaagttatcctgaagaaggaaaggtccttaattattatagtctaaacaaatttatagattactgtttgaagtaaataatacgagtgaatattttcaaatgtgataaaatagcacaagtggctggtgataaaatttgaaattatggttaacctcagctgtgatcttatgtatgtaaagtgaaatttaaatagataattataggttgattacaaaatccatagtgtcattttattttagtcattattgaattataccatttactctgttttcttatagtcttaattttattatattttgttgttactgtattatatttgaaaaccttcaaattagaatacattgtacagttaaagaaattgacttggtacttaaaagaaagatttcccattgcatacaggttattggagaaattttccttttgttgcatttgtggaagttagttttctggcccgtggcctttaattttcttaatcaacctaattacatcaggatagaggtagagtttctgtaaaagaagagacattaagagttcctgaaatttatatctggcatacggataggcttatattcaaaacatcttagtcatacgaccataaattaaaagtggagtcactaaatagtttgcagtacgtttctaatataagtgtaggtgggtatcaaaacaagacaaatgctgttcagggaaagaagttggcaagcttaaggttaaacaaaaataaaattacatgtgttttcgccttcctagctccctgtcattcctaaatacttggttaaatttaacgtggtatctctttccttcatagatagtactatactcttgtggggttttgtgtatacgtgtgtgtgtgtgtgtgtgtgtgtgtgtgtgtgtgtgtgtgtgtgcacgcgcatgcgcacatttgctcagaatgagaaaaaaatggtatttttccttctttccagtatatttctcccctcatagagctgtaacatgaatactaaataaatattaaataaggtggattcttagaggttagagtgcaagaaggctccttctggtggggaagtgttagagggggagttagaagcccagggtttctcattctcatggttctagtgttgttaactcaatgactacattgaggcaagtttggcctgtttctcagaatggcctatttctaatgctgcaaaagaaatagaatatgatttataacaacattttcagttctaaacatttcttgaatatataatatatttattaaaacatgatgctgaagtgtgtttgcatgggtactttcaaggtaattttctagccaaccattatttttcaggtcctttggacaacacagaaacaaagatggcttgctgtgtttttgtcatattttcagtcccgtatctgccatgattcttgggcatcttttatgtttcaccaacagtgttactgaacttttttgctaaaaggggaccttactggtgtttgcattagaaatgctagttgcagaataatagtcattgtaaaaataatattataacaataatagctaatgtttgttgagactttaatatgaatgtcaggcactatcataagtacctgactaatttcactcattaaacctgcactacaaccctaagagtgatactacaaattatcttcattttccagataagaaaccagaaccctacgtgagtagttttcccctgcaattatgcaacttggggccttggggacactgaaaccaagagatgatttaataacaaatccaaggtcacatagctagtaagatgtgaagctgaagtttgaacccaggcagtctggttctagaactgatgctcctgttatattattatttatgaatatgcttgggatgttgtgacttcttcctgtgctgtatgggctgtaccaaatgaaactagatcctgctctctttaccttttctgtcaaaattatctgtaaagaacaaatatgagcagaagtagtaaacgatttcattttctgcaaagagctgcatataggttataggcagattatgttaatgggataggtatctaaaaggtattgcaatttggtcattggttctttctcctgtctcaattgctcacagaactttacacctgatcgtttttactccttcagtcttttcccagttgcttcctataaacatccaggttaagtctcctgatcactttgcaaatgattcttttattcagagatcttcagtgttttgagtggctactaaactaattttaataattttcagaatggcctatttcagttctcccatgggtttcattctagttaatcatcatactgcagatacttcaaaagaaagagaagctaatcaatttgagctttgctaagaaagaagaaatggcaacaaagttgatgccccctttctcccacactgggacttagtgcagacgattccaatttcttggcattctttcctttgggatgaaaatggcttatatttaggataactataggataatttatcattccacttggaatgattttgagtgaaaataattacataaggataacagatgtacaccatgactgtcctgggcaaacaagatataggggggcaccctactggagtaaggctcaggtctcaaggttgccatctttcccacaccagtaggatcaactagtctgtcattggaatagaatgaattgatgccagcagtagtagtcatcatgtgcaatcaggcctcaagttttattgtatcctttcactctccctcattctcccctccccctccttttccctcagaattgggggatggaagaaaagagagcttatattttattgtcaattttctaatcacattcagaggagcgaagctaattaagccaataacaatgtttatgaatgtatcttttttaaaagggagatgacaatatataggaaaattcccacatgtaggctaatagcagctttttctttttcctcccatcctctatgattatgtaaacatacagaagtctaacaccctacacaagtgtattgtggggtatgggattaagtaccaaattgctgaacatatcactagtattttggatttgctgagtgcagtcttcccattaaaactaagtgttcagtagggaggcgtggtggctcacacctataatcccactactttgggaggccgaggtgggtggatcacttgaggtcaaaagttcgaggccagcctggccaatatggtgaaaccccgtctctactaaaaacaaaaacaaaaactaagtgttcagtgagattgtagcctatgctacaacaatagtaatgccaattgttttagagaaaagtaaatgagaggctaccagttgtgtttagaggaggtcgacgttttattttagacaaaattcacaggaaatcacagtgggaatgtgataaggggtttgaatgattgatggggacaggaagaattcatttgagagactagagatgagtcagtattctagatcgtgaagtaaaatagtgagtcatgtagtgacttagcatgggttatccttaaatcccagtgtcttaagtgtattttttattcatactgcatgtctaaggagggttggcaaggagtgctcatagacccacaaggaatccaggctgagtgtggcaccatcaacatatatttccatgaccatagtggtggtggggaattggaacatggtaaattacacataggaataaaaaaaaagaaacaaccaaggttaaatttttttttgactgtgccacaaaatttatgaattgaacttgccatgcatcactaataattttcaaattggtctttaggtttacattagcagctaattttttgtggtacacttaaatgtaatttatgattggcatctgtatataattaaatgaaaagcattgcaaagatttctattttggtatttctcatgatcttcaatttttttttaggtgaatctattaggttttctaaagataactatttttttttttttacaaaatattggcattttaatctctctataactggagggtgaattatttttcaccagagtaaaacaggtccaaagtcccttatctaaattcctaatttcaaaaatctctgaaaacaaagttttttcataactcatttggcaacaaaccccacctgaattacatgaggctatttgtggtatttatcgcacttcaatgtgaatatgaatatattttgccacagatgtatcaatatatttgattctaaactgcttcctcagaccctcttaatgtgttacataatgtaaagtatatgcccatatttcctttcaaaaatctgaaaaattgtgaatatcaaacacatctgtcttaaaaggtttcagaaaagggacaatagacctatatttccattctcttaacaagttcacaaagtggtattatgatccaaatttaatctaaataatttccaaaacaaaaattttcaggtccttagttttctaaattattttaatattaaaaatattcattattcattttaacctgtagtaacaacaggagatactttgaaatgcttgattttatcaagccactaggtggcatctttgtaaaaataaaagcacatcaaaagaaatgtttattacataaataaatgctgagatgaataaaggtagatgtttcatgagaaatacgaagtcgtttggtggaataaatcctgagaaaatgcatagatttatcatgaaaaggaaaatggaaaatggtattgtaaaattactctttcacttttggaattgagaagctttttcctattggttgttttcattaagtttgaatataaatttattatgtaaccaaa

SEQ ID NO: 101240 - DNA, 351 bp, Artificial Sequence
  derived and/or modified sequence
atgccctaccgggtgggccagaccaccggcctggtgggcctggccgtttgtaataccccacacgagcggctcagaatcctctacactaaaattctggacgtgttagaggaaatccctaaaaatgcagcctaccgaaagtataccgagcagatcaccaatgagaaattagcaatggtgaaggcagaacctgacgtgaagaagctggaagaccagttgcagggtggccagctggaagaagtcatcctgcaggccgagcacgagctcaacctggcccggaaaatgagggagtggaagttatgggaacctctggtggaagaaccgcctgccgatcagtggaaatggcctatctag

SEQ ID NO: 101241 - DNA, 351 bp, Artificial Sequence
  derived and/or modified sequence
atgccttaccgcgttggtcagacaacaggcttggttggcttggcggtttgtaataccccccacgaaagactcagaattctctacaccaaaatcttggatgtactggaggaaataccaaaaaacgctgcgtatcgcaagtacacagaacaaataacaaacgaaaaactcgccatggtgaaagccgaaccagacgttaaaaagctcgaggaccaactgcagggaggtcagctggaagaggtgattcttcaggccgagcatgaactgaatctggccagaaaaatgcgcgaatggaaactctgggagcccctggtagaggagcctccagccgaccagtggaaatggcctatatag

SEQ ID NO: 101242 - DNA, 351 bp, Artificial Sequence
  derived and/or modified sequence
atgccctacagagtgggccagaccaccggcctggtgggcctggccgtgtgcaacaccccccacgagagactgagaatcctgtacaccaagatcctggacgtgctggaggagatccccaagaacgccgcctacagaaagtacaccgagcagatcaccaacgagaagctggccatggtgaaggccgagcccgacgtgaagaagctggaggaccagctgcagggcggccagctggaggaggtgatcctgcaggccgagcacgagctgaacctggccagaaagatgagagagtggaagctgtgggagcccctggtggaggagccccccgccgaccagtggaagtggcccatctag

SEQ ID NO: 101243 - DNA, 720 bp, Artificial Sequence
  derived and/or modified sequence
atggccggcgttctgaagaaaactaccgggcttgtagggctggccgtgtgtaacaccccgcatgaagtgtgcacctttgttttgtccagctttcttaattcacagggtaggctgaatagctgtcattttgcatattgccgcgtcaacggaatacagatgttccaggcactcaactacaaaccccgtgagcttctcaggcatggacgttgtcctcccacctccctgattcgatgtcacatatttatctacttctgtcacgatctctttatcaagcccgttttcctactcaccttctctctcactttttcttggctgcatttgtgtctgctcctatccgccccttcccaaatttacatcagcgtgttccatctcttttccttgccctataggttctgtcttggcgcattggattatatatatcttggccttctcaaggtactgccaccctttccctccgttagatcttttccctccgtatttacaaacgtatttattaaaaaaacacataagttctttatattactggtcccaagtatcatcacaccctttctgtgttttactctgcagatcacgcagaaatcttacctctactttcttcagtttttgtcctactcgcctcttaacgccctaagtcacccgtggcgtttcagctcttctccgatcattagcatgctcccaaacccgatggtcagctcttacttctccccaagtcttacgtag

SEQ ID NO: 101244 - DNA, 720 bp, Artificial Sequence
  derived and/or modified sequence
atggccggcgtgctgaagaagaccaccggcctggtgggcctggccgtgtgcaacacccctcatgaggtgtgcacctttgtgctgagcagcttcctgaacagccagggccgcctgaacagctgccactttgcctactgccgggtgaatggcatccagatgttccaggccctgaactacaagccccgggagctgctgcggcacggccgctgcccccccaccagcctcatccgctgccacatcttcatctacttctgccacgacctcttcatcaagcctgtgttcctgctgaccttcagcctgaccttctcctggctgcacctgtgcctgctgctgagcgcccccagccagatctacatcagcgtcttccacctgttcagcctgccctaccgcttctgcctgggcgccctggactacatctacctgggcctgctgaaggtgctgccccccttccccagcgtgcgctccttccccagcgtcttcaccaacgtgttcatcaagaagacccacaagttcttcatcctgctggtgcccagcatcatcacccccttcctgtgcttcaccctgcagatcacccagaagagctacctgtacttcctgcagttcctgagctacagccccctgaatgccctgagccacccctggaggttcagcagcagccccatcatctccatgctgcccaaccccatggtgagcagctacttcagccccagcctgacctag

SEQ ID NO: 101245 - DNA, 743 bp, Artificial Sequence
  derived and/or modified sequence
gtcaccgagtcgttggcgctgtcatggcgggtgtgctgaagaagaccactggccttgtgggattggctgtgtgcaatactcctcacgaggtatgtacctttgttctttcttcgttcttgaattcccaaggaagactaaattcctgtcactttgcttattgcagggttaacgggatacagatgtttcaagcccttaattacaagccgcgtgagctcttgagacacgggcgctgtccacctacttcgttgatccgatgtcacatttttatttatttttgccatgacctctttattaagccagttttcttgttgactttttccttgacattttcatggcttcacttgtgcttgcttctgtcagcgccatctcaaatttatatctccgttttccatcttttctccttgccttaccgtttctgcttaggtgcgttggattacatatatttaggcttactaaaggtactgcccccttttccttctgttaggtcttttccatctgtattcacgaatgttttcatcaaaaaaacccacaaattttttattcttcttgtcccttctataatcacaccatttctttgcttcactttacagataactcaaaagagttatctctattttctccaatttctttcttattcacccttgaatgcactcagtcacccttggcgtttttcaagttcaccaattatctccatgctgccaaatccaatggtcagctcatatttctcaccttcattgacctaa

SEQ ID NO: 101246 - DNA, 720 bp, Artificial Sequence
  derived and/or modified sequence
atggccggcgtgctgaagaagaccaccggcctggtgggcctggccgtgtgcaacactcctcatgaggtctgcaccttcgtgctatcatcttttctcaattcacagggccgactgaatagctgccacttcgcatattgccgggtgaatggtatacagatgttccaagccctcaattacaagcctagagaacttttgcggcacgggcgatgcccccctacaagtctcatccggtgccatatctttatctatttttgccacgacctctttattaagcctgtgttcttattgactttttctctaactttctcctggctgcacttatgcctgttgctgagcgcccccagccagatctacatctcggtttttcacctcttcagtcttccgtatcggttctgccttggagctctggactacatctatttgggtctcctaaaagttctccctccttttccaagcgtgagatccttcccttccgtgttcactaatgtgttcataaaaaagacacataaattttttattctgttggtgccgagcataattacacccttcctgtgcttcacacttcagattacacaaaagtcttacctttacttcctgcagttcttgtcctatagccccctaaacgcactgtcacacccttggagattcagctccagccccattataagcatgctgcctaatccgatggtgagtagctacttctccccctccctaacatag

SEQ ID NO: 101247 - DNA, 720 bp, Artificial Sequence
  derived and/or modified sequence
atggccggtgtgttgaaaaaaaccactggcctggtgggcctggccgtgtgtaatactcctcacgaagtgtgcacctttgtgttgagtagcttcctcaattcccaggggcgtcttaacagttgtcattttgcatactgcagagtaaacggcattcagatgtttcaagccttgaattacaagccgagggaattgcttaggcacggcagatgtccaccaactagcctgatccggtgccatatatttatatacttctgtcacgacctgttcataaaaccagttttcctgcttacctttagcctgacattcagctggctgcatctgtgcctgctactaagtgctcctagccagatatacatatctgtatttcacctcttttccctgccatatcggttctgtttgggagccctggactacatttacctgggcctgctcaaagtgttgcctccatttcctagcgtgaggtcattcccttcagtttttacgaatgtcttcattaaaaagacccataagtttttcattctcctcgtgcccagtatcataacaccctttttgtgttttacactgcagattacacaaaaatcctacctgtatttcctccagtttctttcatacagtcccctcaacgcgctctctcacccctggaggttttctagctccccaataatcagcatgctgccgaacccgatggtatcgtcttactttagcccgtctttaacatag

SEQ ID NO: 101248 - DNA, 720 bp, Artificial Sequence
  derived and/or modified sequence
atggccggcgtgctgaagaagaccaccggcctggtgggcctggccgtgtgcaacaccccccacgaggtgtgcaccttcgtgctgagcagcttcctgaacagccagggcagactgaacagctgccacttcgcctactgcagagtgaacggcatccagatgttccaggccctgaactacaagcccagagagctgctgagacacggcagatgcccccccaccagcctgatcagatgccacatcttcatctacttctgccacgacctgttcatcaagcccgtgttcctgctgaccttcagcctgaccttcagctggctgcacctgtgcctgctgctgagcgcccccagccagatctacatcagcgtgttccacctgttcagcctgccctacagattctgcctgggcgccctggactacatctacctgggcctgctgaaggtgctgccccccttccccagcgtgagaagcttccccagcgtgttcaccaacgtgttcatcaagaagacccacaagttcttcatcctgctggtgcccagcatcatcacccccttcctgtgcttcaccctgcagatcacccagaagagctacctgtacttcctgcagttcctgagctacagccccctgaacgccctgagccacccctggagattcagcagcagccccatcatcagcatgctgcccaaccccatggtgagcagctacttcagccccagcctgacctag

SEQ ID NO: 101249 - DNA, 849 bp, Artificial Sequence
  derived and/or modified sequence
atgcgggttcttgttgacgccagggagaaactgcatataccgtggggtgataatagtaaccagcagcacggggacaagatgatgagctttgacacaagagcgcccatggcagctcaggggatggtggaaacacgagtttttctgcaatatctgccggccatccgggctctgtgggccgacagtggaatccagaacgcctatgatcgaaggagggagtttcagttgggggagagcgtcaaatattttcttgataacctggacaaactcggagaaccagactatatacccagccagcaggacatccttctagccagaaggccgactaaaggaattcacgagtatgattttgaaatcaaaaatgtgccttttaaaatggtcgacgtgggtggccagcgctcagagcgcaaacgctggtttgaatgttttgattccgtgacatcaattctctttctcgtctcttcctcagagtttgaccaggttcttatggaagaccgactcaccaatcggttgacggaaagcctgaacatattcgaaaccatcgtgaataacagggtgttctcgaatgtaagtattattctgtttctaaacaagactgatctcctggaggaaaaggtgcagattgtgagcattaaagattatttcctcgagttcgagggggacccacattgtctacgggatgtccaaaaattccttgtggagtgttttcgaaataagcgcagagatcagcaacagaagcccctatatcatcactttacaaccgccataaataccgaaaatatcagactcgtttttcgggacgtaaaggataccatccttcacgataacctaaaacagctgatgttgcagtag

SEQ ID NO: 101250 - DNA, 1502 bp, Artificial Sequence
  derived and/or modified sequence
aataagggaactttttgcccgagacttcttgtcaagggcgtagggtgacagcctccttttgggcgagaatatgaaacttgaggagtgtcaggttgactgtactggaatcaggagagagtggacccatacagttagcatgaaaatgtagcatctgtgctttttcgccccagtgtcacggtcaggtatgagggtgctggttgatgctcgagagaagcttcatattccctggggagacaactcaaaccaacaacatggagataagatgatgtcgtttgatacccgggcccccatggcagcccaaggaatggtggaaacaagggttttcttacaatatcttcctgctataagagcattatgggcagacagcggcatacagaatgcctatgaccggcgtcgagaatttcaactgggtgaatctgtaaaatatttcctggataacttggataaacttggagaaccagattatattccatcacaacaagatattctgcttgccagaagacccaccaaaggcatccatgaatacgactttgaaataaaaaatgttcctttcaaaatggttgatgtaggtggtcagagatcagaaaggaaacgttggtttgaatgtttcgacagtgtgacatcaatacttttccttgtttcctcaagtgaatttgaccaggtgcttatggaagatcgactgaccaatcgccttacagagtctctgaacatttttgaaacaatcgtcaataaccgggttttcagcaatgtctccataattctgttcttaaacaagacagacttgcttgaggagaaggtgcaaattgtgagcatcaaagactatttcctagaatttgaaggggatccccactgcttaagagacgtccaaaaattcctggtggaatgtttccggaacaaacgccgggaccagcaacagaagcccttataccaccacttcaccactgctatcaacacggagaacatccgccttgttttccgtgacgtgaaggatactattctgcatgacaacctcaagcagcttatgctacagtgatgtacaaaagacttgctgttttaatatctttttgtgtttttgatgttttctgtttgttttgttttttaaaatagcagtttacaaccagaattagaacaatcttaattctacgtttaacttcttgaaaatcttagtactttttctgcggcctttggtttgtggctgaaagctgttgagtgactcatcgccaagatttgctgtaatgcaggctttgatctgtttcaccatggcttctattcaagtccagttaaaacctcccagctgacctcagactaggcatatttcaggctttaaattattctactttccaaactgaattctcctgcagtgccaagtatcaaaggtgtccttaaatacttgtagggatgaggttaggaatattcagttccaaaacaagatatcttctgtccgccttacatatagcagtgacacttgttgcctaactttatggtgacctcctattttgtaa

SEQ ID NO: 101251 - DNA, 849 bp, Artificial Sequence
  derived and/or modified sequence
atgagggtgctggtggatgcccgggagaagctgcacatcccctggggagacaacagcaaccagcagcacggggacaagatgatgagctttgacacccgggcccccatggccgcccagggcatggtggagaccagggtcttcctgcagtacctgcctgccatccgggccctgtgggccgacagcggcatccagaatgcctatgacagaagaagagagttccagctgggggagagcgtgaagtacttcctggacaacctggacaagctgggggagccagactacatccccagccagcaggacatcctgctggcccggcggcccaccaagggcatccacgagtatgactttgagatcaagaatgtgcccttcaagatggtggatgtgggcggccagaggtctgagaggaagcgctggtttgagtgctttgacagcgtgaccagcatcctcttcctggtgagcagcagcgagtttgaccaggtgctgatggaggaccggctgaccaaccggctgacagagagcctgaacatctttgagaccatcgtgaacaacagagtcttcagcaatgtgtccatcatcctcttcctgaacaagacagacctgctggaggagaaggtgcagatcgtgtccatcaaggactacttcctggagtttgaaggagacccccactgcctgagagatgtgcagaagttcctggtggagtgcttcaggaacaagagaagagaccagcagcagaagcccctgtaccaccacttcaccacagccatcaacacagagaacatccggctggtgttcagagatgtgaaggacaccatcctgcatgacaacctgaagcagctgatgctgcagtag

SEQ ID NO: 101252 - DNA, 849 bp, Artificial Sequence
  derived and/or modified sequence
atgcgggtgctggtggacgcccgggagaagctgcacatcccctggggagataatagcaaccagcagcatggggacaaaatgatgtccttcgatactcgagcaccaatggctgctcaggggatggtagagacgcgagtgttcttgcagtatctacctgccattagagcactttgggcagattccggaattcagaatgcctacgatcgtaggcgcgaattccagctgggagaatcagtcaagtacttccttgataacctcgataagttaggtgagcctgattatattcccagccagcaggatatcctgttagccaggcggcccactaagggcatccacgaatacgactttgaaatcaaaaatgtgccatttaagatggtagacgttggtggccagagatcggagcgtaagagatggtttgagtgcttcgattccgtgaccagcatactgttcctggtgagttcgtccgagtttgaccaggtgctgatggaagatagattgacgaaccgactcaccgagtcactgaacatcttcgaaacaatagtgaacaacagagtgttctccaatgttagtatcatcctgtttttgaacaagacggacctcctcgaggagaaagtacagatcgttagcataaaggattacttcttagagtttgaaggcgatccacactgcctacgcgacgttcagaagtttctggtcgaatgtttccgcaataaacggcgggatcagcagcagaaacccctgtatcatcacttcacaacggcaattaacacggagaacatacgcctagtgttccgagacgtcaaagacactatcttgcacgacaacctgaagcagcttatgctgcagtag

SEQ ID NO: 101253 - DNA, 849 bp, Artificial Sequence
  derived and/or modified sequence
atgagggtgttggtagacgccagagaaaagctgcatattccctggggcgacaatagcaaccagcagcacggcgataaaatgatgagctttgacacccgagcgcctatggcagctcagggaatggtggaaaccagggttttcctccagtatcttcctgctatcagggctctttgggctgactctgggatccagaatgcctatgatcgacggcgtgagtttcagttaggggagagtgtgaagtattttttagacaatctggataagctgggggaaccagactacattccctcacaacaggacatcctgttagcacggcgaccaactaaaggaatccatgaatatgactttgagatcaaaaatgttccatttaaaatggttgacgtcggtggccaacgatcagagcggaaaagatggtttgagtgctttgactctgtcacttctatactctttttggtgagctcgtccgagttcgaccaagtcctgatggaagaccggctaacaaatagactgacggaatctcttaatattttcgagactattgtcaacaaccgtgtgttctccaatgttagcataattctgtttctgaataagaccgatctcctggaggaaaaggttcagatagtgtccatcaaggactattttcttgagtttgagggagatccccattgtctgcgagatgtgcaaaagttcttagtcgaatgtttccgaaataaacgcagggaccaacagcaaaagcctttgtaccatcactttaccactgctattaataccgagaacattcgcctagtgtttcgtgatgtcaaggatactatactgcacgacaatctgaaacagctgatgctacaatag

SEQ ID NO: 101254 - DNA, 849 bp, Artificial Sequence
  derived and/or modified sequence
atgagagtgctggtggacgccagagagaagctgcacatcccctggggcgacaacagcaaccagcagcacggcgacaagatgatgagcttcgacaccagagcccccatggccgcccagggcatggtggagaccagagtgttcctgcagtacctgcccgccatcagagccctgtgggccgacagcggcatccagaacgcctacgacagaagaagagagttccagctgggcgagagcgtgaagtacttcctggacaacctggacaagctgggcgagcccgactacatccccagccagcaggacatcctgctggccagaagacccaccaagggcatccacgagtacgacttcgagatcaagaacgtgcccttcaagatggtggacgtgggcggccagagaagcgagagaaagagatggttcgagtgcttcgacagcgtgaccagcatcctgttcctggtgagcagcagcgagttcgaccaggtgctgatggaggacagactgaccaacagactgaccgagagcctgaacatcttcgagaccatcgtgaacaacagagtgttcagcaacgtgagcatcatcctgttcctgaacaagaccgacctgctggaggagaaggtgcagatcgtgagcatcaaggactacttcctggagttcgagggcgacccccactgcctgagagacgtgcagaagttcctggtggagtgcttcagaaacaagagaagagaccagcagcagaagcccctgtaccaccacttcaccaccgccatcaacaccgagaacatcagactggtgttcagagacgtgaaggacaccatcctgcacgacaacctgaagcagctgatgctgcagtag

SEQ ID NO: 101255 - protein, 1102 aa, Artificial Sequence
  derived and/or modified sequence
MELENYKQPVVLREDNCRRRRRMKPRSAAASLSSMELIPIEFVLPTSQRKCKSPETALLHVAGHGNVEQMKAQVWLRALETSVAADFYHRLGPHHFLLLYQKKGQWYEIYDKYQVVQTLDCLRYWKATHRSPGQIHLVQRHPPSEESQAFQRQLTALIGYDVTDVSNVHDDELEFTRRGLVTPRMAEVASRDPKLYAMHPWVTSKPLPEYLWKKIANNCIFIVIHRSTTSQTIKVSPDDTPGAILQSFFTKMAKKKSLMDIPESQSEQDFVLRVCGRDEYLVGETPIKNFQWVRHCLKNGEEIHVVLDTPPDPALDEVRKEEWPLVDDCTGVTGYHEQLTIHGKDHESVFTVSLWDCDRKFRVKIRGIDIPVLPRNTDLTVFVEANIQHGQQVLCQRRTSPKPFTEEVLWNVWLEFSIKIKDLPKGALLNLQIYCGKAPALSSKASAESPSSESKGKVQLLYYVNLLLIDHRFLLRRGEYVLHMWQISGKGEDQGSFNADKLTSATNPDKENSMSISILLDNYCHPIALPKHQPTPDPEGDRVRAEMPNQLRKQLEAIIATDPLNPLTAEDKELLWHFRYESLKHPKAYPKLFSSVKWGQQEIVAKTYQLLARREVWDQSALDVGLTMQLLDCNFSDENVRAIAVQKLESLEDDDVLHYLLQLVQAVKFEPYHDSALARFLLKRGLRNKRIGHFLFWFLRSEIAQSRHYQQRFAVILEAYLRGCGTAMLHDFTQQVQVIEMLQKVTLDIKSLSAEKYDVSSQVISQLKQKLENLQNSQLPESFRVPYDPGLKAGALAIEKCKVMASKKKPLWLEFKCADPTALSNETIGIIFKHGDDLRQDMLILQILRIMESIWETESLDLCLLPYGCISTGDKIGMIEIVKDATTIAKIQQSTVGNTGAFKDEVLNHWLKEKSPTEEKFQAAVERFVYSCAGYCVATFVLGIGDRHNDNIMITETGNLFHIDFGHILGNYKSFLGINKERVPFVLTPDFLFVMGTSGKKTSPHFQKFQDICVKAYLALRHHTNLLIILFSMMLMTGMPQLTSKEDIEYIRDALTVGKNEEDAKKYFLDQIEVCRDKGWTVQFNWFLHLVLGIKQGEKHSA

SEQ ID NO: 101256 - DNA, 3309 bp, Artificial Sequence
  derived and/or modified sequence
atggagctggagaactacaagcagcccgtggtgctgagagaggacaactgcagaagaagaagaagaatgaagcccagaagcgccgccgccagcctgagcagcatggagctgatccccatcgagttcgtgctgcccaccagccagagaaagtgcaagagccccgagaccgccctgctgcacgtggccggccacggcaacgtggagcagatgaaggcccaggtgtggctgagagccctggagaccagcgtggccgccgacttctaccacagactgggcccccaccacttcctgctgctgtaccagaagaagggccagtggtacgagatctacgacaagtaccaggtggtgcagaccctggactgcctgagatactggaaggccacccacagaagccccggccagatccacctggtgcagagacacccccccagcgaggagagccaggccttccagagacagctgaccgccctgatcggctacgacgtgaccgacgtgagcaacgtgcacgacgacgagctggagttcaccagaagaggcctggtgacccccagaatggccgaggtggccagcagagaccccaagctgtacgccatgcacccctgggtgaccagcaagcccctgcccgagtacctgtggaagaagatcgccaacaactgcatcttcatcgtgatccacagaagcaccaccagccagaccatcaaggtgagccccgacgacacccccggcgccatcctgcagagcttcttcaccaagatggccaagaagaagagcctgatggacatccccgagagccagagcgagcaggacttcgtgctgagagtgtgcggcagagacgagtacctggtgggcgagacccccatcaagaacttccagtgggtgagacactgcctgaagaacggcgaggagatccacgtggtgctggacaccccccccgaccccgccctggacgaggtgagaaaggaggagtggcccctggtggacgactgcaccggcgtgaccggctaccacgagcagctgaccatccacggcaaggaccacgagagcgtgttcaccgtgagcctgtgggactgcgacagaaagttcagagtgaagatcagaggcatcgacatccccgtgctgcccagaaacaccgacctgaccgtgttcgtggaggccaacatccagcacggccagcaggtgctgtgccagagaagaaccagccccaagcccttcaccgaggaggtgctgtggaacgtgtggctggagttcagcatcaagatcaaggacctgcccaagggcgccctgctgaacctgcagatctactgcggcaaggcccccgccctgagcagcaaggccagcgccgagagccccagcagcgagagcaagggcaaggtgcagctgctgtactacgtgaacctgctgctgatcgaccacagattcctgctgagaagaggcgagtacgtgctgcacatgtggcagatcagcggcaagggcgaggaccagggcagcttcaacgccgacaagctgaccagcgccaccaaccccgacaaggagaacagcatgagcatcagcatcctgctggacaactactgccaccccatcgccctgcccaagcaccagcccacccccgaccccgagggcgacagagtgagagccgagatgcccaaccagctgagaaagcagctggaggccatcatcgccaccgaccccctgaaccccctgaccgccgaggacaaggagctgctgtggcacttcagatacgagagcctgaagcaccccaaggcctaccccaagctgttcagcagcgtgaagtggggccagcaggagatcgtggccaagacctaccagctgctggccagaagagaggtgtgggaccagagcgccctggacgtgggcctgaccatgcagctgctggactgcaacttcagcgacgagaacgtgagagccatcgccgtgcagaagctggagagcctggaggacgacgacgtgctgcactacctgctgcagctggtgcaggccgtgaagttcgagccctaccacgacagcgccctggccagattcctgctgaagagaggcctgagaaacaagagaatcggccacttcctgttctggttcctgagaagcgagatcgcccagagcagacactaccagcagagattcgccgtgatcctggaggcctacctgagaggctgcggcaccgccatgctgcacgacttcacccagcaggtgcaggtgatcgagatgctgcagaaggtgaccctggacatcaagagcctgagcgccgagaagtacgacgtgagcagccaggtgatcagccagctgaagcagaagctggagaacctgcagaacagccagctgcccgagagcttcagagtgccctacgaccccggcctgaaggccggcgccctggccatcgagaagtgcaaggtgatggccagcaagaagaagcccctgtggctggagttcaagtgcgccgaccccaccgccctgagcaacgagaccatcggcatcatcttcaagcacggcgacgacctgagacaggacatgctgatcctgcagatcctgagaatcatggagagcatctgggagaccgagagcctggacctgtgcctgctgccctacggctgcatcagcaccggcgacaagatcggcatgatcgagatcgtgaaggacgccaccaccatcgccaagatccagcagagcaccgtgggcaacaccggcgccttcaaggacgaggtgctgaaccactggctgaaggagaagagccccaccgaggagaagttccaggccgccgtggagagattcgtgtacagctgcgccggctactgcgtggccaccttcgtgctgggcatcggcgacagacacaacgacaacatcatgatcaccgagaccggcaacctgttccacatcgacttcggccacatcctgggcaactacaagagcttcctgggcatcaacaaggagagagtgcccttcgtgctgacccccgacttcctgttcgtgatgggcaccagcggcaagaagaccagcccccacttccagaagttccaggacatctgcgtgaaggcctacctggccctgagacaccacaccaacctgctgatcatcctgttcagcatgatgctgatgaccggcatgccccagctgaccagcaaggaggacatcgagtacatcagagacgccctgaccgtgggcaagaacgaggaggacgccaagaagtacttcctggaccagatcgaggtgtgcagagacaagggctggaccgtgcagttcaactggttcctgcacctggtgctgggcatcaagcagggcgagaagcacagcgcctag

SEQ ID NO: 101257 - DNA, 3309 bp, Artificial Sequence
  derived and/or modified sequence
atggagctcgaaaactataaacagcccgtcgtgctacgggaggataattgtcggaggcgccggagaatgaagcccaggtccgccgccgccagcctcagttctatggaactgattccaatcgagttcgtgctgcctacatcacaacgcaaatgcaaatcaccagaaactgccctgcttcatgtggccgggcacggaaacgtggagcagatgaaggcccaggtgtggctcagagcccttgagacatccgttgcagctgacttctaccaccggctggggcctcatcactttttgctgttgtaccagaagaaaggccaatggtatgaaatctatgacaaataccaggtcgtccaaaccttggactgtctccgctactggaaggccacccatcgaagcccagggcagatccacttggttcaaagacatccaccaagcgaggaatcccaggcatttcagcggcagctcacagccctcatcgggtatgatgtcactgacgtctccaatgttcatgacgacgaactagagtttactcgccgcggcctggtgacaccccgcatggcagaggtggcctccagggaccccaaactgtatgcaatgcatccttgggttactagcaagccgttgcctgaatacctgtggaagaaaattgcgaacaattgtatattcatcgtgattcatcgcagcaccacttcacagaccataaaggtgtccccagacgacacccctggcgctattctgcagagcttcttcactaagatggcgaaaaaaaagtctttgatggacatcccagagtcccaatccgagcaggacttcgtcctgcgcgtatgcggaagagacgagtatctcgttggggagacgccaataaaaaactttcagtgggtgcgccattgtctgaagaacggcgaagagattcatgtagtgctggatactcccccagatccagcgctcgatgaggtccgtaaagaggagtggcccttagtagacgattgtaccggggtgaccggttaccacgagcagctgacaattcatggcaaagatcacgagtctgtctttaccgtgagcttatgggactgcgaccgaaaattccgtgtgaagataaggggcatcgacattcctgtgctccctaggaacaccgacctcacagtgtttgtggaggctaatatccagcacggacagcaagtgctctgccagagaagaactagtccaaagcccttcacagaggaggtgctgtggaacgtgtggctggaattctctatcaaaatcaaagaccttcccaagggagccctacttaatctgcagatctattgcggaaaggccccagccctctcctcgaaggcgagcgctgagtccccctcaagcgagagcaaagggaaagtgcagttgctgtattacgttaatctgctacttattgatcaccggtttcttctgcggcgaggagagtacgtgttacacatgtggcagatctcaggtaaaggcgaagatcagggcagtttcaatgccgataagctcacgtccgctacaaaccctgacaaggagaatagcatgagcatcagtatcttgctggacaattactgccaccccattgcccttcccaaacaccagcccacacccgaccccgaaggcgatcgtgtgagggcagaaatgcccaatcagcttaggaaacagctcgaggccatcattgccacagatccgttaaatccacttaccgccgaagacaaagaactgttgtggcacttcagatacgaatcactaaaacaccctaaggcctaccccaagctcttctccagcgtgaaatggggacaacaggaaattgtcgcaaaaacctaccaacttctagctcgtcgcgaagtctgggatcagtccgcactcgacgtcgggctaactatgcagctcctcgattgcaacttctctgatgagaacgtacgggctatcgcggttcagaaattggagtccctggaggatgatgatgttcttcactaccttcttcagctggtccaagctgtgaaattcgaaccgtatcacgacagcgctctggcccgtttcctgctgaagcggggactacggaataaaagaattggccacttccttttctggttcctcaggtcagagattgcacagagtcgccactaccagcaaagatttgccgtgatcctggaagcctacttgcgggggtgcggcacggctatgcttcatgattttacacagcaggtgcaagtcattgaaatgctgcagaaagttacgctggacattaagtccctgagcgccgagaagtacgacgtctccagtcaagtgataagtcagctaaaacagaaactcgagaatttacagaactctcagctgccagagtcctttcgcgtgccctacgatccaggccttaaggctggcgccttagctatcgaaaagtgcaaggtcatggcatccaaaaagaaacccttatggctggagttcaaatgcgccgatcccacagccctgtctaatgagacaatcgggattatcttcaaacatggcgacgaccttagacaggatatgctgattcttcagatactgcgaatcatggagagtatctgggaaacagaaagcctcgatctttgtctgctcccatacgggtgtattagcactggcgataagattggaatgatcgagatcgttaaagatgctaccactatagcaaaaattcagcagtccacagtgggcaacaccggggctttcaaggacgaagtcttgaaccactggctgaaggaaaaatcgcctactgaggagaagttccaggctgcagtggagagattcgtgtatagttgcgctggctactgcgtggccacgttcgtactgggcattggtgatcgccataatgataatataatgattaccgaaacaggcaacctgtttcatattgatttcggccacatactgggtaattacaagagctttctcggcatcaacaaggagagggtgcctttcgtgctgacaccagactttctgttcgtgatggggacaagcggaaaaaagacatccccccactttcagaagtttcaggatatctgtgtgaaggcctatctggccttacgccaccacactaacttgctcatcatcctcttctctatgatgttgatgaccgggatgccacaactcacgtcaaaagaggacattgagtacatacgtgatgccctcaccgttggaaaaaacgaggaggatgctaagaagtactttctggatcaaatcgaggtttgtcgggacaaaggctggacggttcagtttaattggttcctgcacttagttctcggaattaagcagggggagaaacacagtgcctag

SEQ ID NO: 101258 - DNA, 3309 bp, Artificial Sequence
  derived and/or modified sequence
atggagctggagaattataagcagccagttgtcctgagagaagacaattgccgcagacgaagacggatgaaaccccgcagtgcagccgcttccctgtcctccatggagctgatcccaatcgaatttgttctgcccacatcccagcgcaaatgcaaaagcccagagactgctctgttgcacgtggcgggacatggcaatgttgaacagatgaaagcccaagtttggctgagggccctagagaccagcgttgccgctgatttttaccaccggttaggcccacatcattttctcctcctgtaccagaagaagggccagtggtacgaaatctacgacaaataccaggtggttcagactctggattgtctcaggtattggaaagctacccatagatctcccgggcagattcacttagtgcaacggcaccctccatctgaagagagccaggcctttcagaggcaactcactgccctcatcggctatgatgtgaccgatgtatccaacgtacatgacgacgaactggagttcacacgcagagggctggtgaccccaaggatggcggaagtggcttcccgcgacccaaaactctatgccatgcacccttgggttacgagcaagccattacctgagtacctgtggaaaaagatcgctaataattgtatcttcattgtgatacaccggtctaccacatcccagacaatcaaggtcagccccgacgacacgccaggcgccattctgcagagcttttttaccaaaatggcaaagaaaaaaagccttatggatatcccggagagccagtccgaacaggacttcgttctccgcgtgtgcggccgtgatgagtacctagttggggaaactcccatcaagaacttccaatgggtgcggcactgcttgaaaaatggagaggagatccatgtcgtgcttgacacacctccagatcccgcacttgacgaggtgcgcaaggaagagtggcctctggtggatgattgcacgggagttacaggctatcatgagcagctcaccatccatggtaaagatcacgagagtgtctttaccgtatcactatgggattgtgaccgtaaattcagagtcaaaatccgaggtattgatatccccgtgttgccacgcaacacggatctcaccgtttttgtcgaagctaatatccaacacgggcaacaggtcctgtgccagcggagaactagcccaaaaccttttaccgaagaagtgttgtggaacgtttggttggagtttagcatcaagattaaagacttgccaaagggggccttgctgaatttgcagatctattgcggtaaagcccccgctcttagttcaaaagcaagcgctgagtcacccagctctgagagcaaggggaaggtgcagctgctgtactacgtcaatctgctgctgattgaccacaggttccttcttcggcgtggagagtacgtccttcacatgtggcagatttccggaaagggcgaagatcagggtagcttcaacgctgacaaattgactagcgcaactaatccggacaaagagaacagtatgagtatctcaatcctgttggataattactgccacccgatagccctccccaaacatcaacctacccccgaccctgaaggagaccgcgttcgagccgagatgcctaatcaactgagaaaacagctggaggcgatcattgccaccgaccctttgaatcctctgaccgctgaagacaaggaacttttgtggcacttccgatatgagagtctgaagcatcccaaagcctacccaaaattattcagtagcgtgaagtggggacagcaggaaattgtcgcgaagacataccaactgctcgcccgccgcgaagtttgggatcagtctgctctcgatgtgggcctcaccatgcagctactggactgcaacttttctgatgagaacgtgagggcgatcgccgtacaaaagctcgagagtctggaagacgatgatgtcctacactacctgctgcagctcgtccaggcagtgaaatttgagccctaccatgactctgccctggctcggttccttctcaaaagaggcctgcgaaataaaaggataggccactttttattttggtttttgagaagcgaaattgctcaaagtcggcactatcagcagcggttcgccgtcattttagaagcctacctaaggggttgcggtacagcaatgttgcatgatttcactcaacaggtccaagttatcgaaatgttgcaaaaagtgactctggatatcaaatcactcagcgcggagaagtatgacgtcagttctcaggtcatcagtcagctgaaacagaaactcgaaaacttgcagaatagccagctgccggagagcttccgagtcccttacgaccctgggctgaaagcaggcgcactggcaatagagaagtgcaaggtgatggcatctaagaaaaagccactgtggctggagtttaaatgcgcggatccgacggcacttagtaatgagactatcgggatcatatttaaacacggggatgacctccgacaagacatgttgattttgcagatcctgcgcattatggagtctatttgggaaacagaatccctcgacctgtgtctactcccatacggttgtatcagcacaggggacaagatcggaatgattgaaattgttaaggacgctaccacaattgccaaaatacagcaaagcactgtcggcaacactggggcattcaaggacgaagtgttgaaccattggcttaaagaaaaatccccaaccgaggaaaagttccaggctgccgtggaacggtttgtgtatagttgcgcaggatattgcgtcgcgacattcgtgctcggaatcggagatcgacataatgataacatcatgattacagaaactggaaacttatttcatatcgactttggacacatcctcgggaactacaaatcttttctgggaattaataaagagcgggttccctttgtattgactcccgactttctgttcgtgatggggaccagcggtaaaaagaccagcccccattttcagaaattccaggatatctgtgttaaggcctacttggccctgcgacatcacacaaatctactgataattttgttctccatgatgctaatgactggcatgccacagttaactagtaaggaggacatcgaatacatacgcgatgcactgaccgtggggaagaatgaagaggacgctaagaaatacttcctggaccagatcgaggtgtgccgggacaaagggtggaccgttcagttcaattggtttctccatctggtgctcggcatcaagcagggagagaaacattctgcctag

SEQ ID NO: 101259 - DNA, 3309 bp, Artificial Sequence
  derived and/or modified sequence
atggagctcgaaaactataagcagcccgtcgtactccgcgaagacaactgtcgcaggcggagacgaatgaaacccaggagtgctgccgcttcactgagttccatggagcttatccccatcgagttcgtcctgcctacatcccaacgaaaatgtaaaagccctgaaactgcccttctgcatgtggcaggccacggaaatgtcgagcaaatgaaggctcaggtttggctgcgagctctagaaaccagtgtggccgccgatttctatcacaggctgggtccccatcattttcttctcctttaccagaagaagggccaatggtatgagatctacgacaagtatcaggtcgtgcagacgttagactgtctccggtactggaaagccacgcacaggtcacccggccagattcacctggtgcaaaggcatccgcctagcgaggaaagtcaggcttttcagaggcagcttacggctttaatcggttacgacgtcactgatgtttcaaacgtgcatgacgacgagctggagtttacccggcgaggtctcgtgacccccagaatggctgaagttgctagtcgcgatccaaaactctacgcaatgcacccttgggttactagcaaacctctgcctgagtacctatggaaaaagatcgctaataattgcatcttcattgtgatacacagaagtaccacctctcaaactataaaagtctccccggatgatactcccggagcgattctccagagcttcttcaccaaaatggccaaaaaaaagagcctgatggatatacccgaatctcagagtgaacaggatttcgttttaagagtctgtggacgagatgagtatttggttggcgaaacccccattaagaacttccagtgggtgcgccactgtctaaagaacggagaagagatccatgtggtgctcgacacgcctcctgatccagccctggatgaagtcaggaaggaggaatggccgcttgtagatgactgcacgggggtaactggctatcatgaacaactgaccattcacggcaaggatcatgagtcagtcttcaccgtgtctttgtgggattgcgatcgcaaattcagagtaaaaatcagaggtattgacatcccggtgctgcctagaaacacagatcttacagttttcgtggaagccaacatccagcacggccaacaggtgctctgtcaacggcggacttcccccaaaccgttcacagaagaagttctgtggaatgtatggctggagttctccatcaagataaaagatctacctaagggggcacttctcaatcttcagatatattgcgggaaagctcctgccctatcctcgaaggccagcgcggagagtcccagctcagagagtaagggcaaagtgcagttgctgtactacgtcaatctgcttttgatcgatcaccgcttcctgctcaggagaggcgagtatgtgctccacatgtggcagatatccggtaagggggaggaccagggcagcttcaacgccgataaactgacttcggcaaccaaccccgacaaagagaactcaatgagcatttctatcctcttggataattattgtcaccctatcgccctaccaaagcatcagccaactccagatcctgagggggaccgggttagggcagagatgcccaaccagttgcgcaaacagcttgaggccatcatagccactgaccccctcaacccattgaccgcagaggacaaggaactgctgtggcacttcaggtacgagtcactcaagcacccgaaggcatacccaaaactgttttcatctgtgaagtggggccagcaagagattgtcgctaaaacataccagttacttgctcgacgagaagtctgggaccagtccgctctggatgtgggcctgaccatgcagctgctcgactgcaacttctctgacgagaatgtcagagccattgctgttcagaagttggagagcctcgaggatgatgacgtgctgcactaccttcttcagctcgtgcaggctgtaaaatttgagccctaccatgactccgccctcgccaggtttctgctaaagagggggcttcgcaacaagcgcattgggcactttttgttctggtttctgcgcagtgagatcgcccaatcccgccactatcagcagcgcttcgcggtcattctggaagcctacctaagagggtgtggtaccgcgatgctccacgatttcactcagcaagtgcaagttatagagatgctccagaaggtcactcttgacataaagtcactcagtgccgaaaagtatgatgtcagctcccaggtcatatcacagctaaaacagaagctggagaatctgcaaaactcacagctgcccgaatcattcagagtgccctatgaccctggtctgaaagctggggctctcgccattgagaagtgcaaggtgatggcctccaaaaagaaacccctgtggctagagttcaagtgcgctgatcctactgctttgtccaatgagactataggaatcattttcaaacatggggacgatctgagacaggatatgttgattttgcaaatcctcaggattatggaatctatatgggagactgagagccttgacctctgcctactcccttacggttgcatcagcactggggacaagatcggcatgatcgaaattgttaaagacgccaccactattgccaagattcaacagagcaccgttgggaataccggcgctttcaaagatgaggttttgaaccactggctaaaagagaagtcacccaccgaagaaaagtttcaagccgcagtcgaaaggttcgtttactcctgcgccggttactgtgtcgcgacctttgtcttgggaatcggagacagacataatgacaacattatgattaccgagacgggtaacttgtttcatattgacttcggtcatattctggggaactataaatcttttttgggaatcaataaggaacgggtgccattcgtgcttacgcccgattttctgttcgtgatggggacatctggcaaaaagacatccccccacttccagaagttccaggacatctgcgtgaaagcgtacttagccttgcgccaccacaccaacctgctgattatactgttctcaatgatgctcatgactgggatgcctcagctcacatccaaggaggatatcgaatatatccgggacgccctgacggttggcaaaaatgaggaggacgccaaaaaatattttctcgatcagatcgaggtttgtcgggacaaaggctggaccgtgcagtttaactggtttctacaccttgtactggggatcaagcagggggaaaagcactctgcttag

SEQ ID NO: 101260 - DNA, 3309 bp, Artificial Sequence
  derived and/or modified sequence
atggagctggagaactacaagcagcctgtggtgctgcgggaggacaactgcagaagaagaagaaggatgaagcccaggtctgctgctgccagcctgagctccatggagctgatccccatcgagtttgtgctgcccaccagccagaggaagtgcaagagccctgagacagccctgctgcacgtggccggccacggcaatgtggagcagatgaaggcccaggtgtggctgcgggccctggagacctctgtggccgctgacttctaccaccggctgggcccccaccacttcctgctgctgtaccagaagaagggccagtggtatgagatctatgacaagtaccaggtggtgcagaccctggactgcctgcgctactggaaggccacccacaggagccctggccagatccacctggtgcagaggcacccccccagcgaggagagccaggccttccagaggcagctgacagccctgattggctatgatgtgacagatgtgtccaatgtgcatgatgatgagctggagttcacccggcggggcctggtgacccccaggatggccgaggtggccagccgggaccccaagctgtatgccatgcacccctgggtgaccagcaagcccctgcctgagtacctgtggaagaagatcgccaacaactgcatcttcatcgtcatccacaggagcaccaccagccagaccatcaaggtgtccccagatgacacccctggggccatcctgcagagcttcttcaccaagatggccaagaagaagagcctgatggacatccctgagagccagagcgagcaggactttgtgctgcgggtgtgtggcagagatgagtacctggtgggggagacccccatcaagaacttccagtgggtgcgccactgcctgaagaatggagaggagatccacgtggtgctggacaccccaccagaccctgccctggatgaggtgaggaaggaggagtggcccctggtggatgactgcaccggggtgacaggctaccacgagcagctgaccatccacggcaaggaccacgagagcgtcttcaccgtgtccctgtgggactgtgacaggaagttccgggtgaagatccggggcatcgacatccctgtgctgcccaggaacacagacctgactgtgtttgtggaggccaacatccagcacggccagcaggtgctgtgccagaggaggaccagccccaagcccttcacagaggaggtgctgtggaatgtgtggctggagttcagcatcaagatcaaggacctgcccaagggggccctgctgaacctgcagatctactgcggcaaggccccagccctgagcagcaaggccagcgctgagagccccagcagcgagagcaagggcaaggtgcagctgctgtactacgtgaacctgctgctgattgaccaccgcttcctgctgcggcggggggagtatgtgctgcacatgtggcagatcagcggcaagggggaggaccagggcagcttcaatgctgacaagctgaccagcgccaccaacccagacaaggaaaattccatgagcatcagcatcctgctggacaactactgccaccccatcgccctgcccaagcaccagcccaccccagaccctgagggggacagagtgcgggcagagatgcccaaccagctgaggaagcagctggaggccatcatcgccacagaccccctgaaccccctgacagctgaggacaaggagctgctgtggcacttccgctatgagagcctgaagcaccccaaggcctaccccaagctgttcagctctgtgaagtggggccagcaggagatcgtggccaagacctaccagctgctggcccggcgggaggtgtgggaccagagcgccctggatgtgggcctgaccatgcagctgctggactgcaacttcagtgatgaaaatgtgcgggccatcgctgtgcagaagctggagagcctggaggatgatgatgtgctgcactacctgctgcagctggtgcaggccgtgaagtttgagccctaccatgattctgccctggcccgcttcctgctgaagaggggcctgaggaacaagagaattggccacttcctgttctggttcctgcggagtgaaattgcccagagccgccactaccagcagagatttgctgtgatcctggaggcctacctgcggggctgcggcacagccatgctgcatgacttcacccagcaggtgcaggtgattgagatgctgcagaaggtgaccctggacatcaagagcctgtctgctgagaagtatgatgtgagcagccaggtgatcagccagctgaagcagaagctggagaacctgcagaacagccagctgcctgagagcttccgggtgccctatgaccccggcctgaaggccggggccctggccatcgagaagtgcaaggtgatggccagcaagaagaagcccctgtggctggagttcaagtgtgccgaccccacagccctgagcaatgagaccatcggcatcatcttcaagcatggagatgacctgcggcaggacatgctgatcctgcagatcctgcgcatcatggagagcatctgggagacagagagcctggacctgtgcctgctgccctacggctgcatcagcactggagacaagattggcatgattgaaattgtgaaggatgccaccaccatcgccaagatccagcagagcacagtgggcaacacaggagccttcaaggatgaggtgctgaaccactggctgaaggagaagagccccacagaggagaagttccaggccgctgtggagagatttgtgtacagctgtgccggctactgtgtggccacctttgtgctgggcatcggggacagacacaatgacaacatcatgatcacagaaacaggcaacctcttccacatcgactttggccacatcctgggcaactacaagagcttcctgggcatcaacaaggagcgggtgccctttgtgctgaccccagacttcctgtttgtgatgggcaccagcggcaagaagaccagcccccacttccagaagttccaggacatctgtgtgaaggcctacctggccctgcggcaccacaccaacctgctgatcatcctcttctccatgatgctgatgacaggcatgccccagctgaccagcaaggaggacatcgagtacatcagagatgccctgactgtgggcaagaatgaggaggatgccaagaagtacttcctggaccagatcgaggtgtgccgggacaagggctggacagtgcagttcaactggttcctgcacctggtgctgggcatcaagcagggcgagaagcacagcgcctag

SEQ ID NO: 101261 - DNA, 3309 bp, Artificial Sequence
  derived and/or modified sequence
atggagctggagaactacaagcagcccgtggtgctgcgggaggacaactgcagacgtagacgcaggatgaagccccgcagtgcagccgctagcctgtcaagtatggaacttatcccaattgagttcgtgcttcccacttcgcagcggaagtgcaagtcgcccgaaacagctctgctccacgtggcaggtcacggaaatgtcgagcagatgaaggcacaggtctggttgagggccttggagaccagtgtcgctgccgacttttatcaccgcttagggccccatcactttctgctgctatatcagaaaaaaggacaatggtatgaaatttatgataaataccaagtagtacagacacttgactgcctaaggtattggaaggcaacccacagaagtcccggtcagatccacctggtgcagaggcaccctccttccgaggagtcccaggctttccaaaggcagctcacagccctgatcggctatgacgtgaccgatgtctcaaatgtgcacgatgacgagctggaattcactcgcaggggtttggtgacccctcgtatggccgaggttgcgtcccgggacccgaaactgtatgccatgcacccctgggtgacatctaaacctctcccagagtacctctggaagaaaattgctaataattgcatcttcatagtgatccacaggagcactaccagtcagaccataaaggtcagccctgatgataccccaggagcaatcttacagagtttcttcaccaaaatggccaagaagaagtcacttatggacatccccgaatcccagagcgagcaggacttcgtgctgcgcgtctgtggcagagacgaatatctcgtaggggaaacacccataaagaatttccaatgggttaggcactgtctcaaaaacggggaagaaatacatgtggtattggatacaccaccagacccggccctggacgaggtacgcaaggaagaatggcccctggtggacgattgcaccggggttaccgggtaccatgaacagctgaccattcatggcaaagatcacgagagtgtcttcactgtgagcttgtgggattgcgatcggaaattccgggtgaagattcgcggaatcgacattcccgttctgcctcgcaacacagacttaacagtgttcgtagaggcgaatattcagcacgggcaacaggttctctgccaacgcaggacttctccgaagccatttactgaggaagtgctgtggaacgtatggctggaatttagtattaaaattaaagacctgccaaagggagcccttctgaatctccagatttactgcggcaaggcccctgccctctcttccaaggctagcgcagaaagtccctcctctgagtccaaggggaaagttcaactactgtactatgtcaacctactactaatcgaccataggttcctgctgagaaggggggagtacgtcctccacatgtggcagatttcaggaaagggcgaggatcaggggtcctttaacgcagataagctgacatctgctaccaatcctgataaagagaactccatgagcatttcaattctgctcgacaactactgccatcccattgcccttccaaaacaccagccaacacccgatccggagggggaccgtgtgagagccgagatgcccaaccaattgcgcaagcagttggaagcaatcatcgccactgacccccttaaccccctgactgcagaggataaagaactcctgtggcacttccgctatgagtccctcaaacaccctaaggcctaccctaaactgttctcatccgttaagtggggccagcaggaaattgtggcgaagacataccaactgctggctagacgcgaggtctgggatcagagcgcactggatgtcgggcttaccatgcagcttttagattgtaacttctctgatgaaaacgtacgagccatagctgttcaaaaactggagagcctcgaggacgacgacgtcctgcattatctcctgcagctcgttcaggcggtaaagttcgaaccctatcatgactctgcgctcgcccgattcttattgaaaagaggactgagaaataagcgcataggccactttctgttttggttcctccgcagcgaaatagctcagagtcggcactaccagcagagatttgccgtgattctcgaggcttacctgagagggtgtggaacagccatgcttcatgatttcacccagcaagtgcaggttattgagatgttgcagaaagtgactctagatattaaatctcttagcgcagaaaagtatgacgttagtagccaggtgatctctcagctgaagcagaaactggagaacctgcagaattctcagcttcctgagtcgttccgggtaccctatgacccaggcctgaaggcaggcgcattagccattgagaagtgtaaagtgatggcatcaaaaaagaagcctctatggttagaatttaaatgcgccgacccaaccgccctgtctaacgaaacaattggcatcatctttaaacatggcgacgatctgaggcaggacatgttaatcttgcagatcctgcgcataatggagtctatctgggagaccgagtcacttgacctctgtctcctgccctacggttgtattagcaccggggacaagattggcatgatcgaaattgtcaaagacgctaccaccattgccaaaatccaacagtccaccgtgggcaatactggggctttcaaagacgaagtgctgaaccactggctgaaagagaaatcccctaccgaagaaaaatttcaggctgctgtcgagcgcttcgtgtattcatgcgccggctattgtgttgcaaccttcgttttggggattggggatcgacacaacgacaacataatgatcactgagaccggcaacctgtttcacatagactttggccacattctgggcaactacaaaagcttcttgggcattaataaagaacgggttccttttgtgctcactccggactttctgttcgttatgggtactagtgggaaaaagacatccccccacttccagaaatttcaggacatatgtgtgaaggcatatcttgctcttcgacatcacacaaatctgttaattatcctgtttagcatgatgcttatgaccggtatgccccaactaacctctaaggaggatatcgagtatatccgagatgccttgactgtgggcaagaatgaggaagatgccaagaagtactttttggaccagattgaagtctgccgagacaaagggtggacagtgcaattcaattggttcttacacctcgtgctgggtatcaagcagggtgagaagcactctgcgtag

SEQ ID NO: 101262 - DNA, 3309 bp, Artificial Sequence
  derived and/or modified sequence
atggagctggagaactacaagcagcccgtggtgctgcgggaggacaattgtagacgccggcgacggatgaagccccgaagtgcagccgccagcttgtcctccatggagctgattcccatcgaattcgtgttgcctacctcacagaggaaatgcaaaagtccggagactgcgttactgcacgtagccgggcacgggaatgtggagcagatgaaagcccaggtgtggctaagggcccttgagacttctgtggcagccgatttttatcaccgcctggggccccaccatttccttcttttgtatcagaaaaagggtcagtggtatgaaatatatgataagtaccaagtcgtccagacattagactgcctacgatactggaaagcaacacataggagcccaggtcagatacaccttgtacaaagacacccaccctccgaagaatctcaggcctttcagcggcagttaactgctctgatcgggtatgatgttaccgacgtatccaatgtccacgacgacgagttggaatttactcgacgcggactggtgacccctcgcatggccgaggtggcaagccgggatccaaaactttatgctatgcacccgtgggtgacttctaagccccttcctgagtacctgtggaagaaaatcgcgaacaactgtatctttattgtgatccacagatctactacaagtcagacgattaaggtgtcgcctgacgacacgcctggcgctatactccaaagcttcttcactaagatggccaaaaagaagtcactgatggacatccccgaatctcagtccgaacaggacttcgtcctgcgggtatgtggcagggacgagtacctggtgggagaaacacctattaaaaacttccagtgggtccgtcattgcctcaaaaatggagaggagattcatgtcgtcttagacaccccacctgacccagctctggacgaagtgcgcaaggaagagtggcctctggttgatgattgtaccggggtaactggataccatgagcagcttacaatccatggaaaggatcacgagagcgtgtttaccgtttctctctgggactgtgaccgcaagtttcgcgtgaagatcagaggaattgacattcctgtcctgccacgcaacacggacctcaccgtattcgtagaggcaaatatacaacacggccagcaggtactctgccagcgaagaactagcccaaagccctttactgaagaggtcctctggaacgtctggctggagttttccatcaagattaaagatctgcctaaaggcgccttgctaaaccttcagatttactgcggcaaagcaccagctctctctagcaaggcttctgcagagtccccttcaagcgaatcaaagggcaaggttcagctactctattacgtcaatttgctgctaatcgatcacaggttcctcttgcggagaggcgagtacgttcttcatatgtggcagatcagcggcaagggcgaagaccagggatccttcaacgctgataagctgactagcgcaaccaatccagataaggaaaattctatgagcatcagtatccttctggacaactactgccacccaatcgcactccccaaacaccaacccacacccgaccctgaaggcgacagggtgagagccgaaatgcccaatcaactccgcaagcagctggaggcaataatagccacagatccactaaacccacttactgccgaagacaaagagcttctgtggcattttcgatacgagagtttgaaacatccaaaagcctatcccaagttgttctcgagcgtcaagtggggacagcaggagatcgttgcaaagacatatcagctcttagccaggagagaagtctgggatcaatctgccctggacgtgggattaacaatgcaactgctggactgtaatttcagtgacgaaaacgtgagagccattgctgtgcagaagctggaatcactggaagacgacgatgttctgcattatctgttgcaactggtgcaggccgtgaagtttgaaccataccacgatagcgctttggctcgctttctactgaaaaggggcctgaggaacaaaaggattggccacttccttttctggttccttaggagcgagattgctcaatcaagacactaccagcagcgttttgctgtgatcctggaggcgtacctccgtgggtgcggcactgccatgctacacgactttacccagcaagtccaagttattgaaatgctgcagaaggtcacacttgatattaagagcctgagtgccgaaaaatacgatgtatcttcacaagtgatttcacagctgaaacagaagcttgagaatctccagaattcccagttgcccgaatcttttagggtgccctatgatcccggactaaaggctggcgcccttgcaattgaaaagtgtaaggttatggcctctaaaaagaagcctttgtggcttgagtttaagtgtgctgaccctactgcactttctaacgaaaccattgggatcatttttaaacacggcgacgacttacgccaggatatgttgatactgcagatactccgaataatggaatccatttgggagaccgagagcctggatctatgcttgctcccatacggatgcatttctacaggagacaagatcggcatgatcgaaatcgtgaaggatgctaccacaattgccaagatccaacaatctactgtcggcaacacaggggcgttcaaagatgaggttctgaaccactggttgaaggagaaatcacctaccgaggaaaaatttcaagctgccgtggagcgcttcgtttactcctgcgcaggttactgcgtggccacattcgtcctcggcattggcgaccggcacaacgacaatataatgattactgagactggcaacctgttccacatagacttcggacacatcctgggcaattacaaatcattcctcggtattaacaaggaacgcgtgccctttgtgttaactccggactttctgttcgtaatgggcacttcaggcaagaagacgtctccgcacttccagaaatttcaagacatttgcgttaaggcttatctcgcccttcggcatcacacaaatttactgatcatcctgttttctatgatgctcatgaccggcatgccacagctgacctcgaaagaggacattgagtatatccgagatgccctcaccgtggggaagaacgaagaagacgccaaaaaatacttccttgatcagattgaggtgtgcagggataaggggtggaccgtgcaatttaattggtttctccatctggtgctggggatcaaacaaggggagaaacactcagcctag

SEQ ID NO: 101263 - DNA, 3309 bp, Artificial Sequence
  derived and/or modified sequence
atggagctggagaactacaagcagcccgtggtgctgcgggaggacaattgccgaaggaggagaaggatgaaacccaggtcagcggcagcctcactcagcagtatggaactgattcctattgagttcgtgctgcccactagccaaaggaaatgcaagagtccggaaacagctctgctacacgtggcaggtcatgggaatgtcgagcagatgaaggcccaggtctggctgcgagcgctggagacgtccgtagccgctgacttctaccacagattgggtccccatcacttcctgcttctgtatcagaaaaagggccaatggtatgagatctatgacaaatatcaagtcgtccagactcttgactgcttacgatactggaaagctacccatagatcccctggtcagatacacttagtacaacgccacccacccagtgaggagagccaagcctttcagcggcagctcaccgcactaattgggtacgacgttacggacgtgagtaatgtgcacgacgatgagctggagttcacgcgccgcggccttgtcaccccaagaatggctgaggtggccagcagggacccgaagttatatgccatgcatccatgggtgacatccaaacccctaccagagtacctctggaagaaaatcgccaacaattgcatttttatagtaatacaccgatccaccaccagccagacaattaaggtttctccggatgacactcctggggccatcctccagagtttttttacgaagatggccaaaaaaaaaagcctaatggacatccctgagtctcagagcgagcaagatttcgtgctgcgggtgtgcggccgggacgagtacctggtgggagagactccaatcaagaactttcagtgggtccgacactgcctgaagaacggtgaagaaatacatgtagtactggatactcctccggaccccgcgctggacgaggtgagaaaagaagaatggccactcgttgatgattgcaccggggtgactgggtatcatgaacaactgaccattcacggaaaggatcacgagagcgtattcaccgtaagtctgtgggactgtgatcgtaagttcagagtgaaaataaggggtattgatattccggtcttaccacgcaacaccgacctgacagtctttgtcgaggccaacatccagcacgggcagcaagttctttgtcagcggcggacctcccctaagccgtttaccgaagaggtactgtggaatgtatggcttgagttcagcatcaagataaaggacctgccaaaaggagccctgctgaaccttcagatctactgtggcaaggctcctgcactcagttccaaagctagcgcagagtctccttccagcgagtccaagggcaaagttcagttactgtactatgtcaatctgcttctgatcgaccacagattcctgcttagacgaggcgagtatgtattacatatgtggcaaatctcaggtaagggggaggaccagggctctttcaatgccgataaattgacaagtgctacaaatcctgacaaagagaattcgatgagtataagcattctcctggacaattactgtcacccaatcgcactgcccaaacatcagcccacgccagacccagaaggagatcgcgttcgtgccgaaatgccaaaccagcttaggaagcagttagaggctatcatagcaactgacccgctgaaccccttaactgccgaggataaggagctgttatggcacttcaggtacgaaagcctcaagcaccccaaggcgtaccctaagttgttcagtagtgtcaagtgggggcaacaggaaattgtcgctaagacctaccagcttctggcccggcgcgaagtctgggatcagagtgcactggacgtgggcctcaccatgcagctgctggactgtaacttcagtgatgaaaatgttagagccatcgcagtgcagaagctcgagagccttgaggacgatgatgttctacattatcttctgcagttagtgcaagccgtcaagttcgaaccgtaccacgactccgctctggcccggtttcttctgaagagaggcctcagaaataagaggattggccatttcctcttttggttcttgcgatcagaaatcgcccaatctagacattatcagcagagattcgctgtcatactggaagcttatctcagaggatgtggcaccgctatgcttcatgatttcacccagcaggttcaggtcatcgagatgttacaaaaggttacactcgacatcaaaagcctctcagccgaaaaatacgatgtaagtagccaggtaatcagccagctgaagcagaagctcgagaacctccagaactctcagctaccagagtcttttagggtcccatatgacccaggcctcaaggctggcgccctagccattgaaaagtgtaaagtgatggcgagcaaaaaaaagccattatggcttgagttcaagtgcgcagatcctactgctctctctaacgagaccattggaatcatcttcaaacacggggatgatcttcggcaggacatgctcattcttcagattctgagaatcatggaaagcatttgggagacggaaagtctggacctatgtctcctaccctacggctgcataagtaccggagacaaaattggaatgatagagattgtgaaagatgctacgacaatcgccaagatacagcagtctaccgtaggcaacaccggggcctttaaagacgaggtcctgaaccattggttgaaggagaagagccccacagaggaaaagttccaggcggcggtggagcgctttgtctactcttgcgcgggctattgtgtagctaccttcgtattggggatcggggatcgccataacgataacattatgattactgagacgggcaacctttttcatatagacttcgggcacatcctcggcaattacaagtcctttctcggaattaacaaggaaagggttccattcgtcctgacacccgacttcttatttgtgatgggtacttccgggaaaaaaacttccccgcacttccagaaatttcaagacatctgtgtcaaggcttaccttgcactgcgtcaccacaccaacctgctgatcattctgttctctatgatgctgatgactggaatgcctcagcttacctctaaggaagacattgaatacatccgggatgcactgacagtaggaaaaaacgaggaggacgccaagaagtacttccttgatcagattgaggtgtgcagggataaaggttggaccgtccaattcaattggttcctccacctggttctcgggatcaaacaaggcgaaaagcactccgcctag

SEQ ID NO: 101264 - DNA, 3309 bp, Artificial Sequence
  derived and/or modified sequence
atggaactggagaactataagcagcctgtggtccttcgcgaagacaactgccgtcgtcgtcggaggatgaaaccccgatctgccgcagcttccctctcatcaatggagcttattcccatcgaatttgtcctccctacctcccaaaggaaatgcaagtcacccgaaacagccctactgcacgttgcaggacacggaaacgtggagcagatgaaggcccaagtgtggcttagagccttagaaacttctgtcgcagcggatttttaccatagattggggccacaccatttcctgctgctatatcagaaaaaaggccaatggtatgaaatctacgataaataccaggtcgtgcaaactctggactgcttacgttattggaaggctacgcacaggtcccccggacaaattcatttagtccagcgccatcccccatccgaagaaagccaggcctttcaacgtcagttaacagctctgatcggttacgatgtgactgacgtgtcaaacgtgcacgatgacgagctggagttcacacgacgcggactggtgaccccaaggatggctgaggtggcttccagagaccccaagttatacgctatgcatccatgggttaccagtaagccgcttcccgagtatctgtggaagaagatcgccaataattgcatttttatcgtcattcatcgctcaacgacatctcaaacgatcaaggtgagtccggatgacactccaggcgctatcctgcagtctttctttactaagatggccaagaaaaagagtcttatggacataccagagagccagtcagagcaggactttgttctgagggtatgcgggcgagatgagtaccttgtgggggagactcccataaagaatttccagtgggtgagacactgtcttaaaaatggcgaggaaattcatgtggtgttagacaccccccctgaccctgctctggacgaagtgaggaaggaggagtggccccttgttgacgattgcaccggcgtgactggataccacgagcagttaacgatccacggaaaagatcatgagtctgtgttcactgtatccctctgggactgtgatcgaaagtttagagtgaagatcagaggtatagatatccccgtcctgccgcgaaatacagacctgactgtcttcgtcgaagccaatattcaacatgggcagcaagttctgtgccagcgacgaacgtcaccaaagcctttcacagaggaagttttatggaatgtgtggctcgaatttagcattaaaatcaaagatcttccaaagggcgctttgctgaatctccaaatttactgcggtaaggcacctgcactctcgagtaaggcttccgccgagtcaccctcatccgagagtaagggcaaggtgcagctgctttattatgtgaatttgcttctcatcgatcacagattcctgctgcggaggggcgagtatgttctgcacatgtggcagatttccggcaaaggcgaagatcagggatcctttaatgccgataaacttactagcgccaccaacccagacaaggagaactcaatgtctatctctatattactggataactactgccacccaattgctcttcctaaacaccaacctaccccagatccggagggcgacagggtcagagcagagatgcctaatcaactgaggaaacagctggaggctatcattgctactgacccgctcaaccctctcacagcagaggacaaggaacttctttggcattttcgctatgagtcgctgaagcatcccaaagcatatcccaagctgttctcttctgtcaaatgggggcaacaggagatcgttgctaaaacgtaccagctgctcgcacggagagaggtctgggatcagagtgcactggacgtgggacttaccatgcaattgctcgactgcaatttttcagatgaaaacgtccgggctattgccgtacagaagctggaatccctggaggacgacgacgtcctacattatctgctccaacttgttcaggccgtgaaatttgaaccataccacgactcagcgctggccagatttctcctgaagcgtggcctgagaaacaaacggattgggcacttcctcttctggttcctaaggagcgaaattgcccagtcacggcactatcagcagcgttttgccgtgattttggaagcttatctgagagggtgtggaaccgctatgctgcatgactttacgcagcaggtgcaagtgatcgaaatgctacagaaggtcaccttggatattaagtccctttccgcggaaaagtacgatgtgtccagccaggtaataagtcagctcaagcagaagctcgagaacctgcagaattcacagctccctgagagctttcgagttccttatgaccccggactcaaggccggtgccctggccatcgaaaagtgcaaggttatggcttctaagaagaagccgttatggctggagtttaagtgtgcagaccctactgccctctcaaacgaaaccatcggaattatcttcaaacatggcgatgatcttcggcaggacatgctgatcctgcagatcttacggatcatggaatctatttgggagacagagagcctggacctgtgtctgttaccctacggctgtatcagcaccggagacaagataggtatgatcgaaatcgtcaaggacgctacaacgatcgccaagatccagcagtcgacagtgggtaatactggagcgtttaaagacgaggtgctaaaccattggctaaaggagaagagcccaacagaggagaagtttcaggctgctgttgaacgatttgtgtatagctgcgccggttattgtgtcgctaccttcgttctcggcattggcgaccggcataacgataacattatgattaccgagacaggaaaccttttccatatagacttcggccacatcctgggcaactacaaatcctttcttggaattaataaggaacgtgtcccgtttgtgttaacgccagacttcctctttgtgatgggaactagtgggaaaaaaaccagtcctcatttccagaagttccaggatatttgtgtgaaggcgtatttggcattaagacaccacacaaatctgttgatcatcttgtttagcatgatgctgatgactggaatgccccagctgactagcaaggaagatatagaatacatccgagacgcactgacagtcgggaagaatgaagaagacgctaagaagtactttctggaccagatcgaggtctgtcgagataagggatggactgtgcaatttaactggttcctgcatctcgttctcggcatcaagcagggcgagaaacactcggcctag

SEQ ID NO: 101265 - DNA, 3309 bp, Artificial Sequence
  derived and/or modified sequence
atggagctcgagaattataagcagcctgtagttctgcgggaagacaactgccgcaggcggagacggatgaagccacgcagcgcagccgcatcattgagcagtatggagctcatacccatagagtttgtgctgccaacatcacaacggaagtgcaaatctcctgagactgctctgttgcacgtggcaggacatggtaatgtagagcaaatgaaagcccaggtgtggctcagggcattggagaccagtgtggccgcagacttttaccacagactggggccacatcattttctgcttttataccagaagaagggacagtggtatgagatttacgataagtaccaagtcgtgcagactctggattgtttgcgatattggaaagctacacacagatcacctggacagatccacttggtgcagaggcatcccccatcagaagagagccaagccttccagcgccagttgacagcactcattggctatgacgttactgatgtgagcaatgtgcacgacgacgagctggagttcacgaggaggggcctggtgacaccccgaatggcggaggtggcttctagggacccgaaactgtatgcaatgcacccgtgggtaacttctaagcccttgcccgaatatttgtggaagaagatcgcaaacaactgtatctttatcgtaatccacaggagcactactagccagacaattaaagtgagccctgatgatacgccaggcgcaattttacagtcatttttcacgaaaatggccaagaagaaaagtctcatggatatacccgaatcacagtcggagcaagattttgtgctacgcgtgtgcggtcgagatgagtacctcgtgggggagaccccgattaagaatttccaatgggttaggcactgcctgaaaaacggcgaggagatccatgtcgtcctcgatactcctccagaccccgctctggacgaggtgaggaaggaagaatggccactggtcgatgattgcacaggggtaaccgggtatcatgagcagcttaccattcatggaaaggatcacgaatccgtctttacagttagcctgtgggactgcgataggaagttcagagttaagatcagggggatcgacatccccgtcttacctcggaacactgaccttacggtcttcgtggaggcaaacatccagcacggtcagcaggtattatgccagcggaggacgtcccctaagcccttcaccgaggaggtgctgtggaatgtgtggctcgagttctctataaaaattaaggatctgccgaagggagctctactgaatctgcagatatactgcggcaaggcacctgcactctcttcaaaggccagtgctgaatccccatccagcgagtccaagggaaaagttcagctcctgtactacgtcaatctgctgttaatcgatcaccgtttcctcctgcgcaggggagaatatgtcctgcatatgtggcagatctccgggaagggcgaggaccaggggtcttttaatgctgacaagcttacaagtgccaccaacccagacaaagaaaattcgatgagtatttcaatcctcctggacaattattgtcacccaatagcgcttccaaagcaccagcctacacctgacccggagggagacagagtccgggcagagatgccaaatcagctccggaaacagttggaggctattatcgccaccgaccctctgaaccccctcaccgcagaggataaggaattgctgtggcacttcagatacgaatccctgaagcatcctaaggcctaccccaagctattttctagcgtgaagtggggtcagcaggagatagtagcgaaaacctatcagctacttgccaggcgggaagtgtgggatcagagtgcgctagatgtgggcttgaccatgcagttgctggactgcaacttttcggacgaaaatgtcagggctattgcagttcaaaagcttgaatccctggaagacgacgatgtactgcattacttactgcagctagtccaggctgtgaagttcgagccataccatgactccgctttggcgaggtttctgctgaagcggggattgcggaacaagagaattggccactttttgttctggttcctacgatctgaaatcgctcagtcgcggcactaccagcagcgttttgcggttatactcgaagcatatctgcgtgggtgcggcactgccatgctccacgattttactcagcaggttcaggtcattgaaatgctgcagaaagtaaccctggatattaagtcattaagtgccgagaaatatgacgtttcctcacaagtaatttcccagctgaaacaaaagctcgaaaacctacagaacagccaactgcctgagagttttagagtgccatacgatcccggactgaaagctggcgcactagccatcgagaagtgtaaagtgatggccagtaaaaagaaacctttgtggttggaattcaaatgtgccgatcccacagctctttctaacgaaaccatagggattatcttcaagcatggcgatgatctccgtcaggacatgttaattctccagatactccggatcatggaaagtatctgggaaacggaaagcttagacctgtgtttattaccttacggttgcatcagcacgggagataagatcggcatgatagagatcgttaaagacgccacaactatagctaagatccagcagtctacggtgggcaacacgggtgcctttaaggacgaagtgctgaaccactggctcaaagagaagagcccaaccgaggaaaaattccaagccgctgtcgaacggttcgtgtactcatgcgcaggctactgcgttgctaccttcgtactcggtataggagaccgacacaatgacaacatcatgatcactgagaccgggaatctttttcacattgacttcggacacatcctgggtaactacaaaagcttcctcggcatcaacaaagaacgcgtcccgttcgtactaacacccgatttcctgttcgtaatggggacatcaggtaagaaaacctcaccacacttccagaaatttcaggatatttgcgtgaaggcatatctcgccctgcggcaccataccaacttgcttatcatcttgttctctatgatgcttatgacagggatgccccagctgacatcaaaagaggatattgagtatattcgcgacgctctgacagtcggtaagaacgaggaggacgccaagaaatacttcctcgatcagattgaagtttgccgggataagggctggactgttcagttcaactggttcctgcatctcgtcctggggataaaacagggggaaaaacattccgcctag

SEQ ID NO: 101266 - DNA, 3309 bp, Artificial Sequence
  derived and/or modified sequence
atggaacttgagaactataagcaacccgttgtactgagggaagataactgtagaaggcggagaagaatgaagccaagatctgcggcagcctccctgtctagcatggagctaataccaattgagttcgttcttcctactagccagcgtaagtgtaaaagtccagagaccgccttgctgcatgttgccggtcatggcaatgtggagcagatgaaagcgcaggtctggctacgcgcactggaaacttccgttgccgcagacttctatcaccggctgggcccacatcattttctactgctgtatcaaaagaaaggtcaatggtacgaaatttacgacaagtaccaggtcgtccagactctggattgcctgcgatactggaaggccactcacaggagtcccggacagatccatcttgtccagagacacccaccatctgaagagtcacaggccttccagcgccaactcacggccctgatcggatacgacgtgacagatgtgtctaatgtgcacgatgacgagctggagtttacccgcagaggacttgttaccccccgtatggccgaggtggcctccagagatccgaagttatacgccatgcacccttgggtgaccagtaaacctctgcccgaatatctgtggaaaaaaatcgccaataattgtatctttatagtgattcatcgctcaaccacctcccagacaatcaaagtgagccccgacgatacccctggggcaatactccagagcttttttacaaaaatggctaagaagaaatcattaatggacatcccagaaagccagtccgagcaggactttgtcctccgggtttgtggccgagatgaatacttagtaggagagacacctatcaagaatttccagtgggtaagacactgcttgaagaacggagaagagattcacgttgttcttgacactccccctgaccccgcattagatgaagtgaggaaggaagagtggccgctggtcgacgattgcactggggtcacaggctatcacgaacagttgaccattcatggtaaagatcacgaatctgtttttaccgtgagtctgtgggactgtgatcgaaaattccgcgtcaagattagaggcatagacatccccgttctgccccgaaacactgatctgaccgtctttgtagaagctaatatacaacatggccagcaggttctgtgtcagcgcagaacaagtccgaaacccttcaccgaggaggtactttggaacgtgtggctagaattttcaatcaaaataaaagatttaccgaagggggcactcctgaatctacagatttattgcggaaaggcccctgccttatcaagtaaggctagtgccgagagccctagcagtgagtctaaaggaaaggtgcaactgctttactacgttaacctgctccttatagaccatcgcttcctcctgcggagaggggagtacgtactgcatatgtggcagatctcggggaagggcgaggatcaagggtctttcaatgcagacaagttaacctccgccacaaatccagacaaggagaacagtatgtctatatctatccttctggataactactgccatcccattgccctgcccaaacaccagcccaccccggatccagagggcgatagggttagagcggagatgcccaatcaactgcgcaaacagctggaggccatcattgccaccgaccccctgaacccactcacagccgaggacaaggagctgctatggcacttcaggtatgagtccttaaaacatccgaaagcctatcctaagctgtttagtagcgtgaaatggggccagcaggaaatcgtggccaaaacatatcagctgctcgctagaagagaagtttgggatcagtcagcactggatgtgggccttactatgcagctattggattgcaatttctccgatgaaaacgttcgtgccatcgccgtacagaagctagagtcacttgaggatgacgatgtgcttcactacctcctccagctcgttcaggccgtgaaatttgagccataccatgacagcgccctggcccgatttttgttaaaaaggggtcttaggaataagagaatcggccacttcttattctggttcctgaggagcgagatagctcagtcaagacactaccaacagagattcgctgtgatcttggaagcatacctgagagggtgcggtaccgccatgctccacgattttacgcagcaagtccaagtgatcgagatgctccaaaaggtcacacttgacatcaagtccttatcagccgagaaatacgatgttagtagtcaggtcatttctcagctgaaacagaaattggagaatctccagaatagccaactgcccgaaagctttagggtcccatacgatcccggactcaaagctggcgctctggccatcgagaagtgcaaagtgatggcttccaaaaagaagccactgtggctggagttcaaatgtgcagatccgactgccctgagtaacgagactatagggatcatttttaagcacggcgacgatctacggcaggacatgctgatactgcagatcttgcggatcatggagtcaatttgggagactgaatctctggacttgtgcctcttaccgtatgggtgcatcagcacaggagataagattggcatgattgaaatcgtcaaggacgcaactaccatcgccaaaatccaacagagcaccgttggtaataccggcgctttcaaagatgaagttctgaaccattggctaaaggaaaaatccccgactgaagaaaaattccaggcagctgtcgaacgatttgtgtatagctgcgctggctattgcgttgctacttttgtccttggaattggcgatcgtcataatgacaacatcatgatcacagagaccggcaatctgttccacatagactttggtcacatcctgggcaactacaaaagctttcttggcattaacaaggagagggtacccttcgtgctaacaccggattttcttttcgttatgggtaccagcggaaaaaagacctccccccacttccaaaagttccaggacatatgcgttaaagcctaccttgcacttcggcatcatacaaatctgctgatcattctcttcagcatgatgctgatgacagggatgccacaattaaccagtaaggaggatattgagtatataagggacgctttaacggtgggaaaaaatgaggaggatgctaagaagtatttcctggaccaaattgaggtctgccgtgacaagggatggacggtccaattcaactggttcttgcatttagtgctcggcattaaacagggtgagaagcatagcgcatag

SEQ ID NO: 101267 - DNA, 5377 bp, Artificial Sequence
  derived and/or modified sequence
gcacttccttctcggctagattatctgaaactgttgtcggttcttgagatgatactaccaccgaatgtctgtgtttcattgtctagtccaacctgtattgtggatatctacaacgttccggcaatagttttgcaggtgcatcacatttttgtttttgttttgggaggaaaagggagggcacggcagccaggcttcatattcctacaagtgcatgcttcaagattactgtacttacagtgtttccaacatcttctcataaaaggggaaagcttcatagcctcaaccatgaaggaaaccagtcgcatagggcatggagctggagaactataaacagcccgtggtgctgagagaggacaactgccgaaggcgccggaggatgaagccgcgcagtgctgcggccagcctgtcctccatggagctcatccccatcgagttcgtgctgcccaccagccagcgcaaatgcaagagccccgaaacggcgctgctgcacgtggccggccacggcaacgtggagcagatgaaggcccaggtgtggctgcgagcgctggagaccagcgtggcggcggacttctaccaccggctgggaccgcatcacttcctcctgctctatcagaagaaggggcagtggtacgagatctacgacaagtaccaggtggtgcagactctggactgcctgcgctactggaaggccacgcaccggagcccgggccagatccacctggtgcagcggcacccgccctccgaggagtcccaagccttccagcggcagctcacggcgctgattggctatgacgtcactgacgtcagcaacgtgcacgacgatgagctggagttcacgcgccgtggcttggtgaccccgcgcatggcggaggtggccagccgcgaccccaagctctacgccatgcacccgtgggtgacgtccaagcccctcccggagtacctgtggaagaagattgccaacaactgcatcttcatcgtcattcaccgcagcaccaccagccagaccattaaggtctcacccgacgacacccccggcgccatcctgcagagcttcttcaccaagatggccaagaagaaatctctgatggatattcccgaaagccaaagcgaacaggattttgtgctgcgcgtctgtggccgggatgagtacctggtgggcgaaacgcccatcaaaaacttccagtgggtgaggcactgcctcaagaacggagaagagattcacgtggtactggacacgcctccagacccggccctagacgaggtgaggaaggaagagtggccactggtggatgactgcacgggagtcaccggctaccatgagcagcttaccatccacggcaaggaccacgagagtgtgttcaccgtgtccctgtgggactgcgaccgcaagttcagggtcaagatcagaggcattgatatccccgtcctgcctcggaacaccgacctcacagtttttgtagaggcaaacatccagcatgggcaacaagtcctttgccaaaggagaaccagccccaaacccttcacagaggaggtgctgtggaatgtgtggcttgagttcagtatcaaaatcaaagacttgcccaaaggggctctactgaacctccagatctactgcggtaaagctccagcactgtccagcaaggcctctgcagagtcccccagttctgagtccaagggcaaagttcagcttctctattatgtgaacctgctgctgatagaccaccgtttcctcctgcgccgtggagaatacgtcctccacatgtggcagatatctgggaagggagaagaccaaggaagcttcaatgctgacaaactcacgtctgcaactaacccagacaaggagaactcaatgtccatctccattcttctggacaattactgccacccgatagccctgcctaagcatcagcccacccctgacccggaaggggaccgggttcgagcagaaatgcccaaccagcttcgcaagcaattggaggcgatcatagccactgatccacttaaccctctcacagcagaggacaaagaattgctctggcattttagatacgaaagccttaagcacccaaaagcatatcctaagctatttagttcagtgaaatggggacagcaagaaattgtggccaaaacataccaattgttggccagaagggaagtctgggatcaaagtgctttggatgttgggttaacaatgcagctcctggactgcaacttctcagatgaaaatgtaagagccattgcagttcagaaactggagagcttggaggacgatgatgttctgcattaccttctacaattggtccaggctgtgaaatttgaaccataccatgatagcgcccttgccagatttctgctgaagcgtggtttaagaaacaaaagaattggtcactttttgttttggttcttgagaagtgagatagcccagtccagacactatcagcagaggttcgctgtgattctggaagcctatctgaggggctgtggcacagccatgctgcacgactttacccaacaagtccaagtaatcgagatgttacaaaaagtcacccttgatattaaatcgctctctgctgaaaagtatgacgtcagttcccaagttatttcacaacttaaacaaaagcttgaaaacctgcagaattctcaactccccgaaagctttagagttccatatgatcctggactgaaagcaggagcgctggcaattgaaaaatgtaaagtaatggcctccaagaaaaaaccactatggcttgagtttaaatgtgccgatcctacagccctatcaaatgaaacaattggaattatctttaaacatggtgatgatctgcgccaagacatgcttattttacagattctacgaatcatggagtctatttgggagactgaatctttggatctatgcctcctgccatatggttgcatttcaactggtgacaaaataggaatgatcgagattgtgaaagacgccacgacaattgccaaaattcagcaaagcacagtgggcaacacgggagcatttaaagatgaagtcctgaatcactggctcaaagaaaaatcccctactgaagaaaagtttcaggcagcagtggagagatttgtttattcctgtgcaggctactgtgtggcaacctttgttcttggaataggcgacagacacaatgacaatattatgatcaccgagacaggaaacctatttcatattgacttcgggcacattcttgggaattacaaaagtttcctgggcattaataaagagagagtgccatttgtgctaacccctgacttcctctttgtgatgggaacttctggaaagaagacaagcccacacttccagaaatttcaggacatctgtgttaaggcttatctagcccttcgtcatcacacaaacctactgatcatcctgttctccatgatgctgatgacaggaatgccccagttaacaagcaaagaagacattgaatatatccgggatgccctcacagtggggaaaaatgaggaggatgctaaaaagtattttcttgatcagatcgaagtttgcagagacaaaggatggactgtgcagtttaattggtttctacatcttgttcttggcatcaaacaaggagagaaacattcagcctaatactttaggctagaatcaaaaacaagttagtgttctatggtttaaattagcatagcaatcatcgaacttggatttcaaatgcaatagacattgtgaaagctggcatttcagaagtatagctcttttcctacctgaactcttccctggagaaaagatgttggcattgctgattgtttggttaagcaatgtccagtgctaggattatttgcaggtttggttttttctcatttgtctgtggcattggagaatattctcggtttaaacagactaatgacttccttattgtccctgatattttgactatcttactattgagtgcttctggaaattctttggaataattgatgacatctattttcatctgggtttagtctcaattttggttatctttgtgttcctcaagctctttaaagaaaaagatgtaatcgttgtaacctttgtctcattccttaaatgatgcttccaaacatctccttagtgtctgcaggtgttagtggtgtgctaaaagcaaggaaagcgagttagtcttttcagtgtcttttgcaattcaattcttttgtcatgtataactgagacacacaaacacagcaggagaaatctaaaccgttgtgccttgaccttcctctgctggtcttgttccagggttatgaatatgaaaaaatagagatgagactttttgtgtcaactctgtccacaagagtgagttatctagtatgattagtatagctttctccagcatggcagcaggaagtaactacagggcctcttttatgcctgacatttcttcccttcctttttccctgcctccctttttcatcaattgcgatgctcccacaactctttacagacttgtgaaatcttcaagaacacctttactctataactcaaaaattagttgaaaaataattacttctcaaggattattagaatcttaggtacttatttgtaaagatgtttagtgacttttttttcaagtatcttattaaaggaggcattctagaaaatatgaattagtttccaaatgccttaattttaaactttggcctgaacagttttttctttttcttaatggaagaagatatttaatatcttaaaaatattccaagttaggaagaacactacttgccttatccatttcccatttaaaggacttttaaactttgacacatccttcagatttcctgaaaataattgaaatatcttactttaaaaatattttcatctctgaaatatctcgttatttattggaggtattgtttaaccttagagagaccattaaattatttataaaatattttgtaattacctgtagctaatacattacatagaaaaaaactatgttaacagtgtctctgtttaagtataatcagatataaatatatacttaattttttaattttaaaaatagatacctgtttgactttgaggtagtccagaccttttctttttttttttttttttaatgtgtgcaaaagcccaaaggttcctaagcctggctgcaaagaagaatcaacagggacactttttaaaaacactcttatcagcctgggcaacacagtgagactccatctcttaaaaaaaaaattagctgggtatagtggtatgtgcctgtagtcccaggtactcaggaggctgaggcaggaggattgcctgagcccaggaggtggaaactgcagagagtcatgatcatgtccttacactccagcctggataacagagcgagaccctgtctcaaaaaaataaaataaaaaataaaaa

SEQ ID NO: 101268 - DNA, 3828 bp, Artificial Sequence
  derived and/or modified sequence
aactgcaacacttcctctgcatctggatatgaagggagccccagaaaagcggaagaatttagacgcacactgggtcgcatagggcatggagctggagaactataaacagcccgtggtgctgagagaggacaactgccgaaggcgccggaggatgaagccgcgcagtgctgcggccagcctgtcctccatggagctcatccccatcgagttcgtgctgcccaccagccagcgcaaatgcaagagccccgaaacggcgctgctgcacgtggccggccacggcaacgtggagcagatgaaggcccaggtgtggctgcgagcgctggagaccagcgtggcggcggacttctaccaccggctgggaccgcatcacttcctcctgctctatcagaagaaggggcagtggtacgagatctacgacaagtaccaggtggtgcagactctggactgcctgcgctactggaaggccacgcaccggagcccgggccagatccacctggtgcagcggcacccgccctccgaggagtcccaagccttccagcggcagctcacggcgctgattggctatgacgtcactgacgtcagcaacgtgcacgacgatgagctggagttcacgcgccgtggcttggtgaccccgcgcatggcggaggtggccagccgcgaccccaagctctacgccatgcacccgtgggtgacgtccaagcccctcccggagtacctgtggaagaagattgccaacaactgcatcttcatcgtcattcaccgcagcaccaccagccagaccattaaggtctcacccgacgacacccccggcgccatcctgcagagcttcttcaccaagatggccaagaagaaatctctgatggatattcccgaaagccaaagcgaacaggattttgtgctgcgcgtctgtggccgggatgagtacctggtgggcgaaacgcccatcaaaaacttccagtgggtgaggcactgcctcaagaacggagaagagattcacgtggtactggacacgcctccagacccggccctagacgaggtgaggaaggaagagtggccactggtggatgactgcacgggagtcaccggctaccatgagcagcttaccatccacggcaaggaccacgagagtgtgttcaccgtgtccctgtgggactgcgaccgcaagttcagggtcaagatcagaggcattgatatccccgtcctgcctcggaacaccgacctcacagtttttgtagaggcaaacatccagcatgggcaacaagtcctttgccaaaggagaaccagccccaaacccttcacagaggaggtgctgtggaatgtgtggcttgagttcagtatcaaaatcaaagacttgcccaaaggggctctactgaacctccagatctactgcggtaaagctccagcactgtccagcaaggcctctgcagagtcccccagttctgagtccaagggcaaagttcagcttctctattatgtgaacctgctgctgatagaccaccgtttcctcctgcgccgtggagaatacgtcctccacatgtggcagatatctgggaagggagaagaccaaggaagcttcaatgctgacaaactcacgtctgcaactaacccagacaaggagaactcaatgtccatctccattcttctggacaattactgccacccgatagccctgcctaagcatcagcccacccctgacccggaaggggaccgggttcgagcagaaatgcccaaccagcttcgcaagcaattggaggcgatcatagccactgatccacttaaccctctcacagcagaggacaaagaattgctctggcattttagatacgaaagccttaagcacccaaaagcatatcctaagctatttagttcagtgaaatggggacagcaagaaattgtggccaaaacataccaattgttggccagaagggaagtctgggatcaaagtgctttggatgttgggttaacaatgcagctcctggactgcaacttctcagatgaaaatgtaagagccattgcagttcagaaactggagagcttggaggacgatgatgttctgcattaccttctacaattggtccaggctgtgaaatttgaaccataccatgatagcgcccttgccagatttctgctgaagcgtggtttaagaaacaaaagaattggtcactttttgttttggttcttgagaagtgagatagcccagtccagacactatcagcagaggttcgctgtgattctggaagcctatctgaggggctgtggcacagccatgctgcacgactttacccaacaagtccaagtaatcgagatgttacaaaaagtcacccttgatattaaatcgctctctgctgaaaagtatgacgtcagttcccaagttatttcacaacttaaacaaaagcttgaaaacctgcagaattctcaactccccgaaagctttagagttccatatgatcctggactgaaagcaggagcgctggcaattgaaaaatgtaaagtaatggcctccaagaaaaaaccactatggcttgagtttaaatgtgccgatcctacagccctatcaaatgaaacaattggaattatctttaaacatggtgatgatctgcgccaagacatgcttattttacagattctacgaatcatggagtctatttgggagactgaatctttggatctatgcctcctgccatatggttgcatttcaactggtgacaaaataggaatgatcgagattgtgaaagacgccacgacaattgccaaaattcagcaaagcacagtgggcaacacgggagcatttaaagatgaagtcctgaatcactggctcaaagaaaaatcccctactgaagaaaagtttcaggcagcagtggagagatttgtttattcctgtgcaggctactgtgtggcaacctttgttcttggaataggcgacagacacaatgacaatattatgatcaccgagacaggaaacctatttcatattgacttcgggcacattcttgggaattacaaaagtttcctgggcattaataaagagagagtgccatttgtgctaacccctgacttcctctttgtgatgggaacttctggaaagaagacaagcccacacttccagaaatttcaggacatctgtgttaaggcttatctagcccttcgtcatcacacaaacctactgatcatcctgttctccatgatgctgatgacaggaatgccccagttaacaagcaaagaagacattgaatatatccgggatgccctcacagtggggaaaaatgaggaggatgctaaaaagtattttcttgatcagatcgaagtttgcagagacaaaggatggactgtgcagtttaattggtttctacatcttgttcttggcatcaaacaaggagagaaacattcagcctaatactttaggctagaatcaaaaacaagttagtgttctatggtttaaattagcatagcaatcatcgaacttggatttcaaatgcaatagacattgtgaaagctggcatttcagaagtatagctcttttcctacctgaactcttccctggagaaaagatgttggcattgctgattgtttggttaagcaatgtccagtgctaggattatttgcaggtttggttttttctcatttgtctgtggcattggagaatattctcggtttaaacagactaatgacttccttattgtccctgatattttgactatcttactattgagtgcttctggaaattctttggaataattgatgacatctattttcatctgggtttagtctcaattttggttatctttgtgttcctcaagctctttaaagaaaaagatgtaatcgttgtaa

SEQ ID NO: 101269 - DNA, 5197 bp, Artificial Sequence
  derived and/or modified sequence
gcatctggatatgaagggagccccagaaaagcggaagaatttagacgcacactgggtaggtttgaatttgttttgttttcaaaaattaaacaaatgatccttcagcatcatcgcctccgctgctttatcaggtcgcatagggcatggagctggagaactataaacagcccgtggtgctgagagaggacaactgccgaaggcgccggaggatgaagccgcgcagtgctgcggccagcctgtcctccatggagctcatccccatcgagttcgtgctgcccaccagccagcgcaaatgcaagagccccgaaacggcgctgctgcacgtggccggccacggcaacgtggagcagatgaaggcccaggtgtggctgcgagcgctggagaccagcgtggcggcggacttctaccaccggctgggaccgcatcacttcctcctgctctatcagaagaaggggcagtggtacgagatctacgacaagtaccaggtggtgcagactctggactgcctgcgctactggaaggccacgcaccggagcccgggccagatccacctggtgcagcggcacccgccctccgaggagtcccaagccttccagcggcagctcacggcgctgattggctatgacgtcactgacgtcagcaacgtgcacgacgatgagctggagttcacgcgccgtggcttggtgaccccgcgcatggcggaggtggccagccgcgaccccaagctctacgccatgcacccgtgggtgacgtccaagcccctcccggagtacctgtggaagaagattgccaacaactgcatcttcatcgtcattcaccgcagcaccaccagccagaccattaaggtctcacccgacgacacccccggcgccatcctgcagagcttcttcaccaagatggccaagaagaaatctctgatggatattcccgaaagccaaagcgaacaggattttgtgctgcgcgtctgtggccgggatgagtacctggtgggcgaaacgcccatcaaaaacttccagtgggtgaggcactgcctcaagaacggagaagagattcacgtggtactggacacgcctccagacccggccctagacgaggtgaggaaggaagagtggccactggtggatgactgcacgggagtcaccggctaccatgagcagcttaccatccacggcaaggaccacgagagtgtgttcaccgtgtccctgtgggactgcgaccgcaagttcagggtcaagatcagaggcattgatatccccgtcctgcctcggaacaccgacctcacagtttttgtagaggcaaacatccagcatgggcaacaagtcctttgccaaaggagaaccagccccaaacccttcacagaggaggtgctgtggaatgtgtggcttgagttcagtatcaaaatcaaagacttgcccaaaggggctctactgaacctccagatctactgcggtaaagctccagcactgtccagcaaggcctctgcagagtcccccagttctgagtccaagggcaaagttcagcttctctattatgtgaacctgctgctgatagaccaccgtttcctcctgcgccgtggagaatacgtcctccacatgtggcagatatctgggaagggagaagaccaaggaagcttcaatgctgacaaactcacgtctgcaactaacccagacaaggagaactcaatgtccatctccattcttctggacaattactgccacccgatagccctgcctaagcatcagcccacccctgacccggaaggggaccgggttcgagcagaaatgcccaaccagcttcgcaagcaattggaggcgatcatagccactgatccacttaaccctctcacagcagaggacaaagaattgctctggcattttagatacgaaagccttaagcacccaaaagcatatcctaagctatttagttcagtgaaatggggacagcaagaaattgtggccaaaacataccaattgttggccagaagggaagtctgggatcaaagtgctttggatgttgggttaacaatgcagctcctggactgcaacttctcagatgaaaatgtaagagccattgcagttcagaaactggagagcttggaggacgatgatgttctgcattaccttctacaattggtccaggctgtgaaatttgaaccataccatgatagcgcccttgccagatttctgctgaagcgtggtttaagaaacaaaagaattggtcactttttgttttggttcttgagaagtgagatagcccagtccagacactatcagcagaggttcgctgtgattctggaagcctatctgaggggctgtggcacagccatgctgcacgactttacccaacaagtccaagtaatcgagatgttacaaaaagtcacccttgatattaaatcgctctctgctgaaaagtatgacgtcagttcccaagttatttcacaacttaaacaaaagcttgaaaacctgcagaattctcaactccccgaaagctttagagttccatatgatcctggactgaaagcaggagcgctggcaattgaaaaatgtaaagtaatggcctccaagaaaaaaccactatggcttgagtttaaatgtgccgatcctacagccctatcaaatgaaacaattggaattatctttaaacatggtgatgatctgcgccaagacatgcttattttacagattctacgaatcatggagtctatttgggagactgaatctttggatctatgcctcctgccatatggttgcatttcaactggtgacaaaataggaatgatcgagattgtgaaagacgccacgacaattgccaaaattcagcaaagcacagtgggcaacacgggagcatttaaagatgaagtcctgaatcactggctcaaagaaaaatcccctactgaagaaaagtttcaggcagcagtggagagatttgtttattcctgtgcaggctactgtgtggcaacctttgttcttggaataggcgacagacacaatgacaatattatgatcaccgagacaggaaacctatttcatattgacttcgggcacattcttgggaattacaaaagtttcctgggcattaataaagagagagtgccatttgtgctaacccctgacttcctctttgtgatgggaacttctggaaagaagacaagcccacacttccagaaatttcaggacatctgtgttaaggcttatctagcccttcgtcatcacacaaacctactgatcatcctgttctccatgatgctgatgacaggaatgccccagttaacaagcaaagaagacattgaatatatccgggatgccctcacagtggggaaaaatgaggaggatgctaaaaagtattttcttgatcagatcgaagtttgcagagacaaaggatggactgtgcagtttaattggtttctacatcttgttcttggcatcaaacaaggagagaaacattcagcctaatactttaggctagaatcaaaaacaagttagtgttctatggtttaaattagcatagcaatcatcgaacttggatttcaaatgcaatagacattgtgaaagctggcatttcagaagtatagctcttttcctacctgaactcttccctggagaaaagatgttggcattgctgattgtttggttaagcaatgtccagtgctaggattatttgcaggtttggttttttctcatttgtctgtggcattggagaatattctcggtttaaacagactaatgacttccttattgtccctgatattttgactatcttactattgagtgcttctggaaattctttggaataattgatgacatctattttcatctgggtttagtctcaattttggttatctttgtgttcctcaagctctttaaagaaaaagatgtaatcgttgtaacctttgtctcattccttaaatgatgcttccaaacatctccttagtgtctgcaggtgttagtggtgtgctaaaagcaaggaaagcgagttagtcttttcagtgtcttttgcaattcaattcttttgtcatgtataactgagacacacaaacacagcaggagaaatctaaaccgttgtgccttgaccttcctctgctggtcttgttccagggttatgaatatgaaaaaatagagatgagactttttgtgtcaactctgtccacaagagtgagttatctagtatgattagtatagctttctccagcatggcagcaggaagtaactacagggcctcttttatgcctgacatttcttcccttcctttttccctgcctccctttttcatcaattgcgatgctcccacaactctttacagacttgtgaaatcttcaagaacacctttactctataactcaaaaattagttgaaaaataattacttctcaaggattattagaatcttaggtacttatttgtaaagatgtttagtgacttttttttcaagtatcttattaaaggaggcattctagaaaatatgaattagtttccaaatgccttaattttaaactttggcctgaacagttttttctttttcttaatggaagaagatatttaatatcttaaaaatattccaagttaggaagaacactacttgccttatccatttcccatttaaaggacttttaaactttgacacatccttcagatttcctgaaaataattgaaatatcttactttaaaaatattttcatctctgaaatatctcgttatttattggaggtattgtttaaccttagagagaccattaaattatttataaaatattttgtaattacctgtagctaatacattacatagaaaaaaactatgttaacagtgtctctgtttaagtataatcagatataaatatatacttaattttttaattttaaaaatagatacctgtttgactttgaggtagtccagaccttttctttttttttttttttttaatgtgtgcaaaagcccaaaggttcctaagcctggctgcaaagaagaatcaacagggacactttttaaaaacactcttatcagcctgggcaacacagtgagactccatctcttaaaaaaaaaattagctgggtatagtggtatgtgcctgtagtcccaggtactcaggaggctgaggcaggaggattgcctgagcccaggaggtggaaactgcagagagtcatgatcatgtccttacactccagcctggataacagagcgagaccctgtctcaaaaaaataaaa

SEQ ID NO: 101270 - DNA, 1314 bp, Artificial Sequence
  derived and/or modified sequence
atgatctggaacaccatgatgggcaccagcatcctgagcatcccctggggcatcaagcaggccggcttcaccaccggcatgtgcgtgatcatcctgatgggcctgctgaccctgtactgctgctacagagtggtgaagagcagaaccatgatgttcagcctggacaccaccagctgggagtaccccgacgtgtgcagacactacttcggcagcttcggccagtggagcagcctgctgttcagcctggtgagcctgatcggcgccatgatcgtgtactgggtgctgatgagcaacttcctgttcaacaccggcaagttcatcttcaacttcatccaccacatcaacgacaccgacaccatcctgagcaccaacaacagcaaccccgtgatctgccccagcgccggcagcggcggccaccccgacaacagcagcatgatcttctacgccaacgacaccggcgcccagcagttcgagaagtggtgggacaagagcagaaccgtgcccttctacctggtgggcctgctgctgcccctgctgaacttcaagagccccagcttcttcagcaagttcaacatcctgggcaccgtgagcgtgctgtacctgatcttcctggtgaccttcaaggccgtgagactgggcttccacctggagttccactggttcatccccaccgagttcttcgtgcccgagatcagattccagttcccccagctgaccggcgtgctgaccctggccttcttcatccacaactgcatcatcaccctgctgaagaacaacaagaagcaggagaacaacgtgagagacctgtgcatcgcctacatgctggtgaccctgacctacctgtacatcggcgtgctggtgttcgccagcttccccagcccccccctgagcaaggactgcatcgagcagaacttcctggacaacttccccagcagcgacaccctgagcttcatcgccagaatcttcctgctgttccagatgatgaccgtgtaccccctgctgggctacctggccagagtgcagctgctgggccacatcttcggcgacatctaccccagcatcttccacgtgctgatcctgaacctgatcatcgtgggcgccggcgtgatcatggcctgcttctaccccaacatcggcggcatcatcagatacagcggcgccgcctgcggcctggccttcgtgttcatctaccccagcctgatctacatcatcagcctgcaccaggaggagagactgacctggcccaagctgatcttccacgtgttcatcatcatcctgggcgtggccaacctgatcgtgcagttcttcatgtag

SEQ ID NO: 101271 - DNA, 1314 bp, Artificial Sequence
  derived and/or modified sequence
atgatctggaacactatgatgggcacaagcattctttcgatcccttgggggattaagcaagctgggttcacgactggcatgtgtgtgataatcctgatgggactgctgaccttatattgctgctacagagtggttaaatcacgcactatgatgtttagcctggacaccacttcctgggagtatccggatgtatgccggcactactttggaagctttggccagtggagtagcctgctcttcagtctggtctccctcattggcgcaatgatagtgtactgggtactcatgtcaaactttcttttcaatactggaaagtttatctttaactttattcaccacataaatgacacagacaccattctgtccacaaataatagcaaccccgtcatctgcccttcagctggctctggcggccacccggacaatagcagcatgattttctacgccaatgacacgggagcacagcaattcgaaaaatggtgggataagtccagaacagtgccgttctatctggtaggcctgctgctgcccctcttaaatttcaagtcgccgtctttttttagtaaattcaacatccttggaactgtaagtgtgctttacctcatattcctcgtgacctttaaggctgtgcgcctgggcttccatctcgaatttcattggttcatcccaacggagttcttcgtacctgagatccgattccagtttccccagctgaccggcgtccttaccctggctttttttatccacaattgcattatcacacttcttaaaaacaataagaagcaggagaataacgtccgcgatttatgcatcgcgtacatgctggtgactctcacatatctctatataggcgtcttggtgtttgcttcgttcccatcaccgcctttgtccaaggactgcattgaacagaactttctggacaacttcccctcttctgacactctgagctttatcgctcggatctttctgcttttccagatgatgaccgtgtatccacttttgggttacttggccagggtgcagcttctgggacacatattcggagacatctatccctccatatttcacgtgctgattctcaacctgattattgtcggcgcaggagtcataatggcctgcttctatcctaacattggaggaatcatccggtactccggagccgcttgcgggttggcgttcgtgtttatctatccatcgctcatttacattatcagtctgcatcaggaggagagacttacctggcccaagttgatttttcatgtctttatcataattctgggtgtggccaacttgatcgtccaattctttatgtag

SEQ ID NO: 101272 - DNA, 1314 bp, Artificial Sequence
  derived and/or modified sequence
atgatctggaacaccatgatgggcaccagcatcctgagcatcccctggggcatcaagcaggccggcttcaccaccggcatgtgtgtgatcatcctgatgggcctgctgaccctgtactgctgctacagagtggtgaagagcaggaccatgatgttcagcctggacaccacctcctgggagtacccagatgtgtgccgccactacttcggcagctttggccagtggagcagcctgctcttcagcctggtgtccctcatcggggccatgattgtgtactgggtgctgatgagcaacttcctgttcaacacaggcaagttcatcttcaacttcatccaccacatcaatgacacagacaccatcctgagcaccaacaacagcaaccctgtgatctgccccagcgctggcagcggcggccacccagacaacagctccatgatcttctacgccaatgacaccggggcccagcagtttgagaagtggtgggacaagagcaggacagtgcccttctacctggtgggcctgctgctgcccctgctgaacttcaagagccccagcttcttcagcaagttcaacatcctgggcaccgtgtctgtgctgtacctgatcttcctggtgaccttcaaggctgtgcggctgggcttccacctggagttccactggttcatccccacagagttctttgtgcctgagatccgcttccagttcccccagctgactggagtgctgaccctggccttcttcatccacaactgcatcatcaccctgctgaagaacaacaagaagcaggagaacaacgtgcgggacctgtgcatcgcctacatgctggtgaccctgacctacctgtacatcggcgtgctggtgtttgccagcttccccagcccccccctgagcaaggactgcatcgagcagaacttcctggacaacttccccagcagtgacaccctgtccttcatcgcccgcatcttcctgctcttccagatgatgacagtgtaccccctgctgggctacctggcccgggtgcagctgctgggccacatctttggagacatctaccccagcatcttccacgtgctgatcctgaacctgatcatcgtgggcgctggggtcatcatggcctgcttctaccccaacatcggcggcatcatccgctacagcggggccgcctgtggcctggcctttgtgttcatctaccccagcctcatctacatcatcagcctgcaccaggaggagcggctgacctggcccaagctgatcttccacgtgttcatcatcatcctgggcgtggccaacctgattgtgcagttcttcatgtag

SEQ ID NO: 101273 - DNA, 1314 bp, Artificial Sequence
  derived and/or modified sequence
atgatctggaacaccatgatgggcaccagcatcctgagcatcccctggggcattaagcaggcaggattcaccaccgggatgtgcgtaatcattctgatgggcctactgaccctttattgctgctaccgggtcgtgaagtctcgtaccatgatgttctctctggacaccaccagctgggaataccctgatgtatgtaggcactacttcggctccttcggacagtggtcatcccttctgttcagcctcgtgagtctgataggcgctatgattgtgtactgggtactcatgtctaactttttgttcaatacgggaaaattcattttcaacttcatacaccacataaatgacaccgacactatcttaagcactaataatagtaaccccgtgatctgcccatccgctggctcaggtggccacccagacaactcaagtatgatcttttacgctaatgataccggcgctcagcagttcgagaagtggtgggataaatctcggaccgtacccttttacctcgtgggcctgctcctgcctctgctgaatttcaaatctccgtcttttttttccaaatttaatattctcggaactgtgagcgtactgtacctgatattcctggtaacatttaaggccgtgcggctcggattccacctcgaatttcattggttcataccaaccgaattctttgtgcccgagatccggtttcagttccctcagctcaccggagtcctcaccctggcattttttattcataattgtatcatcaccctcctgaaaaacaacaaaaaacaagaaaacaatgtgcgtgatttgtgcattgcctacatgctggtgactctgacctatctttacattggtgtgctggtgtttgccagctttcccagtccccccctgtcaaaggactgtattgagcagaatttcctggataactttccctcttctgatactttatcttttatcgctcggattttcctcttattccagatgatgactgtgtatcctcttctgggctatctcgcacgcgtccagctgcttggtcatatatttggcgatatttacccgtctattttccacgtgctgatccttaatctaattatcgtgggcgcgggagtcatcatggcatgtttttatccaaacatcggcggcatcatccgttactcaggcgcagcatgcggattggcattcgtctttatctatccaagccttatttacatcatctccctgcaccaagaagagcgtttgacctggcctaagctgatcttccatgtgttcatcattattctgggagtggccaaccttattgttcagtttttcatgtag

SEQ ID NO: 101274 - DNA, 1314 bp, Artificial Sequence
  derived and/or modified sequence
atgatctggaatacgatgatgggtacctccattctgagcatcccgtggggcatcaaacaggccggatttacgaccggcatgtgcgtgattattcttatgggcctcctcacactttactgctgctacagggtcgtgaaatcacgcaccatgatgttttcccttgatactacttcatgggaatatcccgacgtgtgcagacattacttcggttctttcggccagtggagctctctgctgttctctctagtgagtcttatcggagctatgatcgtgtactgggtgttgatgtcaaactttctgtttaacaccggaaagttcatctttaacttcatccaccacatcaatgacacggacaccatactgtccacaaacaatagcaaccctgtcatatgtccgagtgcaggttcaggaggccaccccgataatagttctatgatcttttacgccaatgacacgggagcacaacagtttgaaaagtggtgggataagagtagaaccgtccccttctatctggttggacttcttctgcctctgttaaatttcaaatctccatctttctttagcaaatttaacatcctggggaccgtctccgtgctttatctgatcttccttgtgacctttaaggctgtgcggctgggctttcacctggaatttcactggtttatccccacagaattttttgtacccgaaattcgctttcaattcccccaactgaccggtgtgctgacgttagctttcttcatacacaattgcattattacactactgaaaaacaataagaagcaggagaataatgtccgagatttgtgcatcgcatacatgctggtgacactcacttatctctatataggcgtccttgtttttgccagctttccatccccgcctttaagtaaggactgcatagaacagaacttcttggataatttcccttctagcgacaccctgtcatttattgccagaattttcttgttgttccagatgatgaccgtgtatccactgctgggctatctcgctagagtacagctcctgggccacatattcggcgacatttacccgagtatcttccacgtgttaattttaaacctgatcatcgtcggagccggagtgatcatggcttgtttttacccaaatattggcggaataattagatactctggggctgcgtgtgggttggccttcgtcttcatctacccctcactgatatatatcatctcacttcaccaggaggagcggcttacctggccaaaacttatctttcatgtcttcatcatcattctcggagtggcaaatcttatagtccagttttttatgtag

SEQ ID NO: 101275 - protein, 198 aa, Artificial Sequence
  derived and/or modified sequence
MNSGREPRTPRTLLSIADILAPRMVPRAPSAPQLPESGPGPTSPLCALEELTSKTFRGLDARALQPSEGRAGPDALGPGPFGRKRRKSRTAFTAQQVLELERRFVFQKYLAPSERDGLATRLGLANAQVVTWFQNRRAKLKRDVEEMRADVASLRALSPEVLCSLALPEGAPDPGLCLGPAGPDSRPHLSDEEIQVDD

SEQ ID NO: 101276 - DNA, 597 bp, Artificial Sequence
  derived and/or modified sequence
atgaactccgggcgggaaccccgcactccgcggactttactgtcaatagctgatatcctggcccccagaatggtacctcgcgccccttcggccccccagttaccagagtctgggcctggacctacctctcccctctgtgcccttgaggagttgacctccaagacgtttaggggtcttgatgcccgggccttgcagccatctgagggcagggcgggccccgacgccttgggacccggaccctttggcaggaaacggcgtaagtccaggacggcttttacggcccagcaggtgctcgagcttgagagaaggttcgtgttccaaaagtacctggcgccttctgagcgggacggcctggccactcgcctcgggcttgccaacgcccaggtcgtgacctggttccaaaataggcgggccaagctcaagcgggacgtggaggagatgcgggcagacgtggcttcactgcgggctctgtctccagaggtgttgtgcagcctggcattgccagagggcgcccccgaccccgggctttgtctgggccccgcgggaccagacagcagacctcatttgtctgatgaggaaattcaagtggacgactag

SEQ ID NO: 101277 - DNA, 1186 bp, Artificial Sequence
  derived and/or modified sequence
gatccaccgcggcccggggtggagaggtgggggcgcaggaggaggggcacacgggactcgggcccagagccgggggcgggtccgaggctgggggcccggattgggagccgagcactggggcccaggcgtttgcggagcctagcgcaacggacagccggaccgccccagcccggccgaccatgaactcgggacgcgagccccgaacaccccggacactcttaagcatcgcagacatcctagccccgcgcatggtcccccgagcaccctctgcgccgcagcttccagagtcgggtccgggtccaacgtcgccgctgtgcgcgctggaggagctgactagtaaaactttccgcggacttgacgcgcgcgctctgcagccctctgaagggcgggcaggtccggacgcgctgggccctggtcccttcggccgcaaacggcgcaagtcacgcactgcgttcaccgcgcaacaggtgctggagctggagcggcgcttcgtcttccagaagtacctggcgccgtccgagcgagacgggctagctacgcgactcggcctggccaacgcgcaggtggtcacttggttccagaaccggcgagccaagctcaagcgcgatgtggaggagatgcgcgccgacgtcgcctcgctacgcgcgttgtccccggaagtcctgtgcagcttagcactgcccgaaggcgctccagatcccggcctctgcctcggccctgccggccctgactcccggccccacctgtcagacgaggagatacaggtggacgattgaagacaaagccgccgccaatcctgggctctggggccctggactcctcacctcgcgctctgcctctggccagagttccagggtggaggaaggaggtccacttgggcctcttccggcccacagtccagacgctcacctttcccggtttttttgtaagtttgttttgttgtctgagacagggcctcgctctgtcgcccaggctggagtgccgtggagcgatcaccgctcactgcagtcgcgacctcctgggctcaagcgatcctcctgcctcaacctcccgactagctggcattacaggcgtgcagcaccaccccaggctaatttaaaaaacttttttttttagagaggaggtcccgctatgttgtccaggctactttcccaatatttgagaataaagtcgagactctgccgca

SEQ ID NO: 101278 - DNA, 597 bp, Artificial Sequence
  derived and/or modified sequence
atgaacagcggccgggagcccaggacccccaggaccctgctgagcattgctgacatcctggcccccaggatggtgccccgggcccccagcgccccccagctgcctgagagcggccctggccccaccagccccctgtgtgccctggaggagctgaccagcaagaccttccggggcctggatgcccgggccctgcagcccagcgagggccgggccggcccagatgccctgggccctggcccctttggaaggaagaggaggaagagcaggacagccttcaccgcccagcaggtgctggagctggagaggagatttgtgttccagaagtacctggcccccagcgagagagatggcctggccacccggctgggcctggccaatgcccaggtggtgacctggttccagaacagaagagccaagctgaagagagatgtggaggagatgagagcagatgtggccagcctgcgggccctgagccctgaggtgctgtgcagcctggccctgcctgagggcgccccagaccccggcctgtgcctgggccctgctggccctgacagccggccccacctgagtgatgaggagatccaggtggatgactag

SEQ ID NO: 101279 - DNA, 597 bp, Artificial Sequence
  derived and/or modified sequence
atgaacagcggccgggagccccggaccccccggaccctgctgagcattgcggatatcctggctccacggatggtgcctcgagcaccctctgcacctcagcttccagagtccgggcccgggccaacttcccctctatgtgcgctggaggagctgacttctaagactttccgggggttagatgctcgagccctacagccgtcagagggcagggctgggcccgacgccctgggaccaggtccatttggccggaagagacgaaagtcgcgaacggcctttaccgcccaacaggtgttggagctcgaaagacgctttgtgtttcaaaaatatctggcacctagcgaacgggacggcctggctacacgtcttgggctggccaacgctcaagtagttacctggtttcagaataggagagccaagctcaaaagagatgtggaggaaatgcgcgctgacgtggcctccctgagagctctgagtcccgaggttttgtgttcgctggctcttccagagggtgctcctgacccaggcctgtgcttaggccctgccggaccagattcgcgcccacacctgagtgacgaagagatccaggtggacgattag

SEQ ID NO: 101280 - DNA, 597 bp, Artificial Sequence
  derived and/or modified sequence
atgaattccggtcgcgaacctaggacacccagaactcttctttccattgcagacatcctggccccaaggatggttccacgagctccatctgccccacagctgcccgaatcaggacccggacccacatcccctctgtgcgccctagaagaactaacttcaaagaccttcagaggcttagatgccagagcgcttcagccgtcagagggcagggccggacccgacgccctaggtccaggcccattcggacgcaagagacgcaagagcaggaccgcattcacggcccagcaagtcttggaactggaaaggagattcgtctttcagaagtatctggctccctccgagcgtgacgggctggcaacaagactggggctcgcgaatgcacaggtggtgacttggtttcagaataggcgcgcaaagctgaagcgagatgtcgaggagatgcgagcagatgtggcatctttgagggccctctctcccgaagtgctctgctcccttgctcttcccgagggtgcccctgaccccggtctgtgcctggggcctgccggaccagattcacgacctcacctgtctgacgaggagattcaggtggatgactag

SEQ ID NO: 101281 - DNA, 597 bp, Artificial Sequence
  derived and/or modified sequence
atgaacagcggcagagagcccagaacccccagaaccctgctgagcatcgccgacatcctggcccccagaatggtgcccagagcccccagcgccccccagctgcccgagagcggccccggccccaccagccccctgtgcgccctggaggagctgaccagcaagaccttcagaggcctggacgccagagccctgcagcccagcgagggcagagccggccccgacgccctgggccccggccccttcggcagaaagagaagaaagagcagaaccgccttcaccgcccagcaggtgctggagctggagagaagattcgtgttccagaagtacctggcccccagcgagagagacggcctggccaccagactgggcctggccaacgcccaggtggtgacctggttccagaacagaagagccaagctgaagagagacgtggaggagatgagagccgacgtggccagcctgagagccctgagccccgaggtgctgtgcagcctggccctgcccgagggcgcccccgaccccggcctgtgcctgggccccgccggccccgacagcagaccccacctgagcgacgaggagatccaggtggacgactag

SEQ ID NO: 101282 - protein, 201 aa, Artificial Sequence
  derived and/or modified sequence
MGNISSNISAFQSLHIVMLGLDSAGKTTVLYRLKFNEFVNTVPTIGFNTEKIKLSNGTAKGISCHFWDVGGQEKLRPLWKSYSRCTDGIIYVVDSVDVDRLEEAKTELHKVTKFAENQGTPLLVIANKQDLPKSLPVAEIEKQLALHELIPATTYHVQPACAIIGEGLTEGMDKLYEMILKRRKSLKQKKKRTGDLRSCEV

SEQ ID NO: 101283 - DNA, 606 bp, Artificial Sequence
  derived and/or modified sequence
atgggcaacatcagcagcaacatcagcgccttccagagcctgcacatcgtgatgctgggcctggacagcgccggcaagaccaccgtgctgtacagactgaagttcaacgagttcgtgaacaccgtgcccaccatcggcttcaacaccgagaagatcaagctgagcaacggcaccgccaagggcatcagctgccacttctgggacgtgggcggccaggagaagctgagacccctgtggaagagctacagcagatgcaccgacggcatcatctacgtggtggacagcgtggacgtggacagactggaggaggccaagaccgagctgcacaaggtgaccaagttcgccgagaaccagggcacccccctgctggtgatcgccaacaagcaggacctgcccaagagcctgcccgtggccgagatcgagaagcagctggccctgcacgagctgatccccgccaccacctaccacgtgcagcccgcctgcgccatcatcggcgagggcctgaccgagggcatggacaagctgtacgagatgatcctgaagagaagaaagagcctgaagcagaagaagaagagaaccggcgacctgagaagctgcgaggtgtag

SEQ ID NO: 101284 - DNA, 606 bp, Artificial Sequence
  derived and/or modified sequence
atggggaacatctcctcgaatatttcagccttccaatccctgcacatcgtcatgttggggctggatagtgctgggaaaaccacggtgctgtaccgtcttaagtttaacgagttcgttaataccgtacccaccatcggcttcaacactgagaagatcaagctatcaaacggcaccgccaaggggattagctgccacttttgggacgttgggggccaggagaagctgagacccctctggaagtcttattctcgatgtaccgacggaataatctacgttgtagacagcgtggatgtcgacagactagaagaggctaaaacagagctgcacaaggtcacaaaattcgccgagaatcaaggcacacccctgttggtgattgccaataaacaggatttgcccaaaagtctgcctgtggccgagatagagaagcagctcgcattgcacgagctaattccggcaaccacgtaccacgtccagccagcgtgcgctatcattggcgaggggctgactgagggaatggacaaattatacgaaatgatactgaagagaaggaagtccctgaagcagaagaagaagagaacgggagacctccgatcatgtgaagtttag

SEQ ID NO: 101285 - DNA, 606 bp, Artificial Sequence
  derived and/or modified sequence
atgggcaacatcagcagcaacatcagcgccttccagagcctgcacatcgtgatgctgggcctggacagcgctgggaagaccaccgtgctgtaccgcctgaagttcaatgaatttgtgaacacagtgcccaccatcggcttcaacacagagaagatcaagctgagcaatggaacagccaagggcatcagctgccacttctgggatgtgggcggccaggagaagctgcggcccctgtggaagagctacagccgctgcacagatggcatcatctacgtggtggacagcgtggatgtggaccggctggaggaggccaagacagagctgcacaaggtgaccaagtttgctgagaaccagggcacccccctgctggtgattgccaacaagcaggacctgcccaagagcctgcctgtggccgagattgagaagcagctggccctgcacgagctgatcccagccaccacctaccacgtgcagcctgcctgtgccatcatcggggagggcctgacagagggcatggacaagctgtatgagatgatcctgaagaggaggaagagcctgaagcagaagaagaagaggactggagacctgcggagctgtgaggtgtag

SEQ ID NO: 101286 - DNA, 3385 bp, Artificial Sequence
  derived and/or modified sequence
cgcagccaggagccatgggcaacatctcctctaacatctcggccttccagtccctgcatatcgtcatgttgggcttggactcggccggcaagaccacggtgctctaccggctcaagttcaacgagttcgtgaacacggtgcccaccatcggcttcaacaccgagaagatcaagctgagcaacggcacggccaagggcatcagctgccacttctgggacgtgggcggccaggagaagctgcggccgctgtggaagtcctacagccgctgcacggacggcatcatctacgtggtggactcggtggacgtggaccggctggaggaggccaagacggagctgcacaaggtgaccaagttcgccgagaaccagggcacgccgctgctggtcatcgccaacaagcaggacctgcccaagtcgctgccggtggcagagattgagaagcagctggcgctgcacgagcttatcccggccaccacctatcacgtccagccggcgtgcgccatcatcggcgagggcctcaccgagggcatggacaagctctatgagatgatcctgaaacgcaggaagtccctcaagcagaagaagaagcggactggtgacttaaggagctgcgaagtctgatttaccggcctactctcgacctgccccccacccccagctcaggggaccttttgtctgaacgccagagctactgaccaggtcggggggccgcggtggggagtggaagagccggtcctgctgtccgccctcccagccccaggtggaaggctcagttgtcggaaagacaaaagcgatttcttcccactcctgcagggccagaagttcaggctgccccgcctccactgggggatcgcacctgtgaattacctgaggtatgcatttcccagaaccgtgggcgtacccaccttggggggcatgttggttctggggggaccacctctccttgcattcaggggctgtgaagctgagtaattttcggtcacagggcaggcccctgttgaaatttcatttgtcctgctctgggcccaaaggtggtggtggtttgggtcatcagaggactgcctgggacggttcagcgggcacggagcgctgtgctggcctggctggggatggccgcggaggtgcccttttcctggtgctttgtggtggctgcagaagaccagttttgttgagaactgcttttcagcctggaatcagacatcttccagatggtttggaccctgtccatgtgtaggtcattatcacacaaagagaccaataaaaataaaaaaaataaaaaaaaaaaaagacgaactattggaggtggtggccaatgatgcatttactgtttgcaggatagttaaaggtgtttaaagggtaaggcttttggtgtaaatgctggatggggtgtgtgtgtgtgtggatatagggacctccctctgtactgtgtactgtgtaatcggcattaatacctagactcatatgtatggaattttaaattctcttagcctactgattggtttggatgagcacaccagctgcaggtgtgtgctgaattgcaagatggtatttttttttttaaccaagggatgtctcttgtaatactaaccgcgtgataatgggttttcagacatgatgaaaaaaaaaaacttttacaaatgaatacttaccttagaaatattcaccttaggaaaaaagactttgctctgcccttttatattcctttatgctgcaagtggtgacatgttcagatttctaatttggttcattgtggcctatctggtttaagtctttcattaaaaatgtctcgttagagtatttgatgtcatgcaccaaaaaaataaaaccccaccttgttgcaaaagctgacctcgttgcatggaattaaaagagaaggaaaaacacaaggatgaagtctttccgaattcattcttgtgggaactggccttcggagccagccagcactttgggcaaatgcaaacaacaatgagtgcttgagataaaagaaagtgtgacgtcatggtcactggtactcaggcacttcacagtttacttgaaagaggctttggaaaatagataaagtgaaagaagaataaatacatatttttaataatgtaattttaaaaatcctttataatcaggactgagtcttggtttgcagaagctgtcacttaccctgaaacacagtatcaaaagggaaacttaaaacatactgtttgatttttttatttcctcttacaatccatgttttcaggtagaattatgactttccccccattgttacacatttctttacaaaggaggcctgtagaaattggacacgatcatgcttgagcatgtgagttagtcaaattatgagtccctgcctattgtccattacacaccgaatgttaatttaagaaccagaggcagaagttctggcttcctgcttgaaacccaattcttatatgaaattttttaaaagcagaaacctagcagcccatctgctttttctcttttgtcggtgtatttggtacccctccaatgctggtctttttgtagaaactcagtagagaaagtctagctaagcagtgttgaaaagcctgcaagatttcagtttacatatcgacagcatatccactgatttctaaatgggctggtcccatcatctgaagattctgtatagaattattaaaaaaaaaatccatctttctttattttcttcacatgcgacaatttcttaagcactttgacattttggtagttccacactattgagagaataatatatttattttgtgacattgcagatgccaaatactgtaaccttctcatgataacaatacttaggttcaagatcactgttcaaaccctgtcatgctttaaaactgatgcgagatgattttgttttttgcataatcaatacttaagggtgcaatcaactgttagtaattgtgcagtaaagtaaagccctgtggtgtatcaactactagttaagagtctcagttgatttctgtaatgtttgacctaataatagcccgtttcgtctctgacccaacagaggaagcacagatcaaatcaccttggagtggtcaccagggggacagggagccccccaccaatgtatcaatgggtgatttatgatgccttctgccctttggcgagtgaatgggtttcccataggggaagttggcctccctccgtgagctttggaaatgttttctaatagacacagggaggccagttctgtttcagagcaattatcttcccaaattctctgttctggtgttggaactgtgtgccctggtttctgttttcctttctactgctgtaattctctgtctcatcatccttctcttttgtttccatagccttttataatgcatatatgatgctgtgaacagaaataaattatttatacaatcaaa

SEQ ID NO: 101287 - DNA, 606 bp, Artificial Sequence
  derived and/or modified sequence
atgggcaacatcagcagcaacatcagcgccttccagagcctgcacattgtgatgctggggctcgatagcgcaggcaagactactgtgctgtatcgcctgaagttcaatgagttcgtgaacacagtgcctactatcggatttaataccgagaagatcaaactgagtaatggaaccgctaagggcatttcctgccacttttgggatgtcggtggccaagaaaagctccggcctctgtggaagtcttactcccgttgcacggacgggatcatctatgtggtggattccgttgacgtagacagattggaggaggccaaaaccgagctgcacaaggtgacgaagtttgcggagaaccaaggcacccctttgttggtgattgcaaacaaacaggacctgcctaaaagtttgccggtggctgagattgagaagcaactggcactgcatgagctcatcccagcaacaacataccacgtgcaacctgcttgtgctatcattggtgaaggactaaccgagggtatggataagctctacgaaatgatcctcaaacgacgtaaaagtctgaaacagaagaagaagcggacgggggatcttagatcttgcgaggtgtag

SEQ ID NO: 101288 - DNA, 606 bp, Artificial Sequence
  derived and/or modified sequence
atgggaaacattagcagcaacatttctgcgttccaatctctgcatatcgtcatgcttggtctggactcagctggcaaaacgacagtgctttatcgcttgaaatttaacgaattcgtaaacacggtgcctaccatcgggtttaatacagagaagatcaagctatcaaacgggactgccaaagggatctcctgtcatttctgggacgttggaggacaggaaaagctccggccactatggaagagctatagccggtgcacggacggcatcatctatgtcgtggactccgtcgatgtagatcgcctcgaggaggccaaaaccgagcttcataaagtgaccaaattcgcagagaaccaagggaccccactcctggttattgctaataaacaggacctccccaaatctctgccagtggcagaaatagagaagcaactggctcttcacgagctcattcctgccacaacctaccatgtccagcctgcttgcgccattatcggagagggactcaccgaagggatggataagctgtacgaaatgattctgaaaaggagaaagagtcttaaacagaaaaagaaaaggaccggcgacctccggagttgcgaagtctag

SEQ ID NO: 101289 - DNA, 225 bp, Artificial Sequence
  derived and/or modified sequence
atgaataagctcacctctctgaaatatctcgaaatgaaagatattgccattaatatttcccggaatctcaaggatttaaaccaaaagtatgctggtctacagccctacttggaccaaataaacgtcatagaagagcaggtggccgcgttggaacaggccgcatataagttggacgcatactcgaagaaattagaggcgaagtacaagaagctggaaaagcgatag

SEQ ID NO: 101290 - DNA, 225 bp, Artificial Sequence
  derived and/or modified sequence
atgaacaagcttacttcactcaaatatttggagatgaaagatatcgccataaatatctcgagaaatcttaaggatctgaatcagaaatacgccggactccaaccttatcttgaccaaattaatgttattgaggaacaagtggccgccctcgaacaggccgcctataagttggatgcttactctaagaaacttgaagccaagtacaaaaagttggagaagagatag

SEQ ID NO: 101291 - DNA, 225 bp, Artificial Sequence
  derived and/or modified sequence
atgaacaagctgaccagcctgaagtacctggagatgaaggacatcgccatcaacatcagcaggaacctgaaggacctgaaccagaagtatgccggcctgcagccctacctggaccagatcaacgtgattgaggagcaggtggccgccctggagcaggccgcctacaagctggatgcctacagcaagaagctggaggccaagtacaagaagctggagaagaggtag

SEQ ID NO: 101292 - DNA, 225 bp, Artificial Sequence
  derived and/or modified sequence
atgaacaagctgaccagcctgaagtacctggagatgaaggacatcgctattaacatttcaaggaatctcaaagatttgaatcagaagtatgccggccttcagccctatttagatcaaattaatgtaatagaggaacaggtggcagcgctggagcaagcagcttacaaattggacgcttacagcaagaagttagaggccaagtacaagaagctggagaaacgatag

SEQ ID NO: 101293 - DNA, 225 bp, Artificial Sequence
  derived and/or modified sequence
atgaacaagctgaccagcctgaagtacctggagatgaaggacatcgcgatcaacatttcacgaaacctaaaagacctgaatcaaaagtatgctgggctgcagccctacctggatcagatcaacgttatcgaggagcaggtagcggctctggaacaagccgcctacaaactggacgcttattcgaagaaactagaggctaagtataaaaagcttgagaagaggtag

SEQ ID NO: 101294 - DNA, 225 bp, Artificial Sequence
  derived and/or modified sequence
atgaacaaattgacttccctgaagtacttagagatgaaagacatcgctatcaatatctcaaggaatctcaaagacttaaaccagaagtatgccggactccagccgtatttggaccagatcaacgtaatcgaggagcaggttgctgctctagaacaggcagcctacaaactcgacgcatactcaaagaagctggaagccaagtataaaaaattagagaagagatag

SEQ ID NO: 101295 - DNA, 225 bp, Artificial Sequence
  derived and/or modified sequence
atgaataagctgacttctctcaagtacctggagatgaaagatatcgctatcaacatcagtagaaacctaaaggacctgaatcagaagtacgccggtctgcagccctacttggaccagattaacgttatcgaagagcaggttgccgcactagaacaggccgcttacaagctcgatgcctactccaaaaaactggaagccaagtacaagaagcttgaaaaacgctag

SEQ ID NO: 101296 - DNA, 225 bp, Artificial Sequence
  derived and/or modified sequence
atgaacaagctgaccagcctgaagtacctggagatgaaggacatcgccatcaacatcagcagaaacctgaaggacctgaaccagaagtacgccggcctgcagccctacctggaccagatcaacgtgatcgaggagcaggtggccgccctggagcaggccgcctacaagctggacgcctacagcaagaagctggaggccaagtacaagaagctggagaagagatag

SEQ ID NO: 101297 - DNA, 300 bp, Artificial Sequence
  derived and/or modified sequence
atgttcagtaagatggccacctatctaacaggggagcttacggcaacttcggaagattataagttgctcgaaaatatgaataagctgacatccctgaaatatctagagatgaaagacatcgctattaatataagcagaaacctgaaagatttaaaccaaaagtatgcaggactgcagccctacctggatcaaataaacgtgattgaggagcaggtggcagccttggagcaggctgcttacaaactggacgcctactctaaaaagctggaagcgaagtacaaaaagctcgaaaagaggtag

SEQ ID NO: 101298 - DNA, 300 bp, Artificial Sequence
  derived and/or modified sequence
atgttcagcaagatggccacctacctgaccggggagctgacagccaccagcgaggactacaagctgctggagaacatgaacaagctgaccagcctgaagtacctggagatgaaggacatcgccatcaacatcagcaggaacctgaaggacctgaaccagaagtatgccggcctgcagccctacctggaccagatcaacgtcatcgaggagcaggtggccgccctggagcaggccgcctacaagctggatgcctacagcaagaagctggaggccaagtacaagaagctggagaagaggtag

SEQ ID NO: 101299 - DNA, 300 bp, Artificial Sequence
  derived and/or modified sequence
atgttcagcaagatggccacctacctgaccggcgagctgaccgccacaagcgaagactacaaactgctcgagaacatgaacaaacttacaagtctcaagtacctggagatgaaagatatagctataaacatttccagaaatctgaaggatctgaaccagaaatacgcaggcctgcagccctacctggatcagatcaacgttatagaagaacaggtcgccgccttggaacaggctgcctacaaactggatgcctacagtaagaagctggaggccaagtataaaaagttggagaaacggtag

SEQ ID NO: 101300 - DNA, 300 bp, Artificial Sequence
  derived and/or modified sequence
atgttctcaaaaatggcaacatatttgaccggcgaactcacggcgacttcggaagactacaagttactggagaatatgaacaagctgactagcttgaagtacctggagatgaaggacattgccattaacatttctcgcaatctcaaggatctaaatcagaaatacgcaggattgcagccatatctggaccagattaatgttatcgaggagcaggtggcggctctcgagcaggctgcttataaactagatgcttactccaaaaagctggaagccaagtataagaaattagagaaacgttag

SEQ ID NO: 101301 - DNA, 300 bp, Artificial Sequence
  derived and/or modified sequence
atgttcagcaagatggccacctacctgaccggcgagctgaccgccaccagcgaggactacaagctgctggagaacatgaacaagctgaccagcctgaagtacctggagatgaaggacatcgccatcaacatcagcagaaacctgaaggacctgaaccagaagtacgccggcctgcagccctacctggaccagatcaacgtgatcgaggagcaggtggccgccctggagcaggccgcctacaagctggacgcctacagcaagaagctggaggccaagtacaagaagctggagaagagatag

SEQ ID NO: 101302 - DNA, 429 bp, Artificial Sequence
  derived and/or modified sequence
atggccgcagccgccgagggcgtcctggctactcgctccgacgagcctgcgagggacgacgcagccgtcgagaccgccgaggaagccaaggagcctgccgaggcagatatcaccgaactgtgtcgcgatatgttctcaaagatggctacatatctgacaggcgagctcacagccacctccgaagactacaagttactcgagaatatgaacaagctgacctctcttaagtacctcgaaatgaaggatatcgcgatcaacatctcgcgaaacttgaaggacctgaaccaaaaatatgcaggtctgcagccctatctggatcaaatcaacgttatagaagaacaagtagccgcattggaacaggctgcttacaagcttgacgcttattctaagaaactcgaagccaagtacaaaaaactggaaaaacgctag

SEQ ID NO: 101303 - DNA, 429 bp, Artificial Sequence
  derived and/or modified sequence
atggctgctgctgctgagggcgtgctggccaccaggagtgatgagcccgccagagatgatgctgctgtggagacagctgaggaggccaaggagcctgctgaggccgacatcacagagctgtgccgggacatgttcagcaagatggccacctacctgactggagagctgacagccaccagcgaggactacaagctgctggagaacatgaacaagctgaccagcctgaagtacctggagatgaaggacatcgccatcaacatcagcaggaacctgaaggacctgaaccagaagtatgccggcctgcagccctacctggaccagatcaacgtgattgaggagcaggtggccgccctggagcaggccgcctacaagctggatgcctacagcaagaagctggaggccaagtacaagaagctggagaagaggtag

SEQ ID NO: 101304 - DNA, 429 bp, Artificial Sequence
  derived and/or modified sequence
atggccgccgccgccgagggcgtgctggccacccggagcgacgagccagcccgtgacgatgccgcagttgagactgccgaggaagctaaagaacctgccgaagctgatatcaccgaactgtgccgtgatatgttctctaaaatggccacctatctgaccggcgaactcactgcaacaagcgaagattacaaattgttggaaaacatgaacaaactcacttcccttaaatatctagaaatgaaagatatcgctattaacatctccaggaacttgaaggacctgaatcagaagtatgccggattgcaaccctatctggatcagatcaatgtaatcgaggaacaggtggccgcgttagagcaggcagcatataagctggatgcctatagtaaaaagttagaggccaagtataaaaaactagagaaacggtag

SEQ ID NO: 101305 - DNA, 429 bp, Artificial Sequence
  derived and/or modified sequence
atggctgctgccgcagagggagtgcttgcaacgagatctgatgagcccgcacgcgacgacgctgctgttgaaactgctgaggaggctaaagagcccgcagaggcggacattacggagctgtgccgagatatgttttccaaaatggcgacctatttgacaggtgagcttactgcaacaagcgaggattacaagttactagagaacatgaataaattaacttcgttaaagtatctggagatgaaggatatcgctataaacatttcaaggaacttgaaagacctcaaccagaagtacgccggacttcaaccctacctggaccagatcaacgtcatagaggagcaggtggcagccctggaacaggctgcctacaagctagacgcgtatagtaagaaactagaagccaagtataagaagttagaaaaaagatag

SEQ ID NO: 101306 - DNA, 1958 bp, Artificial Sequence
  derived and/or modified sequence
ccggaaacagcgcggggtccgctatggcggcggcagccgagggcgtactggcgacccggagtgatgagcccgcccgagacgatgccgccgtggagacagctgaggaagcaaaggagcctgctgaagctgacatcactgagctctgccgggacatgttctccaaaatggccacttacctgactggggaactgacggccaccagtgaagactataagctcctggaaaatatgaataaactcaccagcttgaagtatcttgaaatgaaagatattgctataaacattagtaggaacttaaaggacttaaaccagaaatatgctggactgcagccttatctggatcagatcaatgtcattgaagagcaggtagcagctcttgagcaggcagcttacaagttggatgcatattcaaaaaaactggaagccaagtacaagaagctggagaagcgatgagaaacttatttctatgggacagagtcttttttttttaatgtggaagaatgtcttataaaacctgaatcctgaggctgatgaattgtgaaaattcctcaaaaggaaattatgctggtcatcacaggaacatctcaacgttcgagtaaactggaggactgtggctattcctgaaccttctttgagacagaatccctcagaatctcacacttataacttcctaccttttacttgaatgctttgccatattcaggacagagactctcacaaagttcagaaaacagctggacttaccagtaaaatcaaatgagaggacctattttctctggtagtggttgattactacattattttcttaagtggctggttttttagttactatgtaaatggtcgtttttctgttaatgatgctaatgtgttgtaaacaagattctaaatttaaaaaggaaaacaaaacaaacttgttctttgcagcttatcaccttgtgaatgtcggtaacttacttttccataatattgcaaataacataaaatcttaaaataattccaagctgagtcttctagattgagcagaaatggtgaaaggagtattgataacttggcgtatgtgatgggcccctcttgtttattttctatgtgagtcacattgacatgcgatcagtttgggaaatgtgatgaaaacaaagactagatgggtatgtgtgtttatgtgttgggtagggaggtgacgattgccactcataaaataaaggattttataaaataccttcctactgtgtatgtaggatttggggggatcttagggacctaatcgacttctttgcacactaaaaacatcagacaatgggacatactgactgaccagtctaggttgaaagataggcagccttacccagaacacaacattagcagctgggaaggtgtctgaggtccccaattacatatcccaaagagtttcttacttctgtttctgtcatttcccctctgttccagacagtcatcatttatcctctgttcttcctggactgttgctgtggtctcttctcatcttaactgtcccttccaaccaccctccacactgctgccagagcaatcttaaaaatgtaaactggccctattactcctgcttagaaccctgtagtgacttatcatggcctctgaaaaatctagactttcattatgcatacaagtcccttgtgtttttttgtttgtttatagacagggtctctattgtcacccaggctggagtgtggtggtgtgataatagctcaccttgacctcctaggctcaactgatcttcccacctcagcctcctgaatagctgggactaccagcacgctccaccatgccttgctaattattttttatacagatggagtctcactatgttgtccaggctggtcttgaactggcctcaagtgattctcttaccacagcctgccagagtgctgagattgtaggcatgaaccaccgtgcctaacataaggcccctatttaaacatttttctt

SEQ ID NO: 101307 - DNA, 2024 bp, Artificial Sequence
  derived and/or modified sequence
agtgaaggacttgaaattatggcagatggagaatggagccgacttgatggaatgaaggcaagtggagggatgtcggaacaggctgctttggctggattagcaccgggtgtaggcgggacacttagtcattctcccttggcccagacgatgccgccgtggagacagctgaggaagcaaaggagcctgctgaagctgacatcactgagctctgccgggacatgttctccaaaatggccacttacctgactggggaactgacggccaccagtgaagactataagctcctggaaaatatgaataaactcaccagcttgaagtatcttgaaatgaaagatattgctataaacattagtaggaacttaaaggacttaaaccagaaatatgctggactgcagccttatctggatcagatcaatgtcattgaagagcaggtagcagctcttgagcaggcagcttacaagttggatgcatattcaaaaaaactggaagccaagtacaagaagctggagaagcgatgagaaacttatttctatgggacagagtcttttttttttaatgtggaagaatgtcttataaaacctgaatcctgaggctgatgaattgtgaaaattcctcaaaaggaaattatgctggtcatcacaggaacatctcaacgttcgagtaaactggaggactgtggctattcctgaaccttctttgagacagaatccctcagaatctcacacttataacttcctaccttttacttgaatgctttgccatattcaggacagagactctcacaaagttcagaaaacagctggacttaccagtaaaatcaaatgagaggacctattttctctggtagtggttgattactacattattttcttaagtggctggttttttagttactatgtaaatggtcgtttttctgttaatgatgctaatgtgttgtaaacaagattctaaatttaaaaaggaaaacaaaacaaacttgttctttgcagcttatcaccttgtgaatgtcggtaacttacttttccataatattgcaaataacataaaatcttaaaataattccaagctgagtcttctagattgagcagaaatggtgaaaggagtattgataacttggcgtatgtgatgggcccctcttgtttattttctatgtgagtcacattgacatgcgatcagtttgggaaatgtgatgaaaacaaagactagatgggtatgtgtgtttatgtgttgggtagggaggtgacgattgccactcataaaataaaggattttataaaataccttcctactgtgtatgtaggatttggggggatcttagggacctaatcgacttctttgcacactaaaaacatcagacaatgggacatactgactgaccagtctaggttgaaagataggcagccttacccagaacacaacattagcagctgggaaggtgtctgaggtccccaattacatatcccaaagagtttcttacttctgtttctgtcatttcccctctgttccagacagtcatcatttatcctctgttcttcctggactgttgctgtggtctcttctcatcttaactgtcccttccaaccaccctccacactgctgccagagcaatcttaaaaatgtaaactggccctattactcctgcttagaaccctgtagtgacttatcatggcctctgaaaaatctagactttcattatgcatacaagtcccttgtgtttttttgtttgtttatagacagggtctctattgtcacccaggctggagtgtggtggtgtgataatagctcaccttgacctcctaggctcaactgatcttcccacctcagcctcctgaatagctgggactaccagcacgctccaccatgccttgctaattattttttatacagatggagtctcactatgttgtccaggctggtcttgaactggcctcaagtgattctcttaccacagcctgccagagtgctgagattgtaggcatgaaccaccgtgcctaacataaggcccctatttaaacatttttctt

SEQ ID NO: 101308 - DNA, 1217 bp, Artificial Sequence
  derived and/or modified sequence
ggaaacagcgcggggtccgctatggcggcggcagccgagggcgtactggcgacccggagtgatgagcccgcccgagacgatgccgccgtggagacagctgaggaagcaaaggagcctgctgaagctgacatcactgagctctgccgggacatgttctccaaaatggccacttacctgactggggaactgacggccaccagtgaagactataagctcctggaaaatatgaataaactcaccagcttgaagtatcttgaaatgaaagatattgctataaacattagtaggaacttaaaggacttaaaccagaaatatgctggactgcagccttatctggatcagatcaatgtcattgaagagcaggtagcagctcttgagcaggcagcttacaagttggatgcatattcaaaaaaactggaagccaagtacaagaagctggagaagcgatgagaaacttatttctatgggacagagtcttttttttttaatgtggaagaatgtcttataaaacctgaatcctgaggctgatgaattgtgaaaattcctcaaaaggaaattatgctggtcatcacaggaacatctcaacgttcgagtaaactggaggactgtggctattcctgaaccttctttgagacagaatccctcagaatctcacacttataacttcctaccttttacttgaatgctttgccatattcaggacagagactctcacaaagttcagaaaacagctggacttaccagtaaaatcaaatgagaggacctattttctctggtagtggttgattactacattattttcttaagtggctggttttttagttactatgtaaatggtcgtttttctgttaatgatgctaatgtgttgtaaacaagattctaaatttaaaaaggaaaacaaaacaaacttgttctttgcagcttatcaccttgtgaatgtcggtaacttacttttccataatattgcaaataacataaaatcttaaaataattccaagctgagtcttctagattgagcagaaatggtgaaaggagtattgataacttggcgtatgtgatgggcccctcttgtttattttctatgtgagtcacattgacatgcgatcagtttgggaaatgtgatgaaaacaaagactagatgggtatgtgtgtttatgtgttgggtagggaggtgacgattgccactcataaaataaaggattttataaaataccttc

SEQ ID NO: 101309 - DNA, 429 bp, Artificial Sequence
  derived and/or modified sequence
atggccgccgccgccgagggcgtgctggccaccagaagcgacgagcccgccagagacgacgccgccgtggagaccgccgaggaggccaaggagcccgccgaggccgacatcaccgagctgtgcagagacatgttcagcaagatggccacctacctgaccggcgagctgaccgccaccagcgaggactacaagctgctggagaacatgaacaagctgaccagcctgaagtacctggagatgaaggacatcgccatcaacatcagcagaaacctgaaggacctgaaccagaagtacgccggcctgcagccctacctggaccagatcaacgtgatcgaggagcaggtggccgccctggagcaggccgcctacaagctggacgcctacagcaagaagctggaggccaagtacaagaagctggagaagagatag

SEQ ID NO: 101310 - protein, 233 aa, Artificial Sequence
  derived and/or modified sequence
MIYPLIVLPLCASWHWGLIRKGIVLFWGESVKYFLDNLDRIGQLNYFPSKQDILLARKATKGIVEHDFVIKKIPFKMVDVGGQRSQRQKWFQCFDGITSILFMVSSSEYDQVLMEDRRTNRLVESMNIFETIVNNKLFFNVSIILFLNKMDLLVEKVKTVSIKKHFPDFRGDPHRLEDVQRYLVQCFDRKRRNRSKPLFHHFTTAIDTENVRFVFHAVKDTILQENLKDIMLQ

SEQ ID NO: 101311 - DNA, 702 bp, Artificial Sequence
  derived and/or modified sequence
atgatatatcctctgatcgtgttgcccctgtgcgcctcatggcattggggcctaatccgcaaagggatagtgctattttggggagagagtgtgaagtattttctggataatctcgatagaatcggtcaattgaactattttccatccaagcaggacatccttctggctaggaaggccaccaaagggatcgtggagcacgatttcgtaatcaagaaaatacctttcaaaatggtcgatgtgggcgggcagagatctcagcgacagaaatggtttcaatgtttcgacggtatcacatctatcctgttcatggtgtcaagctctgagtatgatcaggtcctcatggaagatcgtagaactaaccgcctggtggagtcaatgaatatattcgaaacaatcgtgaacaacaagctcttcttcaatgtgtcaattattctgtttctgaacaagatggacctgctagtagagaaagtgaagacagtatcgatcaaaaagcacttcccggactttcggggcgacccccatcggctcgaggacgtccagcgctatttggtgcaatgtttcgacaggaaaaggcgcaaccgctctaaacctctgttccaccactttaccacagcaattgacactgagaatgtgagattcgtgtttcacgccgtcaaggacacaatactgcaagagaatctaaaagacattatgctgcagtag

SEQ ID NO: 101312 - DNA, 3785 bp, Artificial Sequence
  derived and/or modified sequence
aatgcttctgagaagagagaggaagatgacttcagaggctgcttgtggtctctcactcaaggctggtagggagccccggtctgcgtcctggaggaacggcacgctgagtcctgggccagtggccggcggggctgttggcgaccacagtagcacacaagggctctttctgaggagcaggagaccctggcacgggccccacgggagtgtctggggcgtccccgcctgtggcctcttctccccgccgcagcaccaatggctccacgagcagggctcggagctggccctctcctgcttcggagccgcgctgactgggtgtgtggcggatgggaggccgccctgagtgctcctcctcccttttgtacagcctgggtggaaaggacgggcctggtgcacttcctgcgggagggaggacatggggcctgcttccctctggcgctcctccacccgggcagcgtggtttctttccaaatgatttatcctctcatcgtcctgccgctctgtgcttcatggcattggggtcttatccggaaggggattgtccttttttggggggagtcggtgaagtacttcctggacaacttggaccggatcggccagctgaattactttcctagtaagcaagatatcctgctggctaggaaagccaccaagggaattgtggagcatgacttcgttattaagaagatcccctttaagatggtggatgtgggcggccagcggtcccagcgccagaagtggttccagtgcttcgacgggatcacgtccatcctgttcatggtctcctccagcgagtacgaccaggtcctcatggaggacaggcgcaccaaccggctggtggagtccatgaacatcttcgagaccatcgtcaacaacaagctcttcttcaacgtctccatcattctcttcctcaacaagatggacctcctggtggagaaggtgaagaccgtgagcatcaagaagcacttcccggacttcaggggcgacccgcacaggctggaggacgtccagcgctacctggtccagtgcttcgacaggaagagacggaaccgcagcaagccactcttccaccacttcaccaccgccatcgacaccgagaacgtccgcttcgtgttccatgctgtgaaagacaccatcctgcaggagaacctgaaggacatcatgctgcagtgagcgaggaagccccggggtttgtcgtcgttgagcagcccccacggctgtcggtcagactcttgggtgtgtgttgtctgtgtggtccttgagtgggtttctcggatccgtgccctggaatacctggctcaggaatgctgtcagaccagccagccagcgagctctaggcaaaaggacatggaaactgtcacgttagctactgaatcctgggggcgagtgaaactactgaaaatccgagtgatgatgttgtgaatacggaacacctaatcacacagcttgctttgcttttacagaaacgttcctctttttctgacgcagtttaattgaggaccgtgttgtgtgtgtatgtgtgtacacacgctctgtctttaatgacagaaacacaaaaaccagctggccttgcagacggcttttctaactcacaagtcttccctgagacagactaacctgaaagctttgcctaacagtagcttgtagagatccagtgcacgccgatgctgctaaactcagtgcctgagcccggccctgcagccccagccgcagtgtctgaaggccacctcccaaagggagcacgttgccttttcaaactcccgtgccgatttcctaagagcccctagtccaagcctctcagatgaagctgaggagccgtgcctaggatcccttcccagctctgaggacgggctgcagagctctgcaggtgtggattcaccttacgcccctacagcaggctcagcccttcccaccctgccccatgcccagcagcacaacacggagtgagacaggatgcccacggtgactgccgctccgtccgtgcacacacagcggtgctcttctccccttagccacccactgcccaacccaacggcaaagacacagaaaccaggtccccttgcagacggctctcccatcttcctgcaagtcatctgctcacacacagttggcagcacatagcgtttccttctttcagaaacattcctcttctggggcttcagaaagctggcaaggccactagcagagcttttgttaatgccccagctgcttggcgagctaacagctgacctttcgggaagcccacagacgctggaggaatcttgagtttctccaaactgccgctccaccagtgcctttggacagccgtgcctgttcgccgctctccctaagtctgattctcatcgaggcccctcgcttctatgactgtgcttgcagaagagtaaacactctcggatgccgctgtcctgggggagcccgcgggagcctgtgaatgttgatacgagctggccagtcctgggcccagctcacttgtccagctacctgccaggtggctttcactgtgtttaaaatacattgcattccaagctggtcccctctgtgtatcactctactgagaaatcctgcctagtgtgttttgggatgtgtcctagcatttacaagaaaatgaaaagcgtcctcttaattggcacccgaatgttgctgtggctcagtcacatatcccagggccctcgtcccgaggccgtgctgccccgagccccgagcccctctgcagctcacccttggcttgttttccgcaaacccggtaaacgcaagcccttggggcagatgcagaagcagaagagggaggggaaacctgcctctgggtcaccctgttagcacagcgttctcatcgggagacagcatggaactctctctcgcagtgctcgaggctgtgtgtcagtgtttgctgggcttgtggctccttttttggctggataaagaagtcgctgtttttgtactgcttctgtggctcttcacagacctcacggatgtgaccggagatgagtgccgatgaccacgttttaaaggagaaagagagctcctggtggggccctcggggtggtctcaggtcccatttgcagtctgcaacagtgacgcgcagcccggtccggagcgtggtgagctttgtttgccttctgggtcagctttcgctgtgtctcctgtgtgtgttagaatccagagcccagaggaagtgcaagcgggtcctccgccaacggggagagcctcttcgcggcgctgttggcgacagcagcgctgtgattcgcgtagcaggggagttgtttgaaacaccttcctgagtagtccggccttgtcaatgagtgcttgttttcctttaaacagtctgacatatttactcgtcactttcaaaccagaagcatgagaggaaggagatattgtggggtccgtttaactcgatagaaagcgcagggggatggcccccggcgcgggctcttgacccgctcagcgctgaccccaccgccctggccgaggcacttggccttgctgagctggacttcctcctcctcctcctcatgaccggggtgaattagaacgtttttaaagacacccccttccaaattctgtaacacattgtaattggagaagaaggaaactctgcaaggctaaactgtcattcacaacttggctacacatagactctagtcagttttgtctccagaaccttaggcttttgtattttttaattttaatttcactgttaatccttattgtcttttttattaagatgttggaaaagcaggaggtagttgtgcctcaattattgcaaaaatgtaacaataaagttcctc

SEQ ID NO: 101313 - DNA, 702 bp, Artificial Sequence
  derived and/or modified sequence
atgatctaccccctcatcgtgctgcccctgtgtgcctcctggcactggggcctcatcagaaaaggaattgtgctcttctggggcgagagcgtgaagtacttcctggacaacctggacagaattggccagctgaactacttccccagcaagcaggacatcctgctggccaggaaggccaccaagggcatcgtggagcatgactttgtgatcaagaagatccccttcaagatggtggatgtgggcggccagaggagccagaggcagaagtggttccagtgctttgatggcatcaccagcatcctcttcatggtgagcagcagtgaatatgaccaggtgctgatggaggacaggaggaccaaccggctggtggagagcatgaacatctttgagaccatcgtgaacaacaagctgttcttcaacgtgtccatcatcctcttcctgaacaagatggacctgctggtggagaaggtgaagacagtgtccatcaagaagcacttcccagacttccggggggacccccaccggctggaggatgtgcagcgctacctggtgcagtgctttgacaggaagagaagaaacagaagcaagcccctcttccaccacttcaccacagccatcgacacagaaaatgtgcgctttgtgttccacgctgtgaaggacaccatcctgcaggagaacctgaaggacatcatgctgcagtag

SEQ ID NO: 101314 - DNA, 702 bp, Artificial Sequence
  derived and/or modified sequence
atgatctaccccctgatcgtgctgcccctgtgcgccagctggcactgggggctgattcgcaaaggcatcgtgcttttctggggcgagtctgtgaaatattttctggataatctagacaggatcggccaacttaattactttcccagtaagcaggatatattgctcgcgagaaaggctacaaagggaattgtagagcatgattttgtgataaagaaaataccctttaaaatggttgatgtcgggggtcaaaggtcccagaggcaaaaatggtttcagtgcttcgacggaatcactagtatcctctttatggtctccagctccgaatacgaccaagtcctgatggaggaccgtcgcaccaatagactggttgagtccatgaatattttcgagacaatcgtcaataataagctgttcttcaacgtgtccatcattctctttctgaacaagatggacctgctcgtggaaaaggtaaagaccgtcagtatcaagaagcacttccccgactttcggggggatccacacaggttagaagatgtgcagcggtatttggtccagtgcttcgaccgcaaacgtcggaacaggagtaaacctttgttccaccatttcaccactgccatcgatactgaaaatgttcgcttcgtgttccacgctgtcaaagatacaatcctgcaggagaatcttaaagacattatgcttcaatag

SEQ ID NO: 101315 - DNA, 702 bp, Artificial Sequence
  derived and/or modified sequence
atgatttatcctctgattgtactgccactttgcgccagctggcattggggcttgatccgcaaaggcatcgtgctcttttggggagagtcggtgaaatattttctggacaatctggaccgcatcggtcagcttaattactttccctccaagcaggatattctactggctagaaaggcaacaaagggtattgtcgagcacgatttcgttattaagaaaatcccctttaagatggtcgacgtgggaggccagaggagccagaggcagaagtggtttcagtgttttgacgggatcacctcaatcctcttcatggtatcatccagtgagtatgaccaggtcttgatggaggaccgtagaactaacaggttggtggagtccatgaacattttcgagaccatcgttaataataaattgtttttcaacgtttccattattttatttctgaacaaaatggacctattagttgagaaagtcaagaccgtctctatcaagaagcactttcctgatttcaggggcgacccccaccgtcttgaagatgtgcaacggtacctggtgcagtgtttcgaccggaaaagaagaaatcggtccaaacctctgttccatcacttcaccactgccatagatacagaaaatgtgcgattcgtcttccatgccgtaaaggacacaatactgcaggagaacctaaaagacattatgctgcaatag

SEQ ID NO: 101316 - DNA, 702 bp, Artificial Sequence
  derived and/or modified sequence
atgatctaccccctgatcgtgctgcccctgtgcgccagctggcactggggcctgatcagaaagggcatcgtgctgttctggggcgagagcgtgaagtacttcctggacaacctggacagaatcggccagctgaactacttccccagcaagcaggacatcctgctggccagaaaggccaccaagggcatcgtggagcacgacttcgtgatcaagaagatccccttcaagatggtggacgtgggcggccagagaagccagagacagaagtggttccagtgcttcgacggcatcaccagcatcctgttcatggtgagcagcagcgagtacgaccaggtgctgatggaggacagaagaaccaacagactggtggagagcatgaacatcttcgagaccatcgtgaacaacaagctgttcttcaacgtgagcatcatcctgttcctgaacaagatggacctgctggtggagaaggtgaagaccgtgagcatcaagaagcacttccccgacttcagaggcgacccccacagactggaggacgtgcagagatacctggtgcagtgcttcgacagaaagagaagaaacagaagcaagcccctgttccaccacttcaccaccgccatcgacaccgagaacgtgagattcgtgttccacgccgtgaaggacaccatcctgcaggagaacctgaaggacatcatgctgcagtag

SEQ ID NO: 101317 - protein, 534 aa, Artificial Sequence
  derived and/or modified sequence
MFSWVSKDARRKKEPELFQTVAEGLRQLYAQKLLPLEEHYRFHEFHSPALEDADFDNKPMVLLVGQYSTGKTTFIRHLIEQDFPGMRIGPEPTTDSFIAVMHGPTEGVVPGNALVVDPRRPFRKLNAFGNAFLNRFMCAQLPNPVLDSISIIDTPGILSGEKQRISRGYDFAAVLEWFAERVDRIILLFDAHKLDISDEFSEVIKALKNHEDKIRVVLNKADQIETQQLMRVYGALMWSLGKIINTPEVVRVYIGSFWSHPLLIPDNRKLFEAEEQDLFKDIQSLPRNAALRKLNDLIKRARLAKVHAYIISSLKKEMPNVFGKESKKKELVNNLGEIYQKIEREHQISPGDFPSLRKMQELLQTQDFSKFQALKPKLLDTVDDMLANDIARLMVMVRQEESLMPSQVVKGGAFDGTMNGPFGHGYGEGAGEGIDDVEWVVGKDKPTYDEIFYTLSPVNGKITGANAKKEMVKSKLPNTVLGKIWKLADVDKDGLLDDEEFALANHLIKVKLEGHELPADLPPHLVPPSKRRHE

SEQ ID NO: 101318 - protein, 145 aa, Artificial Sequence
  derived and/or modified sequence
MFSWVSKDARRKKEPELFQTVAEGLRQLYAQKLLPLEEHYRFHEFHSPALEDADFDNKPMVLLVGQYSTGKTTFIRHLIEQDFPGMRIGPEPTTDSFIAVMHGPTEGVVPGNALVVDPRRPFRKLNAFGNAFLNRFMCAQLPNPV

SEQ ID NO: 101319 - protein, 431 aa, Artificial Sequence
  derived and/or modified sequence
MEQPGTAASPVSGSMFSWVSKDARRKKEPELFQTVAEGLRQLYAQKLLPLEEHYRFHEFHSPALEDADFDNKPMVLLVGQYSTGKTTFIRHLIEQDFPGMRIGPEPTTDSFIAVMHGPTEGVVPGNALVVDPRRPFRKLNAFGNAFLNRFMCAQLPNPVLDSISIIDTPGILSGEKQRISRGYDFAAVLEWFAERVDRIILLFDAHKLDISDEFSEVIKALKNHEDKIRVVLNKADQIETQQLMRVYGALMWSLGKIINTPEVVRVYIGSFWSHPLLIPDNRKLFEAEEQDLFKDIQSLPRNAALRKLNDLIKRARLAKVHAYIISSLKKEMPNVFGKESKKKELVNNLGEIYQKIEREHQISPGDFPSLRKMQELLQTQDFSKFQALKPKLLDDEEFALANHLIKVKLEGHELPADLPPHLVPPSKRRHE

SEQ ID NO: 101320 - protein, 148 aa, Artificial Sequence
  derived and/or modified sequence
MFSWVSKDARRKKEPELFQTVAEGLRQLYAQKLLPLEEHYRFHEFHSPALEDADFDNKPMVLLVGQYSTGKTTFIRHLIEQDFPGMRIGPEPTTDSFIAVMHGPTEGVVPGNALVVDPRRPFRKLNAFGNAFLNRFMCAQLPNPVLDS

SEQ ID NO: 101321 - protein, 510 aa, Artificial Sequence
  derived and/or modified sequence
MFSWVSKDARRKKEHYRFHEFHSPALEDADFDNKPMVLLVGQYSTGKTTFIRHLIEQDFPGMRIGPEPTTDSFIAVMHGPTEGVVPGNALVVDPRRPFRKLNAFGNAFLNRFMCAQLPNPVLDSISIIDTPGILSGEKQRISRGYDFAAVLEWFAERVDRIILLFDAHKLDISDEFSEVIKALKNHEDKIRVVLNKADQIETQQLMRVYGALMWSLGKIINTPEVVRVYIGSFWSHPLLIPDNRKLFEAEEQDLFKDIQSLPRNAALRKLNDLIKRARLAKVHAYIISSLKKEMPNVFGKESKKKELVNNLGEIYQKIEREHQISPGDFPSLRKMQELLQTQDFSKFQALKPKLLDTVDDMLANDIARLMVMVRQEESLMPSQVVKGGAFDGTMNGPFGHGYGEGAGEGIDDVEWVVGKDKPTYDEIFYTLSPVNGKITGANAKKEMVKSKLPNTVLGKIWKLADVDKDGLLDDEEFALANHLIKVKLEGHELPADLPPHLVPPSKRRHE

SEQ ID NO: 101322 - DNA, 1605 bp, Artificial Sequence
  derived and/or modified sequence
atgtttagctgggtgagtaaagatgctcgaagaaaaaaggagcccgagttattccaaaccgtggctgaaggtctgcggcagctttatgcacaaaaactgctacccctggaagagcattacagatttcacgagttccactcccccgctctggaggacgccgactttgacaataagccaatggtgctgctggtggggcaatattccactggaaagactacttttattaggcatctcatcgagcaggattttcctggcatgaggatcggacctgagcccaccacagactccttcattgccgtgatgcatgggcctactgaaggcgttgttcccggtaacgctctcgttgtggacccccgtagaccctttcggaagctaaacgcgttcggcaacgcatttttgaaccggttcatgtgtgcgcaactgcctaaccctgtcctggactctattagtataatagatacacccggcatcctatcaggagagaagcaacgcataagcaggggttacgacttcgcagcagtgttggagtggttcgccgagcgagtagatcgcataatactcttgttcgacgcccataagcttgacatttctgacgaattctccgaggtgataaaagcgctaaaaaatcacgaagacaagattcgggtcgtcttaaataaggcggaccagatcgaaacccagcaattgatgagagtgtatggtgccctcatgtggagtctgggtaaaatcatcaacacaccagaggtggtgagggtttatattggctctttctggtctcatcccctcctgatccctgacaatagaaaactgttcgaggccgaagaacaggacttgttcaaggatatacagtctcttcccaggaatgctgccctgagaaaactgaatgacctcattaaacgagcaagacttgctaaagtacatgcgtacattatatcttccttgaagaaggaaatgcctaacgtgtttggaaaggagtcgaagaaaaaagaacttgtcaacaatctgggtgagatataccagaagattgagcgcgagcatcagatctctccaggggactttccttcactccgcaaaatgcaggagttactgcagactcaggatttcagtaaattccaagcactaaagccaaaactgctggacaccgtcgatgacatgttggctaatgacattgccaggttaatggtgatggtgcgccaggaggaatctctgatgcctagtcaggtcgtgaagggaggtgcatttgatggtaccatgaatggtcccttcggacacggttatggcgagggcgcgggcgagggaattgacgatgtggaatgggtggtgggaaaagataagcctacatacgacgaaatcttttataccctgagcccagtgaacggaaagatcacaggggctaatgccaagaaggaaatggtgaaatccaagctacctaacacagttcttggtaaaatctggaagctcgctgatgtcgacaaagacggactcctcgacgacgaagagtttgctctggctaaccatttgattaaggtcaaactggaaggccatgaattaccggctgaccttccaccccatctggtaccaccttccaagcgccgccacgagtag

SEQ ID NO: 101323 - DNA, 1605 bp, Artificial Sequence
  derived and/or modified sequence
atgttttcttgggtgagtaaagacgctcgccgcaaaaaagagcctgagctgttccagacagttgccgaggggctcaggcagctgtatgcgcagaagctcctcccactggaagagcattacaggtttcacgagttccactccccagctctcgaggatgccgatttcgacaataagccaatggtgctcctggtgggacaatactctacagggaaaaccacgttcattagacatctgattgagcaggattttccaggcatgaggatcggtcctgagccaactaccgattcttttatagcggtgatgcatggacccacagaaggggtggtgcctggcaatgctctcgtcgtggatccgcgacgaccatttcggaagttgaatgcctttggaaacgccttcctgaacagatttatgtgtgctcagctccctaaccccgtgctggactcgatcagcattatcgatactcctggtatcctgagcggggagaaacaaaggatcagccgcggatatgactttgccgccgtgctcgagtggttcgctgagcgagtggaccgcatcatcctgctgttcgacgctcacaagctggacatttctgatgaattctcggaagtgatcaaggccctgaaaaatcacgaagacaagatcagggtggtactgaataaggctgatcagattgagacacagcagctgatgagagtgtacggagccttgatgtggagcctgggcaaaatcatcaataccccggaggtggttagagtgtatattggctcattctggtcccatccactgcttatccctgacaaccgtaaactgtttgaggcagaagaacaggacctcttcaaggatatccagagcctccccaggaatgcagcactccgcaaactgaatgatttaatcaaacgagccagattggccaaggtccacgcatacatcatatcttctttgaaaaaagagatgcctaacgtatttggtaaggaatccaagaaaaaggaactagtgaataacctaggggagatatatcaaaaaatcgaaagggaacatcagatctctccaggtgactttcccagcttgagaaaaatgcaggagctcctccaaacccaggatttctctaagttccaggccctaaaacctaaactactggacaccgtcgacgacatgctggccaatgacatcgctcgtcttatggtaatggtcaggcaagaggaaagtctcatgccaagccaggtggtgaagggtggcgctttcgacggaaccatgaacggcccctttgggcacggatatggagagggggccggcgagggcatcgacgatgtcgagtgggtcgttggaaaagataaacccacctatgacgaaattttctacaccctgtcccctgtgaacgggaaaattactggtgctaacgcaaagaaggagatggtaaaaagcaaattgccaaacacagtactgggcaaaatctggaagctggctgacgttgacaaggacgggctattagacgacgaagagtttgcactggctaaccatttgattaaagtgaagctggaaggacacgaattacctgctgacctgcctccccacctcgtcccccccagcaagagaagacacgaatag

SEQ ID NO: 101324 - DNA, 1296 bp, Artificial Sequence
  derived and/or modified sequence
atggagcagcccggcaccgccgcgagtcccgttagcggtagtatgttttcctgggtgagtaaggacgccagacggaaaaaggagccagaattgttccagaccgtagccgagggtctccgacagctttacgcccagaaattgctcccactggaggaacattatcgattccacgaatttcactccccagccctggaggatgccgatttcgacaataagcccatggtgctgctggtaggacagtactctaccggtaagacaaccttcatcagacatttgatagagcaggacttcccagggatgagaatcggccctgaacccaccaccgactcattcatcgccgtcatgcatgggcccactgaaggagtggtcccgggcaatgccttagtggtcgacccccggaggccatttcgaaaactgaacgcgtttggcaacgcctttctcaaccgttttatgtgcgcccagctgcctaatcccgtcctggatagtatcagtattattgatactcctggaatcctgagcggggaaaagcagagaatctcaaggggctatgattttgcagctgttctcgagtggtttgccgagagagtggatcgcattatactgcttttcgatgcccacaagctggacatatctgatgagtttagcgaagtgatcaaggcattgaagaaccacgaagataagatcagagtggtgttaaataaggccgatcagattgaaacccagcagttgatgcgagtgtacggcgccctgatgtggagcttgggcaaaatcattaatactcccgaggttgtccgagtgtatattgggagcttctggtcgcacccactgttaatcccagataacaggaaactgttcgaagcagaggagcaggacctttttaaggacattcagagccttccccgaaacgcagccctgcggaaacttaatgacttgataaagagagcccggttggcaaaggtacacgcctacatcataagctctctgaaaaaggagatgcctaatgtattcggcaaggaatctaagaagaaggaattggtgaacaacctcggagagatttaccaaaagatcgaacgcgaacaccagatctccccgggtgatttcccaagcttgcgtaagatgcaagaattgttgcagacacaggatttttcaaagttccaagctctgaagcctaagctcctcgatgacgaggagttcgccctcgcgaatcacctgattaaagtcaagttggagggccacgagctccctgcagacctgccccctcatttagtccccccatcaaaacgaagacacgagtag

SEQ ID NO: 101325 - DNA, 1533 bp, Artificial Sequence
  derived and/or modified sequence
atgttcagctgggtgtctaaagatgctcgccgtaagaaggaacactataggtttcacgaattccatagcccagccctcgaggacgccgatttcgataataagcctatggtcctcttggtgggacagtattctactgggaagaccacctttatcaggcacctgatcgaacaggacttcccaggaatgaggatcggacctgaacctaccacagactcatttattgcagtgatgcacggcccaacggagggcgtggtgcctgggaatgccctcgtggttgacccgcggcggccttttaggaagctgaatgcttttggaaacgcattccttaaccgattcatgtgcgcacagctaccaaacccagtactcgatagtatctctataattgacacgcccggcatcctctccggtgaaaagcagcgcattagccgaggttatgattttgcagccgtgctggagtggttcgctgaaagggtggatcgaatcatactgctgttcgacgctcacaaactcgacatctccgacgagtttagcgaagtgattaaggctctcaagaatcacgaggataagatccgcgtcgtgctcaataaggctgaccagattgagacccaacagctgatgcgtgtgtatggcgcgctgatgtggtctctcggtaagattatcaatacgcccgaagtggttagagtatatatcggctccttttggtcacaccctctgctcatcccggacaaccgcaagctttttgaggcagaagaacaggacctgtttaaggatattcagtcgctcccaaggaacgcggctctgagaaaattaaatgaccttatcaaacgagcacgtctggccaaagtacacgcatatatcatctcttcattgaagaaggaaatgccgaatgtgttcgggaaggaatccaaaaaaaaagagctggtcaacaatttaggggagatctatcagaaaatcgagagggaacaccagataagccctggggattttccaagcttgcgcaaaatgcaggaactgttgcagacacaggacttctcgaagttccaggccctcaagccaaagctcctggacacagtggacgacatgttggcaaatgatattgctcggctcatggtgatggtgcgacaggaggagtccctcatgccttctcaggtagtgaagggcggcgcattcgacggtacaatgaacgggccattcgggcacggatacggggagggcgcgggcgagggaatcgatgacgtcgaatgggtcgtggggaaagataaacccacgtacgacgaaattttttacaccctatcccccgtcaacgggaagattacaggcgcaaacgctaaaaaggaaatggtcaaatccaagcttcccaatacggtgctgggtaaaatctggaaactagcagatgtcgataaggacggcctactggatgatgaggaattcgctttggccaaccaccttattaaggtgaagctggagggtcatgaacttccagccgacttacctccacacctagtgcctccttctaagcgacgacatgaatag

SEQ ID NO: 101326 - DNA, 1605 bp, Artificial Sequence
  derived and/or modified sequence
atgttctcctgggtgtccaaggatgcccggaggaagaaggagcctgagctgttccagacagtggccgagggcctgcggcagctgtatgcccagaagctgctgcccctggaggagcactaccgcttccacgagttccacagccctgccctggaggatgctgactttgacaacaagcccatggtgctgctggtgggccagtacagcacaggcaagaccaccttcatccgccacctgattgagcaggacttccctggcatgagaattggccctgagcccaccacagacagcttcatcgctgtgatgcacggccccacagaaggagtggtgcctggaaatgccctggtggtggacccccggcggcccttcaggaagctgaatgcctttggaaatgccttcctgaaccgcttcatgtgtgcccagctgcccaaccctgtgctggacagcatcagcatcatcgacaccccaggcatcctgtctggagagaagcagaggatcagccggggctatgactttgctgctgtgctggagtggtttgctgagcgggtggaccgcatcatcctgctgtttgatgcccacaagctggacatcagtgatgagttcagcgaggtgatcaaggccctgaagaaccacgaggacaagatccgggtggtgctgaacaaggctgaccagatcgagacccagcagctgatgagggtgtatggagccctgatgtggagcctgggcaagatcatcaacaccccagaggtggtgcgggtgtacatcggcagcttctggagccaccccctgctgatcccagacaacaggaagctgtttgaagctgaggagcaggacctcttcaaggacatccagagcctgcccagaaatgctgccctgaggaagctgaatgacctgatcaagagggcccggctggccaaggtgcacgcctacatcatcagcagcctgaagaaggagatgcccaacgtgtttgggaaggagagcaagaagaaggagctggtgaacaacctgggggagatctaccagaagattgaaagagagcaccagatcagccctggggacttccccagcctgaggaagatgcaggagctgctgcagacccaggacttcagcaagttccaggccctgaagcccaagctgctggacacagtggatgacatgctggccaatgacatcgcccggctgatggtgatggtgcggcaggaggagagcctgatgcccagccaggtggtgaagggcggggcctttgatggcaccatgaatggccccttcggccacggctacggggagggcgctggggagggcattgatgatgtggagtgggtggtgggcaaggacaagcccacctatgatgagatcttctacaccctgagccctgtgaatggcaagatcactggagccaatgccaagaaggagatggtgaagagcaagctgcccaacacagtgctgggcaagatctggaagctggctgatgtggacaaggatggcctgctggatgatgaggagtttgccctggccaaccacctgatcaaggtgaagctggagggccacgagctgcctgctgacctgcccccccacctggtgccccccagcaagagaagacatgaatag

SEQ ID NO: 101327 - DNA, 1296 bp, Artificial Sequence
  derived and/or modified sequence
atggagcagcccggcacagctgccagccctgtgtctggctccatgttctcctgggtgtccaaggatgcccggaggaagaaggagcctgagctgttccagacagtggccgagggcctgcggcagctgtatgcccagaagctgctgcccctggaggagcactaccgcttccacgagttccacagccctgccctggaggatgctgactttgacaacaagcccatggtgctgctggtgggccagtacagcacaggcaagaccaccttcatccgccacctgattgagcaggacttccctggcatgagaattggccctgagcccaccacagacagcttcatcgctgtgatgcacggccccacagaaggagtggtgcctggaaatgccctggtggtggacccccggcggcccttcaggaagctgaatgcctttggaaatgccttcctgaaccgcttcatgtgtgcccagctgcccaaccctgtgctggacagcatcagcatcatcgacaccccaggcatcctgtctggagagaagcagaggatcagccggggctatgactttgctgctgtgctggagtggtttgctgagcgggtggaccgcatcatcctgctgtttgatgcccacaagctggacatcagtgatgagttcagcgaggtgatcaaggccctgaagaaccacgaggacaagatccgggtggtgctgaacaaggctgaccagatcgagacccagcagctgatgagggtgtatggagccctgatgtggagcctgggcaagatcatcaacaccccagaggtggtgcgggtgtacatcggcagcttctggagccaccccctgctgatcccagacaacaggaagctgtttgaagctgaggagcaggacctcttcaaggacatccagagcctgcccagaaatgctgccctgaggaagctgaatgacctgatcaagagggcccggctggccaaggtgcacgcctacatcatcagcagcctgaagaaggagatgcccaacgtgtttgggaaggagagcaagaagaaggagctggtgaacaacctgggggagatctaccagaagattgaaagagagcaccagatcagccctggggacttccccagcctgaggaagatgcaggagctgctgcagacccaggacttcagcaagttccaggccctgaagcccaagctgctggatgatgaggagtttgccctggccaaccacctgatcaaggtgaagctggagggccacgagctgcctgctgacctgcccccccacctggtgccccccagcaagagaagacatgaatag

SEQ ID NO: 101328 - DNA, 1533 bp, Artificial Sequence
  derived and/or modified sequence
atgttctcctgggtgtccaaggatgcccggaggaagaaggagcactaccgcttccacgagttccacagccctgccctggaggatgctgactttgacaacaagcccatggtgctgctggtgggccagtacagcacaggcaagaccaccttcatccgccacctgattgagcaggacttccctggcatgagaattggccctgagcccaccacagacagcttcatcgctgtgatgcacggccccacagaaggagtggtgcctggaaatgccctggtggtggacccccggcggcccttcaggaagctgaatgcctttggaaatgccttcctgaaccgcttcatgtgtgcccagctgcccaaccctgtgctggacagcatcagcatcatcgacaccccaggcatcctgtctggagagaagcagaggatcagccggggctatgactttgctgctgtgctggagtggtttgctgagcgggtggaccgcatcatcctgctgtttgatgcccacaagctggacatcagtgatgagttcagcgaggtgatcaaggccctgaagaaccacgaggacaagatccgggtggtgctgaacaaggctgaccagatcgagacccagcagctgatgagggtgtatggagccctgatgtggagcctgggcaagatcatcaacaccccagaggtggtgcgggtgtacatcggcagcttctggagccaccccctgctgatcccagacaacaggaagctgtttgaagctgaggagcaggacctcttcaaggacatccagagcctgcccagaaatgctgccctgaggaagctgaatgacctgatcaagagggcccggctggccaaggtgcacgcctacatcatcagcagcctgaagaaggagatgcccaacgtgtttgggaaggagagcaagaagaaggagctggtgaacaacctgggggagatctaccagaagattgaaagagagcaccagatcagccctggggacttccccagcctgaggaagatgcaggagctgctgcagacccaggacttcagcaagttccaggccctgaagcccaagctgctggacacagtggatgacatgctggccaatgacatcgcccggctgatggtgatggtgcggcaggaggagagcctgatgcccagccaggtggtgaagggcggggcctttgatggcaccatgaatggccccttcggccacggctacggggagggcgctggggagggcattgatgatgtggagtgggtggtgggcaaggacaagcccacctatgatgagatcttctacaccctgagccctgtgaatggcaagatcactggagccaatgccaagaaggagatggtgaagagcaagctgcccaacacagtgctgggcaagatctggaagctggctgatgtggacaaggatggcctgctggatgatgaggagtttgccctggccaaccacctgatcaaggtgaagctggagggccacgagctgcctgctgacctgcccccccacctggtgccccccagcaagagaagacatgaatag

SEQ ID NO: 101329 - DNA, 1605 bp, Artificial Sequence
  derived and/or modified sequence
atgttcagctgggtgagcaaggacgcccggcggaagaaggagcccgaactcttccagactgtggccgaaggattgaggcaactatatgcccagaagctcctgcccctggaggaacattaccgtttccatgaattccacagtcctgccctggaagatgccgattttgacaacaaacccatggtactgttagtcgggcagtactcgacaggaaaaaccacctttatcaggcacctcattgagcaggactttcccggcatgagaattggaccagaacccacaaccgatagttttatcgccgttatgcacggtccaaccgagggcgtggttcctggcaatgcgttagtcgtagacccccgccggcccttcagaaagctcaacgcattcggaaatgcttttttgaaccgatttatgtgcgcccagcttcctaatcccgttctggatagcatcagtataattgatactcccggaattctcagtggagaaaagcagcggatttcccggggttatgattttgcagccgtcctcgagtggttcgctgagagagtagaccgcattattcttctgtttgacgcccacaaactggacattagcgacgaatttagcgaggtgatcaaggcgcttaaaaaccacgaggacaagatccgggtggtcctcaataaagctgaccaaatcgagacgcagcaactcatgagagtgtatggggcactcatgtggtctctcggtaagattatcaacactccagaggtagtgagggtctacataggttctttttggtctcatcctttgcttatccctgataaccgaaaactcttcgaggcggaagagcaagatttgttcaaggacatccagtccctgccgaggaacgcagccttacggaagctcaatgacctgataaagcgcgcccgactggcaaaggtccacgcatacataattagctctctgaagaaagaaatgccaaacgtctttgggaaggagagcaaaaaaaaagagctcgtgaataaccttggcgaaatttatcagaaaatcgaacgggaacatcagatctccccgggggatttcccgtctctccggaagatgcaggagctgctgcagacccaggacttctccaagtttcaagccctaaagccaaagttactcgacactgtggacgatatgctcgccaacgacattgctagattaatggttatggtcagacaagaggagagtctgatgcctagccaagtggtgaaggggggcgcatttgatgggacaatgaacgggccattcggacatgggtacggggagggagctggcgagggaatcgacgacgtggagtgggtggtgggcaaggataagcctacatatgatgagatcttttatactttgtctcccgtgaacgggaaaatcaccggagccaacgccaaaaaagaaatggttaagagcaagcttccaaataccgtgctgggcaaaatttggaaattagctgatgtggataaagacggcctcctagacgatgaggagttcgcgctggctaatcatctgattaaagtgaagctcgaaggacatgagttgcctgcagacctgcccccgcacctggttcccccgtcgaagcgtagacatgaatag

SEQ ID NO: 101330 - DNA, 1605 bp, Artificial Sequence
  derived and/or modified sequence
atgttcagctgggtgagcaaggacgcccggcggaagaaggagcccgaactgtttcagacagtggccgaagggctgagacaattgtatgctcagaaattgctgccgctcgaagagcactataggtttcacgaattccattcacctgccctcgaggacgcagatttcgacaataaaccaatggttctcctagtgggccagtattccacaggcaaaacaaccttcataaggcatctgattgagcaggatttccctggcatgcgcattggccccgagcccaccaccgatagtttcattgctgtcatgcatggccccactgagggcgtggtccctggaaatgcactggtcgtggacccacgcaggccattcagaaaattgaatgcctttggaaacgctttcctgaaccggtttatgtgcgcacagctccccaatcccgtcttggactctatcagcatcatcgacacacccggtattttgagtggggagaagcagcgcatttccagaggatatgattttgccgcagtcctggaatggttcgccgagagagttgatcgaataatcctcctgtttgacgcccacaaattggacatttccgatgaattttccgaggtgattaaagcactgaagaatcacgaggacaagatccgcgtagttctgaacaaggctgaccagatagagacccaacagctgatgagggtgtacggggccctgatgtggtctctgggcaaaatcattaacaccccggaggtggtacgcgtttacatagggtcattctggtctcacccactattgatccccgacaaccggaagctgtttgaagcagaggagcaggatttgtttaaagacatccagagtctccccagaaacgccgctctcaggaaactcaatgacctgattaaaagggctaggctggcgaaggttcacgcctacatcatttcttccttaaagaaagaaatgcctaacgtcttcggtaaggagagcaagaagaaagagctagtcaataatctcggtgaaatttatcaaaaaatcgagagggagcatcagatctccccgggcgatttccctagcctgcgtaaaatgcaggagctcctccagacccaggacttcagcaaatttcaggctcttaaacccaaactgcttgacaccgtggatgatatgttggccaatgacattgcccgcctcatggtgatggtcaggcaggaggagtccctcatgccatctcaggtcgtgaaaggcggcgcattcgatgggactatgaatggccctttcggtcacggctatggagaaggcgccggcgaaggaatcgatgatgtcgaatgggtggttggtaaagacaagccaacctatgatgaaatcttctacacactcagccccgtgaatggcaagattacaggggcaaatgctaagaaagagatggtgaagtcaaaacttccaaataccgtactgggcaagatctggaaactggcagacgtagataaagacgggttgctcgacgacgaggagttcgccctcgcgaaccacttaattaaggtcaagctcgagggccatgaactgccggccgaccttccccctcacctggtgccccccagcaagcgccgacacgagtag

SEQ ID NO: 101331 - DNA, 1296 bp, Artificial Sequence
  derived and/or modified sequence
atggagcagcccggcaccgccgccagccccgtgagcggcagcatgttttcttgggtctctaaagatgccaggcgcaagaaagagccagagctgttccagaccgtagcagaggggctgaggcagttatacgcacagaagttgttgcctctggaggaacattatagattccatgagttccactcgcccgctctcgaagatgccgattttgataataagcctatggttctgctggtcggccagtattccacaggaaaaacaacttttattcggcacctgatagagcaggattttcctggcatgcgtatcggtcccgagcccaccacggactctttcatcgcagtcatgcatggccctacggagggagtggtcccaggaaacgcactcgtggtggatccaaggaggcccttccgaaagctgaacgctttcggcaatgcgtttctgaataggtttatgtgcgctcagctacctaaccctgtgttggattccattagcatcattgacacccccggaattctgtctggggagaaacagcgcattagccgagggtatgacttcgccgcagtgctggagtggttcgccgagcgagtcgatcgcataatcctgctgtttgatgctcataaactggatatttccgacgagttttcggaggtaattaaagccctaaagaaccatgaggataagatccgcgttgtattgaataaggccgaccagattgagacccaacaactaatgagagtgtacggcgctttaatgtggagcctgggcaagatcataaataccccagaggtcgttcgggtttacattgggtctttttggtcacatcctctcttgattccagacaataggaagctgttcgaggctgaggagcaagatcttttcaaagacatccagagcctaccacggaacgccgctctgcggaagctgaacgacctgatcaaacgggcacgcttggcaaaggtgcacgcttatatcatttcatctctcaagaaagagatgccaaatgtgtttggaaaagagtccaaaaagaaagagttggtgaacaatttaggagagatttaccagaagattgaacgagaacatcagatttcaccaggcgatttccccagtctgcgcaagatgcaggagctcctgcaaacccaggatttctcaaagttccaggccctgaagcccaaactgctggacgatgaggaatttgcgcttgccaaccatttaattaaggtgaagctagaagggcacgaactgcccgctgatctgcccccgcacctggtcccaccctctaaaaggcgccacgaatag

SEQ ID NO: 101332 - DNA, 1533 bp, Artificial Sequence
  derived and/or modified sequence
atgttcagctgggtgagcaaggacgcccggcggaagaaggagcactaccgcttccatgagtttcactctccagctctcgaagacgccgatttcgacaacaaacccatggtgctcttggttggccaatacagtactggtaagaccacctttattaggcatttgatcgagcaggacttccccggtatgcgaattggccccgagcccaccactgacagctttatcgcggtgatgcatggtcccaccgagggcgtagttcctgggaatgccctggtcgtggacccccgccgaccctttaggaagctcaacgccttcggcaacgcctttctcaacaggttcatgtgcgcccagcttccaaaccccgtgttggattctatctctatcatcgatacaccaggcatcctgtcaggcgaaaaacagcgtatatcgcgagggtacgatttcgctgcagtgctggagtggtttgccgaaagagtggaccgcattatactcctcttcgatgctcataagttagatataagtgacgaattttctgaagttatcaaggctctcaaaaatcacgaggataagattcgggttgtgctaaacaaagcggatcagattgagactcaacagcttatgcgtgtctacggcgccctgatgtggagtcttggaaagatcattaatacccccgaggtggtccgcgtctacattggcagcttttggtcccacccgctgttgattcctgataatagaaagttgttcgaggcagaagaacaggacctcttcaaggacatccagagtctccctcgtaatgccgccctgaggaaactgaacgacctgattaaacgtgccagactcgcgaaagttcacgcatacattatctcctcacttaagaaggaaatgcctaacgtctttggaaaagaatccaagaagaaggagttggtgaataatctcggtgagatctatcagaaaatcgagcgcgaacaccagatttctcctggggatttcccttctctcagaaagatgcaggaactgttgcagacccaggatttctccaagtttcaggctctcaaacccaaactgctcgacaccgtggacgacatgctggcaaatgacattgcacgactgatggtgatggttaggcaggaggagtccctgatgccctcgcaagtagtgaagggcggagctttcgacggcaccatgaatgggccctttggccacggttatggagagggcgcaggagagggaatagacgatgttgaatgggtcgtgggcaaggacaagccaacctatgacgaaattttctacaccctgtcccctgtgaacggtaagattaccggggcaaacgcgaagaaagagatggtgaagtctaaactccctaacacagtcctcgggaagatttggaagcttgcggacgttgacaaagacggactgctggacgacgaagagtttgctcttgctaatcacttgataaaagtcaaactggaaggccatgaactgccagctgatctgccaccacatctggtgcccccctctaagaggcgccacgagtag

SEQ ID NO: 101333 - DNA, 1605 bp, Artificial Sequence
  derived and/or modified sequence
atgttctcgtgggtgagcaaggacgccaggagaaagaaagaacccgaactctttcagaccgtcgctgagggattgagacagctgtatgcacagaaactgctgcctctggaagaacattataggtttcatgaattccacagtccagccctcgaggacgcggacttcgacaataaacccatggtgttgttggtgggacagtattccactggaaagaccacctttattcggcatttgatcgagcaggatttccctggaatgagaattggtccagaaccaacaacggatagcttcatagccgtgatgcatggccctaccgaaggcgtagtgcctggtaatgccctcgtggtagatcctaggcgcccttttagaaaattaaatgcattcggcaatgcatttctgaatcgctttatgtgcgcccagctgccaaatcctgttcttgattccatctcaatcattgacaccccaggaattctcagtggcgagaaacaaaggattagccggggatacgactttgcggctgtactggagtggtttgccgaacgagtggaccgaataattttgctgttcgatgctcataaattggacatctccgatgaatttagtgaagtcattaaagccctgaagaaccacgaagataagattcgagtggtgttaaacaaggctgaccaaatcgagacccagcagttgatgagggtgtacggcgctcttatgtggagtctgggcaagataataaacacccccgaagtggtgagagtttatatcggaagcttttggagccaccctttgcttatccctgataacagaaagctctttgaggccgaggagcaggacctctttaaggatatccagagtttgcctcgcaacgccgcactccgcaaactcaatgatctgattaagcgggcaaggctcgccaaggtgcatgcttatatcatttccagtttaaagaaggagatgcctaacgtcttcggaaaagaatctaaaaagaaagaattagtaaacaatctgggcgagatctaccagaaaatcgagcgcgagcaccagataagtccaggagactttccaagcctgaggaaaatgcaggagctgttacagacacaggacttttccaagtttcaagcactcaaaccaaaactgttagacacggtggacgacatgttggctaacgacatcgcaagactaatggtgatggttagacaggaggaatcactgatgccctcccaggtggtgaaaggcggtgccttcgacggaaccatgaacggaccattcggccacggctatggggagggtgctggcgaaggaatcgacgacgttgaatgggtcgtcggaaaggataaacccacttacgacgagatcttttacaccctttccccagtaaatggcaagataactggggctaacgcaaaaaaagagatggtgaaatccaagctgcctaacaccgttctgggcaaaatctggaaactcgccgacgtcgacaaggatggtcttctggatgacgaggaatttgcgctagcaaatcacctaataaaagtgaagctggagggccacgagctacccgcagatctgccaccccacttagtgcccccaagtaaacggcgtcacgagtag

SEQ ID NO: 101334 - DNA, 1605 bp, Artificial Sequence
  derived and/or modified sequence
atgttttcctgggtatcaaaagatgccaggaggaaaaaagagccagaattgtttcagactgtagccgagggccttagacaattgtatgcccagaaactgttacccctggaggaacattatagattccacgaatttcactctcccgcactggaggatgcagattttgataataagccaatggtccttttggtgggccagtactctacagggaagaccacattcattcggcacctaatcgaacaggactttccgggtatgagaataggacccgagcccaccacggacagcttcatcgccgttatgcatggaccaaccgagggagttgtgcccggtaatgctctcgtggtcgatccccgtcgacccttcagaaagctcaacgccttcgggaacgccttcctaaaccggttcatgtgcgcacaactccccaacccagtgctggacagtataagcatcattgataccccgggtatcctctctggtgaaaagcagcggatcagtcgaggctacgacttcgcagccgttttagaatggttcgccgagcgggtcgacaggattattttattgtttgacgcccataagctcgacatatccgacgagttctccgaagtgattaaggctctgaagaatcacgaggacaagatcagggttgttctcaataaagcggaccagatcgagacccagcagttaatgcgggtgtacggtgccctgatgtggtcgcttggtaagattattaacacacctgaggtggtgagggtgtacattggaagcttctggagccaccccctgctgatccctgacaatcgaaagttgttcgaggccgaggagcaggaccttttcaaggatatccaatctcttcccaggaacgccgcactgaggaaattgaatgatttgatcaagagggccaggctcgctaaagtccacgcttacattatctctagcctgaagaaggaaatgcctaacgttttcggcaaggagtcaaagaaaaaggagctggtcaataatttaggcgagatctaccaaaagatcgaacgggagcaccaaattagccctggagattttccaagcctgcgtaaaatgcaggagttgcttcagacccaagatttctctaaattccaagccctgaagcccaagttgctggacaccgtagacgatatgctggccaacgacatcgctcgcctgatggtgatggtgcggcaggaagaaagcttgatgccaagccaagtcgttaaggggggagcttttgatggaactatgaacggcccattcgggcatgggtacggtgagggagcgggtgagggtattgatgacgtcgagtgggtggtggggaaagacaaaccgacttacgacgagatattttataccctcagccctgtaaatggaaagataacaggggcaaatgctaaaaaggaaatggtgaagtccaagctgcccaataccgtcctaggaaaaatatggaaactggccgacgtagacaaagatggacttctggacgatgaagagttcgctctcgctaatcacctgattaaagtgaaattggaagggcacgaattgcctgctgatctgccccctcacttggtgcctcctagcaagcgccgacatgagtag

SEQ ID NO: 101335 - DNA, 1296 bp, Artificial Sequence
  derived and/or modified sequence
atggagcagccagggaccgcagcatctcccgtgtctggtagtatgttctcctgggtgtctaaggatgccaggcgcaagaaggaaccggagctttttcaaacggtggcagaaggactgcgccagctctacgctcagaagttgctgcccctggaagaacactataggtttcacgagtttcactcgcccgctctggaggatgccgactttgacaacaaaccaatggttctcctggtagggcaatattctacggggaagaccacattcatccgacacctgatcgagcaggacttccctggcatgcggattggcccagagcctacgaccgacagtttcatagccgtcatgcatggcccaaccgaaggagtggttcccggtaacgccctcgtcgttgacccacggagaccgttccgcaagctgaatgcttttgggaatgccttcctaaatcgcttcatgtgcgcccagctgcccaacccggtgctggactccatctctattatcgatacccccggtatcctgagcggggaaaagcaacggatctctagaggctatgacttcgctgccgttctagagtggttcgccgaaagagtggaccgtataatcctgttatttgacgcccataagctcgacattagtgatgaattttcggaggtgatcaaggccttgaaaaaccatgaggataagataagggttgtgttgaataaggcagatcaaatagagacgcagcagcttatgagagtgtatggagccttgatgtggtccctggggaaaataatcaataccccagaggtggtaagggtgtatatcggcagcttttggtcccatcctttactaatccccgacaaccgcaaactgtttgaggctgaagaacaggatttattcaaggacatccagagcttgccaagaaatgccgcactgcggaagctcaacgacctcatcaagcgggctagactcgcaaaggtgcatgcctatatcattagttccttgaagaaggaaatgcctaacgtgttcgggaaggaatcaaagaagaaagaattggtgaataatctcggagaaatttatcagaaaatcgagcgggaacaccaaatctcccctggtgatttcccctccctcaggaaaatgcaggaacttctccagactcaggatttttccaagtttcaggccctaaagcctaagctactggatgatgaagagttcgctctcgctaaccatctgatcaaggtcaaattggaaggacacgaactgccagctgatctaccccctcacttagtgcctcctagcaaaaggcgccatgaatag

SEQ ID NO: 101336 - DNA, 1533 bp, Artificial Sequence
  derived and/or modified sequence
atgttttcctgggttagtaaagatgctcgtcggaagaaagagcactacagattccacgaatttcactccccagcgctggaggacgccgacttcgacaataaacccatggtattgttggtgggacagtatagtacaggtaaaaccactttcatccggcatttaatcgagcaggactttccgggaatgcgaatcggtccagagcccacgactgactcctttatagcagtgatgcatggccctacggaaggggtcgtacccggaaatgccctcgtcgtagatccacgcaggcctttccggaagcttaacgccttcggtaacgctttcctgaaccgtttcatgtgcgcccaattacctaaccccgtgctggacagcatctctataatcgacacacccggaatactgtcaggggagaagcaacgtatcagcagaggatatgacttcgccgcagtcctggaatggttcgcagagcgcgtggatcgaatcatattgctatttgacgcgcataaattagacatctctgacgaattttctgaggtcatcaaagccctgaaaaaccatgaggacaaaattagggtggtgctgaataaggctgaccagattgagacccagcagctgatgagggtgtatggcgctcttatgtggtcgctgggaaaaatcattaatacaccggaggtcgttcgcgtgtatattgggtcattctggtcacatcccctgctgatccctgataatcggaaactcttcgaggcagaagaacaggatttattcaaagacatccagagcctgccaagaaatgccgctttacgtaagctcaacgacttgatcaaacgcgctagattggcaaaggtccatgcgtatattatatccagcctgaagaaagaaatgcccaacgtgtttggcaaagagtctaagaagaaagaactggtgaataatctgggggaaatttatcagaagatagaacgagaacaccagatttcacccggtgacttcccctccctgagaaaaatgcaggaactgttgcaaacccaggacttcagcaaattccaggctctgaagcctaaactgttggatacggtcgatgacatgctcgcaaatgacattgcccgtctcatggttatggttcgccaggaggagagcctcatgccgtctcaagtggttaaaggcggagccttcgatggcactatgaacggcccattcgggcacggctacggcgagggtgctggcgaaggaatcgatgacgtagagtgggtggtggggaaggataaacctacctacgatgagattttttatacattgtctccagtgaatggtaagattaccggtgctaatgccaagaaggagatggtgaaatcgaaactgcccaatactgttctgggcaagatctggaagctggccgatgtagacaaagatgggcttctggatgacgaagagtttgccctagccaaccacttaataaaggtcaagctggagggccatgagctgccagccgacctccccccacatttagtgccaccttccaagcgaagacacgagtag

SEQ ID NO: 101337 - DNA, 1605 bp, Artificial Sequence
  derived and/or modified sequence
atgttcagctgggtgagcaaggacgccagaagaaagaaggagcccgagctgttccagaccgtggccgagggcctgagacagctgtacgcccagaagctgctgcccctggaggagcactacagattccacgagttccacagccccgccctggaggacgccgacttcgacaacaagcccatggtgctgctggtgggccagtacagcaccggcaagaccaccttcatcagacacctgatcgagcaggacttccccggcatgagaatcggccccgagcccaccaccgacagcttcatcgccgtgatgcacggccccaccgagggcgtggtgcccggcaacgccctggtggtggaccccagaagacccttcagaaagctgaacgccttcggcaacgccttcctgaacagattcatgtgcgcccagctgcccaaccccgtgctggacagcatcagcatcatcgacacccccggcatcctgagcggcgagaagcagagaatcagcagaggctacgacttcgccgccgtgctggagtggttcgccgagagagtggacagaatcatcctgctgttcgacgcccacaagctggacatcagcgacgagttcagcgaggtgatcaaggccctgaagaaccacgaggacaagatcagagtggtgctgaacaaggccgaccagatcgagacccagcagctgatgagagtgtacggcgccctgatgtggagcctgggcaagatcatcaacacccccgaggtggtgagagtgtacatcggcagcttctggagccaccccctgctgatccccgacaacagaaagctgttcgaggccgaggagcaggacctgttcaaggacatccagagcctgcccagaaacgccgccctgagaaagctgaacgacctgatcaagagagccagactggccaaggtgcacgcctacatcatcagcagcctgaagaaggagatgcccaacgtgttcggcaaggagagcaagaagaaggagctggtgaacaacctgggcgagatctaccagaagatcgagagagagcaccagatcagccccggcgacttccccagcctgagaaagatgcaggagctgctgcagacccaggacttcagcaagttccaggccctgaagcccaagctgctggacaccgtggacgacatgctggccaacgacatcgccagactgatggtgatggtgagacaggaggagagcctgatgcccagccaggtggtgaagggcggcgccttcgacggcaccatgaacggccccttcggccacggctacggcgagggcgccggcgagggcatcgacgacgtggagtgggtggtgggcaaggacaagcccacctacgacgagatcttctacaccctgagccccgtgaacggcaagatcaccggcgccaacgccaagaaggagatggtgaagagcaagctgcccaacaccgtgctgggcaagatctggaagctggccgacgtggacaaggacggcctgctggacgacgaggagttcgccctggccaaccacctgatcaaggtgaagctggagggccacgagctgcccgccgacctgcccccccacctggtgccccccagcaagagaagacacgagtag

SEQ ID NO: 101338 - DNA, 1296 bp, Artificial Sequence
  derived and/or modified sequence
atggagcagcccggcaccgccgccagccccgtgagcggcagcatgttcagctgggtgagcaaggacgccagaagaaagaaggagcccgagctgttccagaccgtggccgagggcctgagacagctgtacgcccagaagctgctgcccctggaggagcactacagattccacgagttccacagccccgccctggaggacgccgacttcgacaacaagcccatggtgctgctggtgggccagtacagcaccggcaagaccaccttcatcagacacctgatcgagcaggacttccccggcatgagaatcggccccgagcccaccaccgacagcttcatcgccgtgatgcacggccccaccgagggcgtggtgcccggcaacgccctggtggtggaccccagaagacccttcagaaagctgaacgccttcggcaacgccttcctgaacagattcatgtgcgcccagctgcccaaccccgtgctggacagcatcagcatcatcgacacccccggcatcctgagcggcgagaagcagagaatcagcagaggctacgacttcgccgccgtgctggagtggttcgccgagagagtggacagaatcatcctgctgttcgacgcccacaagctggacatcagcgacgagttcagcgaggtgatcaaggccctgaagaaccacgaggacaagatcagagtggtgctgaacaaggccgaccagatcgagacccagcagctgatgagagtgtacggcgccctgatgtggagcctgggcaagatcatcaacacccccgaggtggtgagagtgtacatcggcagcttctggagccaccccctgctgatccccgacaacagaaagctgttcgaggccgaggagcaggacctgttcaaggacatccagagcctgcccagaaacgccgccctgagaaagctgaacgacctgatcaagagagccagactggccaaggtgcacgcctacatcatcagcagcctgaagaaggagatgcccaacgtgttcggcaaggagagcaagaagaaggagctggtgaacaacctgggcgagatctaccagaagatcgagagagagcaccagatcagccccggcgacttccccagcctgagaaagatgcaggagctgctgcagacccaggacttcagcaagttccaggccctgaagcccaagctgctggacgacgaggagttcgccctggccaaccacctgatcaaggtgaagctggagggccacgagctgcccgccgacctgcccccccacctggtgccccccagcaagagaagacacgagtag

SEQ ID NO: 101339 - DNA, 1533 bp, Artificial Sequence
  derived and/or modified sequence
atgttcagctgggtgagcaaggacgccagaagaaagaaggagcactacagattccacgagttccacagccccgccctggaggacgccgacttcgacaacaagcccatggtgctgctggtgggccagtacagcaccggcaagaccaccttcatcagacacctgatcgagcaggacttccccggcatgagaatcggccccgagcccaccaccgacagcttcatcgccgtgatgcacggccccaccgagggcgtggtgcccggcaacgccctggtggtggaccccagaagacccttcagaaagctgaacgccttcggcaacgccttcctgaacagattcatgtgcgcccagctgcccaaccccgtgctggacagcatcagcatcatcgacacccccggcatcctgagcggcgagaagcagagaatcagcagaggctacgacttcgccgccgtgctggagtggttcgccgagagagtggacagaatcatcctgctgttcgacgcccacaagctggacatcagcgacgagttcagcgaggtgatcaaggccctgaagaaccacgaggacaagatcagagtggtgctgaacaaggccgaccagatcgagacccagcagctgatgagagtgtacggcgccctgatgtggagcctgggcaagatcatcaacacccccgaggtggtgagagtgtacatcggcagcttctggagccaccccctgctgatccccgacaacagaaagctgttcgaggccgaggagcaggacctgttcaaggacatccagagcctgcccagaaacgccgccctgagaaagctgaacgacctgatcaagagagccagactggccaaggtgcacgcctacatcatcagcagcctgaagaaggagatgcccaacgtgttcggcaaggagagcaagaagaaggagctggtgaacaacctgggcgagatctaccagaagatcgagagagagcaccagatcagccccggcgacttccccagcctgagaaagatgcaggagctgctgcagacccaggacttcagcaagttccaggccctgaagcccaagctgctggacaccgtggacgacatgctggccaacgacatcgccagactgatggtgatggtgagacaggaggagagcctgatgcccagccaggtggtgaagggcggcgccttcgacggcaccatgaacggccccttcggccacggctacggcgagggcgccggcgagggcatcgacgacgtggagtgggtggtgggcaaggacaagcccacctacgacgagatcttctacaccctgagccccgtgaacggcaagatcaccggcgccaacgccaagaaggagatggtgaagagcaagctgcccaacaccgtgctgggcaagatctggaagctggccgacgtggacaaggacggcctgctggacgacgaggagttcgccctggccaaccacctgatcaaggtgaagctggagggccacgagctgcccgccgacctgcccccccacctggtgccccccagcaagagaagacacgagtag

SEQ ID NO: 101340 - DNA, 4551 bp, Artificial Sequence
  derived and/or modified sequence
ccctaccgcccccaattccgccctgcccccgccgcggcggcgctagccgccactgagggaccgaccctataaaggccgctccgcgaggggtgcgcagcattcggcagagggcgcttcgacgggctgggctgtgcgcctgcgcagtgtgggtcgctcccgattccctgccccggccggccccgcctcggctccgcaccctcgccccgctctcagccgccgctctgccccgcagcagccagccccgtgtccggcagtatgttcagctgggtcagcaaggatgcccgccgcaagaaggagccggagctcttccagacggtggctgaggggctgcggcagctgtacgcgcagaagctgctacccctggaggagcactaccgcttccacgagttccactcgcccgcgctggaggacgctgacttcgacaacaagcctatggtgctcctcgtggggcagtacagcacgggcaagaccaccttcatccgacacctgatcgagcaggacttcccggggatgcgcatcgggcccgagcccaccaccgactccttcatcgccgtcatgcacggccccactgagggcgtggtgccgggcaacgcgctcgtggtggacccgcggcgccccttccgcaagctcaacgcgtttggcaacgctttcctcaacaggttcatgtgtgcccagctgcccaaccccgtcctggacagcatcagcatcatcgacacccccgggatcctgtctggagagaagcagcggatcagcagaggctatgactttgcagccgtcctggagtggttcgcggagcgtgtggaccgcatcatcctgctcttcgacgcccacaagctggacatctccgatgagttctcggaagtgatcaaggctctgaagaaccatgaggacaagatccgcgtggtgctgaacaaggcagaccagatcgagacgcagcagctgatgcgggtgtacggggccctcatgtggtccctgggcaagatcatcaacacccccgaggtggtcagggtctacatcggctccttctggtcccacccgctcctcatccccgacaaccgcaagctctttgaggccgaggagcaggacctcttcaaggacatccagtcactgccccgaaacgccgccctcaggaagctcaatgacctgatcaagcgggcacggctggccaaggttcacgcctacatcatcagctccctcaagaaagagatgcccaatgtctttggtaaagagagcaaaaagaaagagctggtgaacaacctcggagagatctaccagaagattgagcgcgagcaccagatctcccctggggacttcccgagcctccgcaagatgcaggaactcctgcagacccaggacttcagcaagttccaggcgctgaagcccaagctgctggacacggtggatgacatgctggccaacgacatcgcgcggctgatggtgatggtgcggcaggaggagtccctgatgccttcccaggtggtcaagggcggcgcctttgacggcaccatgaacgggccgttcgggcacggctacggcgagggggccggcgagggcatcgacgacgtggagtgggtggtgggcaaggacaagcccacctacgacgagatcttctacacgctgtcccctgtcaacggcaagatcacgggcgccaacgccaagaaggagatggtgaagtccaagctccccaacaccgtgctagggaagatctggaagctggccgacgtggacaaggacgggctgctggacgacgaggagttcgcgctggccaaccacctcatcaaggtcaagctggagggccacgagctgcctgccgacctgcccccgcacctggtgccgccctccaagcgcagacatgagtgatggcgcccggccccgcacctgccatttgcacgcccggccgggaggcagagacggggggaggggaagcctcaccatttctcaaggtccataaagactgagcggatgtttcctcgcctctcgaaaaggaaaaccaccatctttcttttaaggctgttcctgggcctggcgggggaggcaggggtgagaggatggaattgtgtgcacaagaactgtggctattttaatatataacgttagaggctgcgttctttgtcgccgcctcccctgtgtgccagccctgtgtgcacggcctctgccccccggcctttgctgtggctggagctggacagtgcagcgactgcgaccgtgggggagccaggtcgcccttttggcagctgctaggctgaggctgcatggacaggaacaccaggcaccctccgtgtgcttctgagctgaggttgcttcacgggaccgtggcttccttcctcacctggctctgcctcccccgtgctctcgggcgaagtgggttcttgtgccttcccctcccgggcccaggctccccgtgcgcgggccctgccctttcctcccgcgccccaccggctccgacgcgcaaccccgctcagcagtcacagaagcagggcccagccaccttggtctttttttgggagttcaggggagtaggagaatgtcttccagaaaaatacataagctagtttctgttctgtaaagtgatatctttcatacttgaccaaagttcccaataacttcccaaccactgttcaaaagctgtgatttttgtctccccttcccaccctccagccaaggagcagccctgcccagggggcattaggtgtgggtacccggggagcaccccgttcctggaccccagtgttgcatttcctggctgaggaagggtggtcatcccagctcctgccctaccctctcacttaactggagctttgggacgcaccctccacagtgggaggtggtggtgggtggcggtggcggggcctcacgacagcttggtgctggtaagaggaagcccgtggttctggctaggctctcatgtccagacagcggggaccaggggaaaacccagccccttctgtaatcccccttcatttcctaccttccttcctcctctgtttagcaaaggagggcagctcacttggatgtccttacaacgcccctggcccccaggttgagcaataagaaaccagaaccttgcggcccagtggcccgggccagttcaggccgcctccccctcctctgcctggggccattgagcccagcctccagggcccgggcgcgtttgcaggccagtggccactgtccgggctgtgatggcaccaaggcaggtggagcaccaggtaccacacagctgggcttcccaccaggctttcccgcgggggtctcagggagcttctccccagcgctgctcggagtctgcaggaactggccttgttctccttagcccgtcactccatacagtattaggtgaggatggatgcgggcgctgtccttgccgggaagtcactgttgaagttgcagtggcttgttcacacctgtgggaagagaagtgaagactttctccttgcattaaaaagtctgaactgtgcgaaagcttcgggtgcttccttgtcttttccaggggcagcagtcctgggccatcctcccctggtgtctgagggggtgatgccagcagggacagagtggcaaggcagccggggcaaggtgaccaaccctgcccagtcctgctctgctgggcagtagctgccccctcctactaagagggccaggcctgtagggaaaagggtttctggggtgatgcccccttccctgagcaaggtgggagctgagcagttcacttggggtggggaggggggaaacagttgggaggatgttgatagctgaggcctaggctggcacccctcagccacagacggatgagtgggcacctgcaggccctcggcactgggtggcatcaagtaaacaagggtttctgggctttggagccagactggctccttgctagccccaaggacggtttaagtacagggaagccgggcctctgaagacaaagcagatagcctgtgacaaacatgcaactaagggtggggccagtcaggcccaggtgatgtcacagatgggggactgtttataccagcagagggaagggtgactgattagtgacccttcataaaagggtgcagacttgaggtgccatgggtagaggctgctccagcccctctggcagaaggcaggacagaaacaagttcctgagggtttcagggacccagttgtgtgctccgagcctagctggtgtggtggtgtctggtcctatgaccagcacttgaggtgccagtggatgcttcagttgctgcagggctggccggccctccctgcgtcactcagctgccacctgtgggcattcaccctgtgccaggtggagctgcgctgtcacgatctgaggaagttcatgttcccccatttcacagagggagagtccgagactgaggactgccgaaataacaaaggtggtagaagcagatgcaaaccaggccgtccaactccagcgtgctttccatcaggttactaatccaaagcacacactaagaggaaaaaacggtagatccccccaaccccacccttagactgcagctgtactcagggctgagagacccacattaaaggttaaatgctgtcactcca

SEQ ID NO: 101341 - DNA, 3618 bp, Artificial Sequence
  derived and/or modified sequence
aaaggggtctgtgtgtggccggggaggatggcgggggagtgagccccatggaacagccaggaactgataaaagatgaggggacaaagacagtgtgtgtctgggaagctgggctgagaggaggaggtgccgccgcctgggggtactccgatgcttccggggattccgagccagctggaggaccgcacgtggcgaacggcgggcgcggcgcgtagtcagggaaccagggtgcctgactgggtgtctcgtggagccatcccgcgggggtgtgggggggccacggtgccggaaggcgcgcggcccagaggccgtctccgccgaacgcccgctcctcgccttcctaaccgcagcactttcgcgagcctccctacgaggggcggggcgaaacagcagccagccccgtgtccggcagtatgttcagctgggtcagcaaggatgcccgccgcaagaaggagccggagctcttccagacggtggctgaggggctgcggcagctgtacgcgcagaagctgctacccctggaggagcactaccgcttccacgagttccactcgcccgcgctggaggacgctgacttcgacaacaagcctatggtgctcctcgtggggcagtacagcacgggcaagaccaccttcatccgacacctgatcgagcaggacttcccggggatgcgcatcgggcccgagcccaccaccgactccttcatcgccgtcatgcacggccccactgagggcgtggtgccgggcaacgcgctcgtggtggacccgcggcgccccttccgcaagctcaacgcgtttggcaacgctttcctcaacaggttcatgtgtgcccagctgcccaaccccgtcctggacagcatcagcatcatcgacacccccgggatcctgtctggagagaagcagcggatcagcagaggctatgactttgcagccgtcctggagtggttcgcggagcgtgtggaccgcatcatcctgctcttcgacgcccacaagctggacatctccgatgagttctcggaagtgatcaaggctctgaagaaccatgaggacaagatccgcgtggtgctgaacaaggcagaccagatcgagacgcagcagctgatgcgggtgtacggggccctcatgtggtccctgggcaagatcatcaacacccccgaggtggtcagggtctacatcggctccttctggtcccacccgctcctcatccccgacaaccgcaagctctttgaggccgaggagcaggacctcttcaaggacatccagtcactgccccgaaacgccgccctcaggaagctcaatgacctgatcaagcgggcacggctggccaaggttcacgcctacatcatcagctccctcaagaaagagatgcccaatgtctttggtaaagagagcaaaaagaaagagctggtgaacaacctcggagagatctaccagaagattgagcgcgagcaccagatctcccctggggacttcccgagcctccgcaagatgcaggaactcctgcagacccaggacttcagcaagttccaggcgctgaagcccaagctgctggacacggtggatgacatgctggccaacgacatcgcgcggctgatggtgatggtgcggcaggaggagtccctgatgccttcccaggtggtcaagggcggcgcctttgacggcaccatgaacgggccgttcgggcacggctacggcgagggggccggcgagggcatcgacgacgtggagtgggtggtgggcaaggacaagcccacctacgacgagatcttctacacgctgtcccctgtcaacggcaagatcacgggcgccaacgccaagaaggagatggtgaagtccaagctccccaacaccgtgctagggaagatctggaagctggccgacgtggacaaggacgggctgctggacgacgaggagttcgcgctggccaaccacctcatcaaggtcaagctggagggccacgagctgcctgccgacctgcccccgcacctggtgccgccctccaagcgcagacatgagtgatggcgcccggccccgcacctgccatttgcacgcccggccgggaggcagagacggggggaggggaagcctcaccatttctcaaggtccataaagactgagcggatgtttcctcgcctctcgaaaaggaaaaccaccatctttcttttaaggctgttcctgggcctggcgggggaggcaggggtgagaggatggaattgtgtgcacaagaactgtggctattttaatatataacgttagaggctgcgttctttgtcgccgcctcccctgtgtgccagccctgtgtgcacggcctctgccccccggcctttgctgtggctggagctggacagtgcagcgactgcgaccgtgggggagccaggtcgcccttttggcagctgctaggctgaggctgcatggacaggaacaccaggcaccctccgtgtgcttctgagctgaggttgcttcacgggaccgtggcttccttcctcacctggctctgcctcccccgtgctctcgggcgaagtgggttcttgtgccttcccctcccgggcccaggctccccgtgcgcgggccctgccctttcctcccgcgccccaccggctccgacgcgcaaccccgctcagcagtcacagaagcagggcccagccaccttggtctttttttgggagttcaggggagtaggagaatgtcttccagaaaaatacataagctagtttctgttctgtaaagtgatatctttcatacttgaccaaagttcccaataacttcccaaccactgttcaaaagctgtgatttttgtctccccttcccaccctccagccaaggagcagccctgcccagggggcattaggtgtgggtacccggggagcaccccgttcctggaccccagtgttgcatttcctggctgaggaagggtggtcatcccagctcctgccctaccctctcacttaactggagctttgggacgcaccctccacagtgggaggtggtggtgggtggcggtggcggggcctcacgacagcttggtgctggtaagaggaagcccgtggttctggctaggctctcatgtccagacagcggggaccaggggaaaacccagccccttctgtaatcccccttcatttcctaccttccttcctcctctgtttagcaaaggagggcagctcacttggatgtccttacaacgcccctggcccccaggttgagcaataagaaaccagaaccttgcggcccagtggcccgggccagttcaggccgcctccccctcctctgcctggggccattgagcccagcctccagggcccgggcgcgtttgcaggccagtggccactgtccgggctgtgatggcaccaaggcaggtggagcaccaggtaccacacagctgggcttcccaccaggctttcccgcgggggtctcagggagcttctccccagcgctgctcggagtctgcaggaactggccttgttctccttagcccgtcactccatacagtattaggtgaggatggatgcgggcgctgtccttgccgggaagtcactgttgaagttgcagtggcttgttcacacctgtgggaagagaagtgaagactttctccttgcattaaaaagtctgaactgtgcgaaa

SEQ ID NO: 101342 - DNA, 557 bp, Artificial Sequence
  derived and/or modified sequence
gattctcaccagcctggacagccaaaggggtctgtgtgtggccggggaggatggcgggggagtgagccccatggaacagccaggaactggtaaggggagcagccagccccgtgtccggcagtatgttcagctgggtcagcaaggatgcccgccgcaagaaggagccggagctcttccagacggtggctgaggggctgcggcagctgtacgcgcagaagctgctacccctggaggagcactaccgcttccacgagttccactcgcccgcgctggaggacgctgacttcgacaacaagcctatggtgctcctcgtggggcagtacagcacgggcaagaccaccttcatccgacacctgatcgagcaggacttcccggggatgcgcatcgggcccgagcccaccaccgactccttcatcgccgtcatgcacggccccactgagggcgtggtgccgggcaacgcgctcgtggtggacccgcggcgccccttccgcaagctcaacgcgtttggcaacgctttcctcaacaggttcatgtgtgcccagctgcccaaccccgtc

SEQ ID NO: 101343 - DNA, 1457 bp, Artificial Sequence
  derived and/or modified sequence
gtgtggccggggaggatggcgggggagtgagccccatggaacagccaggaactgcagccagccccgtgtccggcagtatgttcagctgggtcagcaaggatgcccgccgcaagaaggagccggagctcttccagacggtggctgaggggctgcggcagctgtacgcgcagaagctgctacccctggaggagcactaccgcttccacgagttccactcgcccgcgctggaggacgctgacttcgacaacaagcctatggtgctcctcgtggggcagtacagcacgggcaagaccaccttcatccgacacctgatcgagcaggacttcccggggatgcgcatcgggcccgagcccaccaccgactccttcatcgccgtcatgcacggccccactgagggcgtggtgccgggcaacgcgctcgtggtggacccgcggcgccccttccgcaagctcaacgcgtttggcaacgctttcctcaacaggttcatgtgtgcccagctgcccaaccccgtcctggacagcatcagcatcatcgacacccccgggatcctgtctggagagaagcagcggatcagcagaggctatgactttgcagccgtcctggagtggttcgcggagcgtgtggaccgcatcatcctgctcttcgacgcccacaagctggacatctccgatgagttctcggaagtgatcaaggctctgaagaaccatgaggacaagatccgcgtggtgctgaacaaggcagaccagatcgagacgcagcagctgatgcgggtgtacggggccctcatgtggtccctgggcaagatcatcaacacccccgaggtggtcagggtctacatcggctccttctggtcccacccgctcctcatccccgacaaccgcaagctctttgaggccgaggagcaggacctcttcaaggacatccagtcactgccccgaaacgccgccctcaggaagctcaatgacctgatcaagcgggcacggctggccaaggttcacgcctacatcatcagctccctcaagaaagagatgcccaatgtctttggtaaagagagcaaaaagaaagagctggtgaacaacctcggagagatctaccagaagattgagcgcgagcaccagatctcccctggggacttcccgagcctccgcaagatgcaggaactcctgcagacccaggacttcagcaagttccaggcgctgaagcccaagctgctggacgacgaggagttcgcgctggccaaccacctcatcaaggtcaagctggagggccacgagctgcctgccgacctgcccccgcacctggtgccgccctccaagcgcagacatgagtgatggcgcccggccccgcacctgccatttgcacgcccggccgggaggcagagacggggggaggggaagcctcaccatttctcaaggtccataaagactgagcggatgtttcctcgcctctcgaaaagg

SEQ ID NO: 101344 - DNA, 534 bp, Artificial Sequence
  derived and/or modified sequence
agattgaccgtacgccagcctcagagagagaaggcccaggcggggaggagtaaagcctccctgggagagccagccccgtgtccggcagtatgttcagctgggtcagcaaggatgcccgccgcaagaaggagccggagctcttccagacggtggctgaggggctgcggcagctgtacgcgcagaagctgctacccctggaggagcactaccgcttccacgagttccactcgcccgcgctggaggacgctgacttcgacaacaagcctatggtgctcctcgtggggcagtacagcacgggcaagaccaccttcatccgacacctgatcgagcaggacttcccggggatgcgcatcgggcccgagcccaccaccgactccttcatcgccgtcatgcacggccccactgagggcgtggtgccgggcaacgcgctcgtggtggacccgcggcgccccttccgcaagctcaacgcgtttggcaacgctttcctcaacaggttcatgtgtgcccagctgcccaaccccgtcctggacagca

SEQ ID NO: 101345 - DNA, 2023 bp, Artificial Sequence
  derived and/or modified sequence
attcggcagagggcgcttcgacgggctgggctgtgcgcctgcgcagtgtgggtcgctcccgattccctgccccggccggccccgcctcggctccgcaccctcgccccgctctcagccgccgctctgccccgcagcagccagccccgtgtccggcagtatgttcagctgggtcagcaaggatgcccgccgcaagaaggagcactaccgcttccacgagttccactcgcccgcgctggaggacgctgacttcgacaacaagcctatggtgctcctcgtggggcagtacagcacgggcaagaccaccttcatccgacacctgatcgagcaggacttcccggggatgcgcatcgggcccgagcccaccaccgactccttcatcgccgtcatgcacggccccactgagggcgtggtgccgggcaacgcgctcgtggtggacccgcggcgccccttccgcaagctcaacgcgtttggcaacgctttcctcaacaggttcatgtgtgcccagctgcccaaccccgtcctggacagcatcagcatcatcgacacccccgggatcctgtctggagagaagcagcggatcagcagaggctatgactttgcagccgtcctggagtggttcgcggagcgtgtggaccgcatcatcctgctcttcgacgcccacaagctggacatctccgatgagttctcggaagtgatcaaggctctgaagaaccatgaggacaagatccgcgtggtgctgaacaaggcagaccagatcgagacgcagcagctgatgcgggtgtacggggccctcatgtggtccctgggcaagatcatcaacacccccgaggtggtcagggtctacatcggctccttctggtcccacccgctcctcatccccgacaaccgcaagctctttgaggccgaggagcaggacctcttcaaggacatccagtcactgccccgaaacgccgccctcaggaagctcaatgacctgatcaagcgggcacggctggccaaggttcacgcctacatcatcagctccctcaagaaagagatgcccaatgtctttggtaaagagagcaaaaagaaagagctggtgaacaacctcggagagatctaccagaagattgagcgcgagcaccagatctcccctggggacttcccgagcctccgcaagatgcaggaactcctgcagacccaggacttcagcaagttccaggcgctgaagcccaagctgctggacacggtggatgacatgctggccaacgacatcgcgcggctgatggtgatggtgcggcaggaggagtccctgatgccttcccaggtggtcaagggcggcgcctttgacggcaccatgaacgggccgttcgggcacggctacggcgagggggccggcgagggcatcgacgacgtggagtgggtggtgggcaaggacaagcccacctacgacgagatcttctacacgctgtcccctgtcaacggcaagatcacgggcgccaacgccaagaaggagatggtgaagtccaagctccccaacaccgtgctagggaagatctggaagctggccgacgtggacaaggacgggctgctggacgacgaggagttcgcgctggccaaccacctcatcaaggtcaagctggagggccacgagctgcctgccgacctgcccccgcacctggtgccgccctccaagcgcagacatgagtgatggcgcccggccccgcacctgccatttgcacgcccggccgggaggcagagacggggggaggggaagcctcaccatttctcaaggtccataaagactgagcggatgtttcctcgcctctcgaaaaggaaaaccaccatctttcttttaaggctgttcctgggcctggcgggggaggcaggggtgagaggatggaattgtgtgcacaagaactgtggctattttaatatataacgttagaggctgcgttctttgtcgccgcctcccctgtgtgccagccctgtgtgcacggcctctgccccccggcctttgctgtggctggagctggacagtgca

SEQ ID NO: 101346 - protein, 206 aa, Artificial Sequence
  derived and/or modified sequence
MSWVQAASLIQGPGDKGDVFDEEADESLLAQREWQSNMQRRVKEGYRDGIDAGKAVTLQQGFNQGYKKGAEVILNYGRLRGTLRNSTDWSLLGLRAPLRSPEVGTQLLPRPLPVPGHMASGATPKQPTELEATLLSLVPQSGRATPRFPARLRAPGPGTPSHRRRFRRKPHRDPAAACPAWPPEAPSNSETHFSTYNRIIIRGGHI

SEQ ID NO: 101347 - DNA, 621 bp, Artificial Sequence
  derived and/or modified sequence
atgagctgggtgcaggccgccagcctgatccagggccccggcgacaagggcgacgtgttcgacgaggaggccgacgagagcctgctggcccagagagagtggcagagcaacatgcagagaagagtgaaggagggctacagagacggcatcgacgccggcaaggccgtgaccctgcagcagggcttcaaccagggctacaagaagggcgccgaggtgatcctgaactacggcagactgagaggcaccctgagaaacagcaccgactggagcctgctgggcctgagagcccccctgagaagccccgaggtgggcacccagctgctgcccagacccctgcccgtgcccggccacatggccagcggcgccacccccaagcagcccaccgagctggaggccaccctgctgagcctggtgccccagagcggcagagccacccccagattccccgccagactgagagcccccggccccggcacccccagccacagaagaagattcagaagaaagccccacagagaccccgccgccgcctgccccgcctggccccccgaggcccccagcaacagcgagacccacttcagcacctacaacagaatcatcatcagaggcggccacatctag

SEQ ID NO: 101348 - DNA, 621 bp, Artificial Sequence
  derived and/or modified sequence
atgagctgggtgcaggccgcgagcctgatccaggggcccggggataaaggggacgttttcgacgaggaggcagacgagagcctcctagcccagcgcgagtggcagtccaacatgcagcgccgggttaaggaggggtaccgggatggtatcgacgccggaaaagccgtgaccctgcagcaggggtttaaccaggggtataagaaaggggcagaggtgatccttaattacggaagacttcgtgggacactgcggaattccacggactggagtctcctcggactcagagcccctctcaggtcccctgaggtcgggacccagttattacccagaccactgccagtccctgggcacatggcaagcggagctaccccgaaacagccaaccgagctggaggctacactgctttcccttgtgccccagtcaggtcgagcaaccccaagattccccgcacggctgcgtgcaccagggccaggtaccccttcccataggcgcagattccgacgcaaaccacacagggaccccgcagcggcttgcccggcatggccaccagaggcacccagcaatagcgagacgcatttctccacgtacaaccggattattatccgtggaggccacatctag

SEQ ID NO: 101349 - DNA, 621 bp, Artificial Sequence
  derived and/or modified sequence
atgtcctgggtgcaggccgccagcctcatccagggccctggggacaagggagatgtgtttgatgaggaggctgatgagagcctgctggcccagcgggagtggcagagcaacatgcagaggagagtgaaggagggctacagagatggcattgatgctgggaaggctgtgaccctgcagcagggcttcaaccagggctacaagaagggagctgaggtgatcctgaactacggccgcctgcggggcaccctgaggaacagcacagactggagcctgctgggcctgcgggcccccctgcggagccctgaggtgggcacccagctgctgccccggcccctgcctgtgcccggccacatggccagcggggccacccccaagcagcccacagagctggaggccaccctgctgagcctggtgccccagagcggccgggccaccccccgcttccctgcccggctgcgggcccctggccctggcacccccagccacagaagacgcttccggaggaagccccaccgggaccctgctgctgcctgcccagcctggcccccagaggcccccagcaacagcgagacccacttcagcacctacaaccgcatcatcatccggggcggccacatctag

SEQ ID NO: 101350 - DNA, 621 bp, Artificial Sequence
  derived and/or modified sequence
atgagctgggtgcaggccgccagcctgatccagggccccggcgacaagggcgacgtgttcgacgaagaggccgatgaaagtctcctggcacagcgagagtggcagtccaatatgcagagaagagtcaaagaggggtaccgcgacggtatcgatgctggaaaggcggtcaccctgcagcaggggtttaaccagggatataaaaaaggggccgaggttatcctgaattacggaagactgagggggacccttcgcaacagcactgactggtccctgttgggattgagagctcctctccggtctccagaggtgggcactcagctgttacccaggccgctccccgtgcccggacacatggcctcaggggccacaccgaagcagcctaccgaactggaagccactttgctgtcactggtgccccaaagtggccgggcgaccccaaggttccccgctcggttgagggcacctggccccgggaccccgagccacagacgtagatttcggcgcaaaccccacagggaccccgctgctgcatgcccagcatggcctcctgaagccccttctaacagcgagactcacttttcgacttacaatcgcatcatcatccgcggaggacatatatag

SEQ ID NO: 101351 - DNA, 621 bp, Artificial Sequence
  derived and/or modified sequence
atgtcttgggtgcaagccgctagtctgatacagggccctggcgacaagggcgacgttttcgatgaggaggcggatgagtctctactggctcagagggagtggcaaagcaacatgcagcgcagagtcaaggaggggtatcgagacggcatcgatgcaggcaaagccgtgactctgcagcagggcttcaaccaaggctataaaaagggcgctgaagtgattttgaattatggacgcctccggggaacactcaggaatagcaccgactggtctctgctcggtcttcgcgctcctctgcggtctcctgaggtggggacccagttgttgccacgcccactaccggttcccggtcacatggcctccggagcaacacctaagcagcccactgagctggaagccacgcttctgtcgctggtcccacaaagtgggagggccacaccaagattccccgctcgcctgcgggctccgggtcccggtactccctcccatcgcagacgattcagaagaaagcctcatcgtgatccggctgccgcttgtccggcatggccgccagaggccccatctaattccgagactcatttctctacttacaataggatcatcattcgaggtggccacatctag

SEQ ID NO: 101352 - DNA, 968 bp, Artificial Sequence
  derived and/or modified sequence
aattgcctcggtgatgtcgtgggttcaagcagcctccttgatccagggccctggagacaaaggggacgtgtttgacgaagaagcagacgagtcgctcctggcgcagcgggaatggcagagtaacatgcaaagacgagtcaaagaaggttatagagatggaatagatgctggcaaagcagttactcttcaacagggcttcaatcaaggttataagaaaggtgcagaagtcattttaaactatggacgactccgaggaacattgaggaactcaacggattggagcctactgggcttgagagccccgctgaggagtccggaggttgggacgcaactactgccgcgtcccctcccggtccccggccacatggcgagcggggcgacaccgaagcagcccacggagctcgaggcgacgctgctgagcctggttccccaaagcggccgcgccactccccgcttccccgcccggctccgggccccaggccctgggacgccgagccaccgccggcgtttcagacgcaaaccccaccgcgaccctgcagcagcctgccccgcctggccgccagaggcaccttccaactccgaaacacatttttcaacatataatagaatcattatcagaggtggacacatttagaagttgttcttaatcagagggcagcttgtgcttaggaaagccagcctcagtcctcagcacccagcacccagtgctgcaggtttctcctgggtgaagatggaccagcccaccttggccctccggcaagctagaacaatatgtacacgtctctcaaactatgaagagaagatttgggaggagtatgagaaaatcctcaataccaaactagcagagcaatacgagtcgtttgtgaaattcacacatgagcagattatgcgaccatgtgggacaagcccaacaaactatgtgtcttgaagctttttgttgcagatctcggtaccaggtttgacctcaa

SEQ ID NO: 101353 - protein, 111 aa, Artificial Sequence
  derived and/or modified sequence
MGWRPRRARGTPLLLLLLLLLLWPVPGAGVLQGHIPGQPVTPHWVLDGQPWRTVSLEEPVSKPDMGLVALEAEGQELLLELEKNQLLAPGYIETHYGPAQECRDLCCFAHN

SEQ ID NO: 101354 - protein, 812 aa, Artificial Sequence
  derived and/or modified sequence
MGWRPRRARGTPLLLLLLLLLLWPVPGAGVLQGHIPGQPVTPHWVLDGQPWRTVSLEEPVSKPDMGLVALEAEGQELLLELEKNHRLLAPGYIETHYGPDGQPVVLAPNHTDHCHYQGRVRGFPDSWVVLCTCSGMSGLITLSRNASYYLRPWPPRGSKDFSTHEIFRMEQLLTWKGTCGHRDPGNKAGMTSLPGGPQSRGRREARRTRKYLELYIVADHTLFLTRHRNLNHTKQRLLEVANYVDQLLRTLDIQVALTGLEVWTERDRSRVTQDANATLWAFLQWRRGLWAQRPHDSAQLLTGRAFQGATVGLAPVEGMCRAESSGGVSTDHSELPIGAAATMAHEIGHSLGLSHDPDGCCVEAAAESGGCVMAAATGHPFPRVFSACSRRQLRAFFRKGGGACLSNAPDPGLPVPPALCGNGFVEAGEECDCGPGQECRDLCCFAHNCSLRPGAQCAHGDCCVRCLLKPAGALCRQAMGDCDLPEFCTGTSSHCPPDVYLLDGSPCARGSGYCWDGACPTLEQQCQQLWGPGSHPAPEACFQVVNSAGDAHGNCGQDSEGHFLPCAGRDALCGKLQCQGGKPSLLAPHMVPVDSTVHLDGQEVTCRGALALPSAQLDLLGLGLVEPGTQCGPRMVCQSRRCRKNAFQELQRCLTACHSHGVCNSNHNCHCAPGWAPPFCDKPGFGGSMDSGPVQAENHDTFLLAMLLSVLLPLLPGAGLAWCCYRLPGAHLQRCSWGCRRDPACSGPKDGPHRDHPLGGVHPMELGPTATGQPWPLDPENSHEPSSHPEKPLPAVSPDPQDQVQMPRSCLW

SEQ ID NO: 101355 - protein, 151 aa, Artificial Sequence
  derived and/or modified sequence
MGWRPRRARGTPLLLLLLLLLLWPVPGAGVLQGHIPGQPVTPHWVLDGQPWRTVSLEEPVSKPDMGLVALEAEGQELLLELEKNQDALCGKLQCQGGKPSLLAPHMVPVDSTVHLDGQEVTCRGALALPSAQLDLLGLGLVEPGTQCGPRM

SEQ ID NO: 101356 - protein, 692 aa, Artificial Sequence
  derived and/or modified sequence
MGWRPRRARGTPLLLLLLLLLLWPVPGAGVLQGHIPGQPVTPHWVLDGQPWRTVSLEEPVSKPDMGLVALEAEGQELLLELEKNHRLLAPGYIETHYGPDGQPVVLAPNHTDHCHYQGRVRGFPDSWVVLCTCSGMSGLITLSRNASYYLRPWPPRGSKDFSTHEIFRMEQLLTWKGTCGHRDPGNKAGMTSLPGGPQSRGRREARRTRKYLELYIVADHTLFLTRHRNLNHTKQRLLEVANYVDQLLRTLDIQVALTGLEVWTERDRSRRQLRAFFRKGGGACLSNAPDPGLPVPPALCGNGFVEAGEECDCGPGQECRDLCCFAHNCSLRPGAQCAHGDCCVRCLLKPAGALCRQAMGDCDLPEFCTGTSSHCPPDVYLLDGSPCARGSGYCWDGACPTLEQQCQQLWGPGSHPAPEACFQVVNSAGDAHGNCGQDSEGHFLPCAGRDALCGKLQCQGGKPSLLAPHMVPVDSTVHLDGQEVTCRGALALPSAQLDLLGLGLVEPGTQCGPRMVCQSRRCRKNAFQELQRCLTACHSHGVCNSNHNCHCAPGWAPPFCDKPGFGGSMDSGPVQAENHDTFLLAMLLSVLLPLLPGAGLAWCCYRLPGAHLQRCSWGCRRDPACSGPKDGPHRDHPLGGVHPMELGPTATGQPWPLDPENSHEPSSHPEKPLPAVSPDPQDQVQMPRSCLW

SEQ ID NO: 101357 - DNA, 2439 bp, Artificial Sequence
  derived and/or modified sequence
atgggatggagaccccggcgggcgagggggacgcctctgctgctgctcctgttactgctcctgctttggccggtcccgggagctggggtgctccagggccatattccaggccagcctgtcacgccccactgggtcctggatggtcagccttggcgtactgtatccctggaggagccggtaagcaagccagatatgggactggtagccctcgaggctgagggccaggagcttctattggagctcgagaagaaccacaggttacttgcacctggttacattgagacccactacggaccagacggccagcctgtggtgctggctccaaatcatacggaccactgtcattatcagggacgagttagaggcttccctgactcttgggtggtgctgtgcacgtgttccggaatgagcgggcttattaccctgagcagaaacgcttcctactatttgcgaccctggccgccccgtgggagcaaagatttttccacccatgaaattttcaggatggagcagttgctgacttggaagggaacttgtgggcatcgtgacccaggtaacaaggccggcatgacaagcctccccggcggcccccagtcccggggacggcgggaagccaggcgtacccgaaagtatctggagttgtatatcgtggctgaccataccctgttcttgactcgtcaccgcaatctcaatcatactaaacagaggcttctcgaggttgccaactacgttgatcagctcctgaggacgttagatatacaggtagctttgacgggacttgaggtttggactgagcgcgataggtctagagttacccaggatgcgaatgccacactctgggctttcctgcagtggcgccggggactgtgggctcaacgtccacatgactccgcccagctgctaacaggtcgcgcctttcaaggcgcaacagtcggattagccccagtcgaaggcatgtgtagggctgaatccagcggtggggtctccactgatcatagtgagttgcctatcggcgccgccgctactatggcccatgagatcgggcactcacttggactgtcgcacgaccccgatggatgttgcgttgaagctgccgcggaatccggaggctgcgtgatggcagcagctaccgggcatcccttccccagggtgttctccgcctgctccaggcggcagctccgcgctttcttcagaaaaggcggaggggcatgtctcagcaatgcccccgacccagggttgcccgtcccccccgctctgtgcggcaacggcttcgtagaagctggagaagagtgtgactgtggccccggacaggagtgtcgggacctgtgttgctttgcccataactgcagcctgcgccccggtgcacagtgcgcccatggtgactgttgcgttcgatgccttctgaagccagccggcgccctatgccggcaggctatgggggattgcgacttacccgaattctgtactggaacctcctctcactgccctcctgacgtttacttactcgatggatccccgtgcgccaggggttccggatactgttgggatggcgcttgcccaactctcgagcagcaatgtcaacaattgtggggacccggatctcatccagcacccgaggcctgcttccaagtcgtgaactccgctggagacgcccatggcaattgcggccaggattcagagggacactttttgccatgtgccggcagagatgcactttgtggaaaactccagtgtcagggcggtaagccctccctcctggcccctcacatggtgccggtggacagcactgtacacctagacggacaggaggtgacctgtagaggtgcactagcactgccctccgcccagttagacctgctgggtctgggcctcgtcgagcccggaacacaatgcggtccccggatggtgtgtcagagtagaaggtgtagaaagaatgcctttcaggagctccagagatgtctaactgcttgccacagccacggcgtgtgcaattcaaaccacaattgccactgtgctccgggctgggctccgcccttttgtgacaagcccgggttcggcggctccatggactcaggacctgtccaggcggaaaatcacgatactttcctgctggccatgctgttaagtgtgctgttaccactcttgcctggcgccggactggcatggtgctgttataggctgcctggagcacatctccagagatgttcctgggggtgtagaagggatccagcttgtagcggaccaaaagatggcccccaccgggatcacccactgggcggcgtgcatcctatggagctgggccctaccgcaacaggacagccatggccgctggacccggagaattcgcacgagccaagctcccaccctgaaaaaccgctacccgccgtgtcgcccgatccccaagaccaggtgcagatgcctagatcttgtctgtggtag

SEQ ID NO: 101358 - DNA, 2439 bp, Artificial Sequence
  derived and/or modified sequence
atgggctggaggccccggcgggcccggggcacccccctgctgctgctgctgctgctgctgctgctgtggcctgtgcctggggccggcgtgctgcagggccacatccctggccagcctgtgaccccccactgggtgctggatggccagccctggaggacagtgtccctggaggagcctgtgtccaagccagacatgggcctggtggccctggaggccgagggccaggagctgctgctggagctggagaagaaccaccggctgctggcccctggctacatcgagacccactacggcccagatggccagcctgtggtgctggcccccaaccacacagaccactgccactaccagggccgggtgcggggcttcccagacagctgggtggtgctgtgcacctgcagcggcatgagcggcctcatcaccctgagcagaaatgccagctactacctgcggccctggccaccccggggcagcaaggacttcagcacccatgagatcttcaggatggagcagctgctgacctggaagggcacctgtggccaccgggaccccggcaacaaggccggcatgaccagcctgcccggcggcccccagagccggggccggcgggaggcccggaggaccaggaagtacctggagctgtacatcgtggccgaccacaccctcttcctgaccaggcacaggaacctgaaccacaccaagcagaggctgctggaggtggccaactacgtggaccagctgctgcggaccctggacatccaggtggccctgaccggcctggaggtgtggacagagcgggacaggagccgggtgacccaggatgccaatgccaccctgtgggccttcctgcagtggaggcggggcctgtgggcccagaggcctcatgattctgcccagctgctgaccggccgggccttccagggcgccaccgtgggcctggcccctgtggagggcatgtgcagagctgagagcagtggaggagtgtccacagaccacagcgagctgcccatcggggccgccgccaccatggcccatgaaattggccacagcctgggcctgagccatgaccctgatggctgctgcgtggaggccgctgctgagagcggcggctgtgtgatggctgctgccaccggccaccccttccccagggtcttcagcgcctgcagccggcggcagctgcgggccttcttcagaaaaggaggaggagcctgcctgagcaatgccccagaccccggcctgcctgtgcccccagccctgtgtggaaatggatttgtggaggccggggaggagtgtgactgtggccctggccaggagtgccgggacctgtgctgctttgcccacaactgcagcctgcggcctggggcccagtgtgcccatggagactgctgcgtgcgctgcctgctgaagccagctggggccctgtgccggcaggccatgggagactgtgacctgcctgagttctgcaccggcaccagcagccactgccccccagatgtgtacctgctggatggcagcccctgtgcccggggcagcggctactgctgggatggagcctgccccaccctggagcagcagtgccagcagctgtggggccctggcagccacccagcccctgaggcctgcttccaggtggtgaacagcgctggagatgcccacggcaactgtggccaggacagcgagggccacttcctgccctgtgccggcagagatgccctgtgtgggaagctgcagtgccagggcggcaagcccagcctgctggccccccacatggtgcctgtggacagcacagtgcacctggatggccaggaggtgacctgccgcggggccctggccctgcccagcgcccagctggacctgctgggcctgggcctggtggagcccggcacccagtgtggccccaggatggtgtgccagagccgccgctgcaggaagaatgccttccaggagctgcagcgctgcctgacagcctgccacagccacggcgtgtgcaacagcaaccacaactgccactgtgcccctggctgggccccacccttctgtgacaagccaggctttggaggctccatggattctggccctgtgcaggctgaaaatcatgacaccttcctgctggccatgctgctgtctgtgctgctgcccctgctgcccggggccggcctggcctggtgctgctaccgcctgcccggggcccacctgcagcgctgctcctggggctgccggcgggaccctgcctgcagcggccccaaggatggcccccaccgggaccaccccctgggcggcgtgcaccccatggagctgggccccacagccaccggccagccctggcccctggaccctgagaacagccatgagcccagcagccaccctgagaagcccctgcctgctgtgtccccagacccccaggaccaggtgcagatgcccaggagctgcctgtggtag

SEQ ID NO: 101359 - DNA, 2439 bp, Artificial Sequence
  derived and/or modified sequence
atgggctggcggccccggcgggcccggggcacccccctgctgctgcttcttcttctcctactgctgtggccagttcccggcgccggagtgctccagggacatattccaggacagcccgttacaccacattgggttctagacggccagccctggcggacggtttcactcgaagaaccagtcagcaaaccagatatggggttggtcgccctggaggcagagggccaggaacttctcttggaactggagaaaaaccataggttgttggccccagggtatatcgagacacactatggccctgacggacaacccgttgtcctggccccgaatcacactgaccattgtcactatcagggccgcgtgagaggttttcccgattcatgggtagtcctgtgtacatgttccggaatgagcgggttgatcactttgagtcgaaacgcttcgtactatttgagaccatggcctccccgaggctctaaagacttctcaacccacgaaatattccgcatggaacaattgctcacttggaaggggacctgtggacatagggaccctggcaataaggccggcatgacctcccttccagggggtccccagtcgcgagggaggagggaagcccgccgtacaagaaagtatctggaactctatatagtggccgaccacaccctgttcctgacccggcatcgcaacctgaaccacaccaagcagaggttgcttgaggtagccaattacgttgatcagcttctgagaacattagatatacaggtggctttgaccggcttagaagtgtggacagaaagagaccggagcagggtgacccaggatgccaatgctaccctctgggcattcttgcagtggcggcggggactgtgggcgcaaagaccgcacgattccgcacagcttctgactggaagggcgttccagggagctacagtgggcctcgcccctgtggagggcatgtgtagggcggaaagcagcggaggagttagtaccgaccacagtgagctacctattggggctgcggccaccatggcacatgagatcggtcattctctgggcctgtctcatgatcctgatggctgttgcgtggaggcggcagcggagtcaggaggctgtgttatggcagccgcaactggccaccccttccccagagttttctcagcatgctcaagacgccaactaagagccttctttcggaagggaggcggtgcctgcctttccaatgcacccgaccccggcctcccagtgcctcccgcactctgcgggaatgggtttgtcgaagccggagaggagtgtgattgtggtcccgggcaggagtgccgggatctgtgctgcttcgcacacaattgcagtttaaggcctggagcacagtgcgcacatggggactgctgtgtccgctgccttcttaaacccgctggggcgctatgccgccaggcaatgggggattgtgatcttccggaattctgcacaggaactagctcacactgcccacccgatgtctaccttctggacggctccccctgcgcacgcggcagcgggtattgttgggatggcgcttgccctacgctggaacaacaatgccagcagctgtggggccctggtagccatcccgcaccagaggcgtgcttccaggtggtgaactccgccggagacgctcatgggaattgcggccaagacagcgaggggcactttctgccctgcgctgggcgggacgccctctgtggaaagctacagtgtcaaggggggaagccttcgctcctcgcgccccacatggtgcccgtagactccacagtgcatttagacggccaggaagtgacatgtcggggggccctggcactgcccagcgctcaacttgatctactgggcttagggctagtagagcccggcacccaatgcgggccaaggatggtatgtcagtcaaggaggtgcagaaaaaacgcattccaggagctgcagagatgccttaccgcttgccactcccacggcgtttgtaattccaaccacaactgtcactgtgcacccggatgggcccctccattttgtgacaaacccggctttggcggatctatggactccggcccagtgcaggccgaaaatcacgacacattcctcttggccatgctgctgagcgttctactgccactgcttcccggcgccggcctcgcctggtgctgctataggttgcctggagcccaccttcaacgctgctcttggggctgtaggagggacccagcatgttctggtccaaaagatggaccacacagagaccatccacttggcggagtgcatcccatggaattgggtcccacagccacagggcagccatggcctctggatccggagaattcacacgagcctagttctcacccggagaagccgctcccagccgtatccccggatccacaggaccaggtccagatgcctcgctcctgtctctggtag

SEQ ID NO: 101360 - DNA, 2439 bp, Artificial Sequence
  derived and/or modified sequence
atgggatggcgcccacgcagggcacggggtacaccactgctgctgctgttgctactgctgcttctgtggcccgtgcccggtgcaggggtgctgcaagggcatatccctggacagccggtgactccccactgggtattggacggccagccttggcggacagtttctcttgaggaaccagtatccaaaccagatatgggacttgtggcgctggaggccgaagggcaggagctcctgctggagctcgagaagaaccacaggcttctggccccaggatatatcgagacccattacggtcctgacggccagcccgtagtgcttgccccaaaccataccgaccactgccactatcaaggaagagtccggggttttccagatagctgggttgtcctgtgtacctgctccggtatgagcgggttgatcaccctcagccgcaatgcttcatactaccttaggccgtggccgcctcggggatccaaggatttcagtacacatgaaatctttcggatggagcaactgttgacttggaaagggacatgtggccatcgcgaccccggtaataaggcaggcatgacgtcactacccggtgggcctcaatcccggggtcgtcgggaggcccgacgaaccagaaagtacttggagctctatatcgtagctgatcacactctgttccttacacggcatcgcaacctgaaccacacaaagcagcgactcctggaagtcgctaactacgtggaccagctcctgcgtacgctggacattcaggtggcgctgacaggactcgaagtgtggacagagcgggacagaagtcgagttacccaggatgccaatgccactctttgggccttcctgcagtggagaaggggcctttgggctcagaggcctcatgacagcgctcagctgttgaccggccgagcattccagggtgcaaccgtcggcctcgcacccgtggaggggatgtgccgtgccgagagctctggtggggtgagcacagatcatagtgagctcccaataggggcagcggctaccatggcccacgaaatcgggcacagtttggggctgtcacacgaccctgacggctgctgcgtggaagccgctgctgaaagtggaggctgtgtgatggccgcagccaccgggcatccatttccgagagtcttctctgcctgcagcagacgtcagctgagggcctttttcaggaaggggggaggggcatgcctcagcaatgctcccgaccccggtctgccagtccctccggctctttgtgggaatgggtttgttgaggccggtgaagaatgcgactgtggcccaggccaggagtgtcgcgacctctgctgctttgcccataattgtagcctacggccaggagcccaatgcgcccacggggactgttgtgttcggtgcctcttgaaacccgctggggctctctgccggcaggccatgggcgattgcgacttaccggagttttgcactggtactagttctcactgtccacctgacgtgtaccttctagacggctcaccctgcgctaggggatcaggttattgttgggacggcgcttgccccaccctcgaacagcagtgtcagcagctgtggggcccaggttctcatcctgcacccgaggcatgctttcaggtggtcaactcggccggagatgctcatggtaattgcggtcaagacagcgagggacacttcttaccttgcgcaggcagagatgcgctctgtggcaaactacagtgtcagggcggaaaacccagtctgctggctccacacatggttcctgtggactctaccgtgcatctggacgggcaggaagtaacttgcagaggggctctcgccctgccctcggcccagctggacttgcttgggctggggctggttgagccaggtactcagtgtggacctcgcatggtgtgccagagccgcagatgtcggaagaatgccttccaggagctgcaaaggtgtttgaccgcttgtcattctcacggagtgtgcaactccaatcacaactgtcactgtgccccagggtgggccccacccttctgcgataaacctggattcggaggtagcatggactccggtcccgtgcaggcagagaaccacgacacctttctgttggccatgctgctgtcagtcctgctgcctctcctgcccggtgcgggtttagcttggtgctgttaccggcttcccggagctcatctgcagcgatgttcatggggttgcagaagggatccagcctgctcaggccctaaggatggccctcatagggaccaccctctcgggggtgtccaccccatggagctgggcccaacagctacaggccaaccatggcctctggaccccgagaacagccatgagccatcaagtcatccagaaaagcctctaccagcagtatcccctgatcctcaggatcaggtgcagatgccgaggtcttgtctttggtag

SEQ ID NO: 101361 - DNA, 2439 bp, Artificial Sequence
  derived and/or modified sequence
atgggctggagacccagaagagccagaggcacccccctgctgctgctgctgctgctgctgctgctgtggcccgtgcccggcgccggcgtgctgcagggccacatccccggccagcccgtgaccccccactgggtgctggacggccagccctggagaaccgtgagcctggaggagcccgtgagcaagcccgacatgggcctggtggccctggaggccgagggccaggagctgctgctggagctggagaagaaccacagactgctggcccccggctacatcgagacccactacggccccgacggccagcccgtggtgctggcccccaaccacaccgaccactgccactaccagggcagagtgagaggcttccccgacagctgggtggtgctgtgcacctgcagcggcatgagcggcctgatcaccctgagcagaaacgccagctactacctgagaccctggccccccagaggcagcaaggacttcagcacccacgagatcttcagaatggagcagctgctgacctggaagggcacctgcggccacagagaccccggcaacaaggccggcatgaccagcctgcccggcggcccccagagcagaggcagaagagaggccagaagaaccagaaagtacctggagctgtacatcgtggccgaccacaccctgttcctgaccagacacagaaacctgaaccacaccaagcagagactgctggaggtggccaactacgtggaccagctgctgagaaccctggacatccaggtggccctgaccggcctggaggtgtggaccgagagagacagaagcagagtgacccaggacgccaacgccaccctgtgggccttcctgcagtggagaagaggcctgtgggcccagagaccccacgacagcgcccagctgctgaccggcagagccttccagggcgccaccgtgggcctggcccccgtggagggcatgtgcagagccgagagcagcggcggcgtgagcaccgaccacagcgagctgcccatcggcgccgccgccaccatggcccacgagatcggccacagcctgggcctgagccacgaccccgacggctgctgcgtggaggccgccgccgagagcggcggctgcgtgatggccgccgccaccggccaccccttccccagagtgttcagcgcctgcagcagaagacagctgagagccttcttcagaaagggcggcggcgcctgcctgagcaacgcccccgaccccggcctgcccgtgccccccgccctgtgcggcaacggcttcgtggaggccggcgaggagtgcgactgcggccccggccaggagtgcagagacctgtgctgcttcgcccacaactgcagcctgagacccggcgcccagtgcgcccacggcgactgctgcgtgagatgcctgctgaagcccgccggcgccctgtgcagacaggccatgggcgactgcgacctgcccgagttctgcaccggcaccagcagccactgcccccccgacgtgtacctgctggacggcagcccctgcgccagaggcagcggctactgctgggacggcgcctgccccaccctggagcagcagtgccagcagctgtggggccccggcagccaccccgcccccgaggcctgcttccaggtggtgaacagcgccggcgacgcccacggcaactgcggccaggacagcgagggccacttcctgccctgcgccggcagagacgccctgtgcggcaagctgcagtgccagggcggcaagcccagcctgctggccccccacatggtgcccgtggacagcaccgtgcacctggacggccaggaggtgacctgcagaggcgccctggccctgcccagcgcccagctggacctgctgggcctgggcctggtggagcccggcacccagtgcggccccagaatggtgtgccagagcagaagatgcagaaagaacgccttccaggagctgcagagatgcctgaccgcctgccacagccacggcgtgtgcaacagcaaccacaactgccactgcgcccccggctgggccccccccttctgcgacaagcccggcttcggcggcagcatggacagcggccccgtgcaggccgagaaccacgacaccttcctgctggccatgctgctgagcgtgctgctgcccctgctgcccggcgccggcctggcctggtgctgctacagactgcccggcgcccacctgcagagatgcagctggggctgcagaagagaccccgcctgcagcggccccaaggacggcccccacagagaccaccccctgggcggcgtgcaccccatggagctgggccccaccgccaccggccagccctggcccctggaccccgagaacagccacgagcccagcagccaccccgagaagcccctgcccgccgtgagccccgacccccaggaccaggtgcagatgcccagaagctgcctgtggtag

SEQ ID NO: 101362 - DNA, 3674 bp, Artificial Sequence
  derived and/or modified sequence
gggcggcggtccgggagtggcgacccggctcccccatggcgcgcgccgtcggggcccctggccaggctccgagcggggttggcggggaggggaggcgggagcgagggcgggcggtgggaggtgggggcgggaaggtccgaaggcggcggcctgaggctgcaccgggcacgggtcggccgcaatccagcctgggcggagccggagttgcgagccgctgcctagaggccgaggagctcacagctatgggctggaggccccggagagctcgggggaccccgttgctgctgctgctactactgctgctgctctggccagtgccaggcgccggggtgcttcaaggacatatccctgggcagccagtcaccccgcactgggtcctggatggacaaccctggcgcaccgtcagcctggaggagccggtctcgaagccagacatggggctggtggccctggaggctgaaggccaggagctcctgcttgagctggagaagaaccacaggctgctggccccaggatacatagaaacccactacggcccagatgggcagccagtggtgctggcccccaaccacacggatcattgccactaccaagggcgagtaaggggcttccccgactcctgggtagtcctctgcacctgctctgggatgagtggcctgatcaccctcagcaggaatgccagctattatctgcgtccctggccaccccggggctccaaggacttctcaacccacgagatctttcggatggagcagctgctcacctggaaaggaacctgtggccacagggatcctgggaacaaagcgggcatgaccagccttcctggtggtccccagagcaggggcaggcgagaagcgcgcaggacccggaagtacctggaactgtacattgtggcagaccacaccctgttcttgactcggcaccgaaacttgaaccacaccaaacagcgtctcctggaagtcgccaactacgtggaccagcttctcaggactctggacattcaggtggcgctgaccggcctggaggtgtggaccgagcgggaccgcagccgcgtcacgcaggacgccaacgccacgctctgggccttcctgcagtggcgccgggggctgtgggcgcagcggccccacgactccgcgcagctgctcacgggccgcgccttccagggcgccacagtgggcctggcgcccgtcgagggcatgtgccgcgccgagagctcgggaggcgtgagcacggaccactcggagctccccatcggcgccgcagccaccatggcccatgagatcggccacagcctcggcctcagccacgaccccgacggctgctgcgtggaggctgcggccgagtccggaggctgcgtcatggctgcggccaccgggcacccgtttccgcgcgtgttcagcgcctgcagccgccgccagctgcgcgccttcttccgcaaggggggcggcgcttgcctctccaatgccccggaccccggactcccggtgccgccggcgctctgcgggaacggcttcgtggaagcgggcgaggagtgtgactgcggccctggccaggagtgccgcgacctctgctgctttgctcacaactgctcgctgcgcccgggggcccagtgcgcccacggggactgctgcgtgcgctgcctgctgaagccggctggagcgctgtgccgccaggccatgggtgactgtgacctccctgagttttgcacgggcacctcctcccactgtcccccagacgtttacctactggacggctcaccctgtgccaggggcagtggctactgctgggatggcgcatgtcccacgctggagcagcagtgccagcagctctgggggcctggctcccacccagctcccgaggcctgtttccaggtggtgaactctgcgggagatgctcatggaaactgcggccaggacagcgagggccacttcctgccctgtgcagggagggatgccctgtgtgggaagctgcagtgccagggtggaaagcccagcctgctcgcaccgcacatggtgccagtggactctaccgttcacctagatggccaggaagtgacttgtcggggagccttggcactccccagtgcccagctggacctgcttggcctgggcctggtagagccaggcacccagtgtggacctagaatggtgtgccagagcaggcgctgcaggaagaatgccttccaggagcttcagcgctgcctgactgcctgccacagccacggggtttgcaatagcaaccataactgccactgtgctccaggctgggctccacccttctgtgacaagccaggctttggtggcagcatggacagtggccctgtgcaggctgaaaaccatgacaccttcctgctggccatgctcctcagcgtcctgctgcctctgctcccaggggccggcctggcctggtgttgctaccgactcccaggagcccatctgcagcgatgcagctggggctgcagaagggaccctgcgtgcagtggccccaaagatggcccacacagggaccaccccctgggcggcgttcaccccatggagttgggccccacagccactggacagccctggcccctggaccctgagaactctcatgagcccagcagccaccctgagaagcctctgccagcagtctcgcctgacccccaagatcaagtccagatgccaagatcctgcctctggtgagaggtagctcctaaaatgaacagatttaaagacaggtggccactgacagccactccaggaacttgaactgcaggggcagagccagtgaatcaccggacctccagcacctgcaggcagcttggaagtttcttccccgagtggagcttcgacccacccactccaggaacccagagccacattagaagttcctgagggctggagaacactgctgggcacactctccagctcaataaaccatcagtcccagaagcaaaggtcacacagcccctgacctccctcaccagtggaggctgggtagtgctggccatcccaaaagggctctgtcctgggagtctggtgtgtctcctacatgcaatttccacggacccagctctgtggagggcatgactgctggccagaagctagtggtcctggggccctatggttcgactgagtccacactcccctggagcctggctggcctctgcaaacaaacataattttggggaccttccttcctgtttcttcccaccctgtcttctcccctaggtggttcctgagcccccacccccaatcccagtgctacacctgaggttctggagctcagaatctgacagcctctcccccattctgtgtgtgtcggggggacagagggaaccatttaagaaaagataccaaagtagaagtcaaaagaaagacatgttggctataggcgtggtggctcatgcctataatcccagcactttgggaagccggggtaggaggatcaccagaggccagcaggtccacaccagcctgggcaacacagcaagacaccgcatctacagaaaaattttaaaattagctgggcgtggtggtgtgtacctgtaggcctagctgctcaggaggctgaagcaggaggatcacttgagcctgagttcaacactgcagtgagctatggtggcaccactgcactccagcctgggtgacagagcaagaccctgtctctaaaataaattttaaaaagacatatta

SEQ ID NO: 101363 - protein, 526 aa, Artificial Sequence
  derived and/or modified sequence
MRPPQCLLHTPSLASPLLLLLLWLLGGGVGAEGREDAELLVTVRGGRLRGIRLKTPGGPVSAFLGIPFAEPPMGPRRFLPPEPKQPWSGVVDATTFQSVCYQYVDTLYPGFEGTEMWNPNRELSEDCLYLNVWTPYPRPTSPTPVLVWIYGGGFYSGASSLDVYDGRFLVQAERTVLVSMNYRVGAFGFLALPGSREAPGNVGLLDQRLALQWVQENVAAFGGDPTSVTLFGESAGAASVGMHLLSPPSRGLFHRAVLQSGAPNGPWATVGMGEARRRATQLAHLVGCPPGGTGGNDTELVACLRTRPAQVLVNHEWHVLPQESVFRFSFVPVVDGDFLSDTPEALINAGDFHGLQLAGRLAAQGARVYAYVFEHRASTLSWPLWMGVPHGYEIEFIFGIPLDPSRNYTAEEKIFAQRLMRYWANFARTGDPNEPRDPKAPQWPPYTAGAQQYVSLDLRPLEVRRGLRAQACAFWNRFLPKLLSATDTLDEAERQWKAEFHRWSSYMVHWKNQFDHYSKQDRCSDL

SEQ ID NO: 101364 - DNA, 1581 bp, Artificial Sequence
  derived and/or modified sequence
atgagacccccacaatgcctcctccatactccatctctcgcctcacctctgctcctgttgctgctgtggctgttaggggggggggtcggagccgaagggagggaagatgcagaacttctcgtgaccgtgcgcggcggccgcctgcggggcatccggctgaagacaccaggagggcccgtcagcgccttcttaggcattccttttgcagagccgccaatgggcccccgtcggttcctccctcccgagcccaagcaaccctggtcaggggtcgtcgacgccactacattccagtcagtctgttaccaatacgtggacactctgtaccccggctttgaaggcactgaaatgtggaatccaaacagagaactatcagaagactgtctatacttgaacgtatggactccttaccccagaccaacctccccgacaccggtcctagtgtggatatacggaggtggcttctacagcggagcctcttctctcgacgtgtatgacggtcggttcttggtgcaggccgagcgcaccgtacttgtcagtatgaattatagggtgggagctttcgggtttctagcgttgccaggatcaagggaggctccaggaaacgtcggcctgttagatcagcggctggccctacaatgggtccaggagaacgttgcagccttcggaggcgacccaacatctgttactctctttggggagtcagcaggggcagcctctgttggaatgcacctgctgtcgcctccgtcaaggggcttgttccatcgtgcagtactccagagtggggctccgaatgggccatgggcaacagtggggatgggcgaggccagaagacgggccacccagctcgcccacctggtgggctgcccgcccggaggcactggcgggaacgacacagagttagtcgcatgtctccggacacgtcccgctcaagtcttggttaatcacgaatggcacgttttacctcaggaatctgtgttccggttttctttcgttcctgtcgtggatggagattttttaagtgacacacctgaagctctgataaacgctggggattttcatgggctccagttagctggccgtctcgccgcgcagggcgcaagagtttacgcatacgtgttcgaacacagagccagcacactcagctggccattgtggatgggtgtgccccacgggtacgagatcgaatttatcttcggcattcccctcgaccctagtcgaaattacacggcagaagaaaagatcttcgcccagagactgatgcgctattgggctaattttgccaggactggagatcctaacgagccacgggatccgaaggctccgcaatggcctccctacacagccggggcccagcagtacgtcagtcttgatctgcggcccctggaagttaggagaggattgagagcccaggcttgcgctttttggaacagattcttgcctaagttgcttagtgctaccgacacactggacgaggcagagcggcagtggaaagccgaatttcatcgctggtccagctatatggtgcactggaagaaccagttcgatcactacagcaagcaagacaggtgtagtgatctttag

SEQ ID NO: 101365 - DNA, 480 bp, Artificial Sequence
  derived and/or modified sequence
atgcggccaccccaatgcctgcttcatacaccttccctagcctccccactgcttttattgctgttatggttactgggcggcggcgtaggggccgagggaagggaggatgccgaactcctggtgaccgtgagaggtgggcgtctgcgcggtatacggctcaagactccgggaggcccagtctccgcattccttggaataccgtttgcagagccccccatgggcccccgcaggtttctcccaccagagcctaagcagccatggtcgggagtggtggacgcaaccacattccagtccgtgtgctatcagtacgtcgatactctctacccaggatttgaggggacggaaatgtggaacccaaaccgcgaattgagcgaggactgcctgtacctcaatgtctggaccccttatccaagacctacgagcccaaccccagtgttagtgtggatatatgggggcggtttctactctggcgcctcctag

SEQ ID NO: 101366 - DNA, 1581 bp, Artificial Sequence
  derived and/or modified sequence
atgaggcctccccagtgcctgctgcacacccccagcctggccagccccctgctgctgctgctgctgtggctgctgggcggcggcgtgggcgctgagggcagagaagatgctgagctgctggtgacagtgcggggcggccgcctgcggggcatccggctgaagacccctgggggccctgtgtctgccttcctgggcatcccctttgctgagccccccatgggcccccggcgcttcctgcccccagagcccaagcagccctggagcggcgtggtggatgccaccaccttccagagcgtgtgctaccagtatgtggacaccctgtacccaggctttgagggcacagagatgtggaaccccaaccgggagctgtctgaggactgcctgtacctgaatgtgtggaccccctacccccggcccaccagccccacccctgtgctggtgtggatctacggcggcggcttctacagcggggccagcagcctggatgtgtatgatggccgcttcctggtgcaggccgagaggacagtgctggtgtccatgaactacagagtgggcgccttcggcttcctggccctgcccggcagccgggaggcccctggaaatgtgggcctgctggaccagaggctggccctgcagtgggtgcaggagaatgtggccgcctttggaggagaccccacctctgtgaccctgtttggagagagcgctggagctgcctctgtgggcatgcacctgctgagcccccccagccggggcctcttccacagagctgtgctgcagagcggggcccccaacggcccctgggccaccgtgggcatgggagaggccaggagaagagccacccagctggcccacctggtgggctgccccccaggcggcactggaggaaatgacacagagctggtggcctgcctgcggaccaggcctgcccaggtgctggtgaaccacgagtggcacgtgctgccccaggagagcgtcttccgcttctcctttgtgcctgtggtggatggagacttcctgagtgacaccccagaggccctgatcaatgctggggacttccacggcctgcagctggccggccgcctggccgcccagggcgcccgggtgtatgcctacgtgtttgagcaccgggccagcaccctgtcctggcccctgtggatgggcgtgccccacggctatgaaattgagttcatcttcggcatccccctggaccccagcaggaactacacagctgaggagaagatctttgcccagaggctgatgagatactgggccaactttgccaggactggagaccccaatgagccccgggaccccaaggccccccagtggccaccctacacagctggggcccagcagtatgtgtccctggacctgcggcccctggaggtgcggcggggcctgcgggcccaggcctgtgccttctggaaccgcttcctgcccaagctgctgagcgccacagacaccctggatgaggccgagcggcagtggaaggccgagttccaccgctggagcagctacatggtgcactggaagaaccagtttgaccactacagcaagcaggaccgctgcagcgacctgtag

SEQ ID NO: 101367 - DNA, 480 bp, Artificial Sequence
  derived and/or modified sequence
atgaggcctccccagtgcctgctgcacacccccagcctggccagccccctgctgctgctgctgctgtggctgctgggcggcggcgtgggcgctgagggcagagaagatgctgagctgctggtgacagtgcggggcggccgcctgcggggcatccggctgaagacccctgggggccctgtgtctgccttcctgggcatcccctttgctgagccccccatgggcccccggcgcttcctgcccccagagcccaagcagccctggagcggcgtggtggatgccaccaccttccagagcgtgtgctaccagtatgtggacaccctgtacccaggctttgagggcacagagatgtggaaccccaaccgggagctgtctgaggactgcctgtacctgaatgtgtggaccccctacccccggcccaccagccccacccctgtgctggtgtggatctacggcggcggcttctacagcggggccagctag

SEQ ID NO: 101368 - DNA, 1581 bp, Artificial Sequence
  derived and/or modified sequence
atgcggcccccccagtgcctgctgcacacccccagcctggccagccccctacttctcctcctgttgtggctcctgggagggggtgtcggggctgaaggcagagaggatgctgaattgctggtgacggtccgaggtggccgtctgcgagggatccggcttaagacacccggcggccccgtaagtgcctttctcggcattccgttcgctgagccacctatggggccccggcgattcctgcctcctgaacccaaacagccttggagcggagttgtggatgctacaaccttccagtcggtctgctaccagtacgtcgatacactctatcctgggttcgaggggaccgaaatgtggaaccctaaccgagaactctccgaggattgcttgtaccttaacgtgtggactccctatccccgccccacctctccgacccctgtcctggtttggatctacggaggagggttttattcaggcgcaagctcgctggatgtttacgatggccgattcttggtccaggccgagagaactgttctagtgtccatgaactatagagttggagcattcgggttcctcgcccttcccggctctcgagaggcccccggaaatgtgggactcctggatcagaggctagcgttacagtgggtacaagaaaatgtcgcagccttcgggggggatccaacatcagtcaccctgttcggcgagtcagccggtgcagcatcagtcggcatgcatctgctttcccctccctcaagggggctttttcatcgagcagttcttcagtccggagcccctaatggcccatgggccaccgttggaatgggcgaggccaggcggagggccacccagctggctcacctggttggatgtccgcccggaggcaccgggggcaatgacactgagctcgtcgcatgtctccggactcggccggctcaggtgctcgtgaaccatgaatggcacgtgctgccacaggaaagcgtcttccgcttttcattcgtgcctgtggttgacggggattttctttccgatacccctgaagctctgatcaatgctggtgacttccatggactgcagctagcgggccgactggccgcccagggcgcgcgagtgtatgcctatgtcttcgagcatcgtgcctcgaccctgagttggcctctgtggatgggagtgccacatggctatgaaatagaattcatcttcggcatacctttagatccctctcgtaattacacagcagaagaaaagatttttgctcaacgactcatgcggtattgggcaaatttcgctcgaaccggtgatccaaacgagccccgcgaccctaaggctccacagtggcccccttataccgcaggagcccagcagtatgtatccttggatctgaggcctctggaggttcgtcgtgggctgcgcgcccaggcttgtgctttttggaaccgatttctccccaaacttctgtctgccaccgacacactggatgaggccgagcgtcaatggaaggcggagtttcaccgatggtcgagctacatggtccactggaaaaatcagtttgatcattattcaaagcaggaccggtgcagtgatctttag

SEQ ID NO: 101369 - DNA, 480 bp, Artificial Sequence
  derived and/or modified sequence
atgcggcccccccagtgcctgctgcacacccccagcctggccagccctctgctgctcctcctgttatggttacttgggggcggagtcggtgccgagggccgtgaggatgcagaattgctcgtgacagtaaggggtggccggctgcgcggaatacggctgaagaccccaggagggcccgtgtcagcttttcttggcattcccttcgcagagcctcctatggggcccaggcgattcctgcccccagagcctaaacagccttggagcggagtggtggacgcaaccactttccagtctgtttgctaccagtatgtggacactctgtatcccggcttcgaaggtaccgagatgtggaatcctaatcgcgagctctctgaagactgtctgtatctcaacgtctggacgccctatcccaggcccacctcccccacccctgtgctagtgtggatttacggaggggggttttacagcggggcctcgtag

SEQ ID NO: 101370 - DNA, 1581 bp, Artificial Sequence
  derived and/or modified sequence
atgaggcccccacagtgtttgctgcataccccatccctggccagcccactcctgttgctactcctctggcttttggggggtggcgtgggagccgagggacgcgaggacgctgagctcctcgtgacagtcagaggaggacggctgcggggaatccgcctgaaaaccccaggaggtcccgtgtctgcatttcttggcatcccatttgctgagccaccaatgggccctcgaagattcctccccccagagccaaaacagccttggtcaggagtcgtggatgctaccactttccagtccgtgtgttaccagtatgtcgacaccctctatcctggatttgagggcacggaaatgtggaaccctaacagagagttatcagaagactgtctgtacctgaacgtctggaccccatatcctcggccaactagcccaacaccagtgctcgtgtggatctacggtggaggcttttacagcggtgcatcttcgctggacgtctatgatggaagattcttggtgcaggcagagcgcaccgtactggtcagtatgaactacagagttggagcatttggctttctggccctgcctgggagtcgagaggctccgggtaatgtgggcctcctggaccagcgcttggccctgcaatgggtccaggaaaacgttgcagcgttcggaggtgatccgacctccgtcactctgtttggcgaatctgctggagcagcctcggtgggcatgcatctgctcagtcctccctcacggggactgtttcatagggccgtcctgcaaagtggggctcccaacgggccttgggcgactgtcggaatgggggaggcacggaggcgtgccacccagcttgcccacctggtgggatgcccacccggtggcaccgggggtaacgacaccgagctagtggcttgtctgcgcaccaggcctgcccaggtgctggtgaaccacgagtggcacgttctcccacaggagagtgtcttccgctttagtttcgtaccagtcgtggatggagattttctctctgacaccccagaggccctaataaatgcgggtgactttcatggcctgcaattagccggtcggctcgcggctcagggcgcacgtgtgtacgcttacgtctttgaacaccgcgcatcgacactgtcttggcctctgtggatgggggtgcctcatgggtatgaaatagaatttatctttggtatccctctggatccgtccagaaattacaccgctgaagaaaagatattcgctcagcgcctcatgcggtattgggctaattttgccagaactggagatccaaacgaacctcgcgatccgaaagcaccgcagtggccaccctacactgcaggtgcacagcagtatgtgagcctagatcttaggccactggaggtcaggcggggactgcgcgctcaagcttgtgcattctggaatagatttctgccgaaattattgtcggccacagacaccctggacgaagctgaacgacagtggaaggcagaatttcatcggtggtctagctacatggtgcattggaaaaatcagtttgaccattattctaagcaggatcgctgttcggacctctag

SEQ ID NO: 101371 - DNA, 480 bp, Artificial Sequence
  derived and/or modified sequence
atgcgtccacctcagtgtctgctgcacactccctcgctcgcttcacccctacttcttctcctgctgtggttgctcgggggaggagtgggggcagaaggaagagaggacgcagagctgcttgtcacagtgaggggcggtcggctccggggtatccgcctgaagactcccggtggacctgtgtccgcattcctgggtattcctttcgctgaacccccaatgggacctaggcgcttcctgcctccagagcccaaacagccctggtcaggagttgtggatgccacgacttttcagtctgtgtgttatcagtacgtggacacactttacccagggttcgaggggacagagatgtggaacccgaacagagagttgagtgaggattgcctgtatctcaacgtgtggactccctaccctcgacccacatcgccgacaccggtgttggtatggatttacgggggagggttttactctggcgcaagctag

SEQ ID NO: 101372 - DNA, 1906 bp, Artificial Sequence
  derived and/or modified sequence
cagagtcggctcagcctgcgccggggaacatcggccgcctccagctcccggcgcggcccggcccggcccggctcggccgcctcagacgccgcctgccctgcagccatgaggcccccgcagtgtctgctgcacacgccttccctggcttccccactccttctcctcctcctctggctcctgggtggaggagtgggggctgagggccgggaggatgcagagctgctggtgacggtgcgtgggggccggctgcggggcattcgcctgaagacccccgggggccctgtctctgctttcctgggcatcccctttgcggagccacccatgggaccccgtcgctttctgccaccggagcccaagcagccttggtcaggggtggtagacgctacaaccttccagagtgtctgctaccaatatgtggacaccctatacccaggttttgagggcaccgagatgtggaaccccaaccgtgagctgagcgaggactgcctgtacctcaacgtgtggacaccatacccccggcctacatcccccacccctgtcctcgtctggatctatgggggtggcttctacagtggggcctcctccttggacgtgtacgatggccgcttcttggtacaggccgagaggactgtgctggtgtccatgaactaccgggtgggagcctttggcttcctggccctgccggggagccgagaggccccgggcaatgtgggtctcctggatcagaggctggccctgcagtgggtgcaggagaacgtggcagccttcgggggtgacccgacatcagtgacgctgtttggggagagcgcgggagccgcctcggtgggcatgcacctgctgtccccgcccagccggggcctgttccacagggccgtgctgcagagcggtgcccccaatggaccctgggccacggtgggcatgggagaggcccgtcgcagggccacgcagctggcccaccttgtgggctgtcctccaggcggcactggtgggaatgacacagagctggtagcctgccttcggacacgaccagcgcaggtcctggtgaaccacgaatggcacgtgctgcctcaagaaagcgtcttccggttctccttcgtgcctgtggtagatggagacttcctcagtgacaccccagaggccctcatcaacgcgggagacttccacggcctgcagctggctgggcgactggctgcccagggtgcccgggtctacgcctacgtctttgaacaccgtgcttccacgctctcctggcccctgtggatgggggtgccccacggctacgagatcgagttcatctttgggatccccctggacccctctcgaaactacacggcagaggagaaaatcttcgcccagcgactgatgcgatactgggccaactttgcccgcacaggggatcccaatgagccccgagaccccaaggccccacaatggcccccgtacacggcgggggctcagcagtacgttagtctggacctgcggccgctggaggtgcggcgggggctgcgcgcccaggcctgcgccttctggaaccgcttcctccccaaattgctcagcgccaccgacacgctcgacgaggcggagcgccagtggaaggccgagttccaccgctggagctcctacatggtgcactggaagaaccagttcgaccactacagcaagcaggatcgctgctcagacctgtgaccccggcgggacccccatgtcctccgctccgcccggccccctagctgtatatactatttatttcagggctgggctataacacagacgagccccagactctgcccatccccaccccaccccgacgtcccccggggctcccggtcctctgcatgtctcaggctgagctccctcccccgcggtgccttcgcccctctgggctgccaataaactgttacagcca

SEQ ID NO: 101373 - DNA, 1581 bp, Artificial Sequence
  derived and/or modified sequence
atgagacccccccagtgcctgctgcacacccccagcctggccagccccctgctgctgctgctgctgtggctgctgggcggcggcgtgggcgccgagggcagagaggacgccgagctgctggtgaccgtgagaggcggcagactgagaggcatcagactgaagacccccggcggccccgtgagcgccttcctgggcatccccttcgccgagccccccatgggccccagaagattcctgccccccgagcccaagcagccctggagcggcgtggtggacgccaccaccttccagagcgtgtgctaccagtacgtggacaccctgtaccccggcttcgagggcaccgagatgtggaaccccaacagagagctgagcgaggactgcctgtacctgaacgtgtggaccccctaccccagacccaccagccccacccccgtgctggtgtggatctacggcggcggcttctacagcggcgccagcagcctggacgtgtacgacggcagattcctggtgcaggccgagagaaccgtgctggtgagcatgaactacagagtgggcgccttcggcttcctggccctgcccggcagcagagaggcccccggcaacgtgggcctgctggaccagagactggccctgcagtgggtgcaggagaacgtggccgccttcggcggcgaccccaccagcgtgaccctgttcggcgagagcgccggcgccgccagcgtgggcatgcacctgctgagcccccccagcagaggcctgttccacagagccgtgctgcagagcggcgcccccaacggcccctgggccaccgtgggcatgggcgaggccagaagaagagccacccagctggcccacctggtgggctgcccccccggcggcaccggcggcaacgacaccgagctggtggcctgcctgagaaccagacccgcccaggtgctggtgaaccacgagtggcacgtgctgccccaggagagcgtgttcagattcagcttcgtgcccgtggtggacggcgacttcctgagcgacacccccgaggccctgatcaacgccggcgacttccacggcctgcagctggccggcagactggccgcccagggcgccagagtgtacgcctacgtgttcgagcacagagccagcaccctgagctggcccctgtggatgggcgtgccccacggctacgagatcgagttcatcttcggcatccccctggaccccagcagaaactacaccgccgaggagaagatcttcgcccagagactgatgagatactgggccaacttcgccagaaccggcgaccccaacgagcccagagaccccaaggccccccagtggcccccctacaccgccggcgcccagcagtacgtgagcctggacctgagacccctggaggtgagaagaggcctgagagcccaggcctgcgccttctggaacagattcctgcccaagctgctgagcgccaccgacaccctggacgaggccgagagacagtggaaggccgagttccacagatggagcagctacatggtgcactggaagaaccagttcgaccactacagcaagcaggacagatgcagcgacctgtag

SEQ ID NO: 101374 - DNA, 480 bp, Artificial Sequence
  derived and/or modified sequence
atgagacccccccagtgcctgctgcacacccccagcctggccagccccctgctgctgctgctgctgtggctgctgggcggcggcgtgggcgccgagggcagagaggacgccgagctgctggtgaccgtgagaggcggcagactgagaggcatcagactgaagacccccggcggccccgtgagcgccttcctgggcatccccttcgccgagccccccatgggccccagaagattcctgccccccgagcccaagcagccctggagcggcgtggtggacgccaccaccttccagagcgtgtgctaccagtacgtggacaccctgtaccccggcttcgagggcaccgagatgtggaaccccaacagagagctgagcgaggactgcctgtacctgaacgtgtggaccccctaccccagacccaccagccccacccccgtgctggtgtggatctacggcggcggcttctacagcggcgccagctag

SEQ ID NO: 101375 - protein, 423 aa, Artificial Sequence
  derived and/or modified sequence
MSSQVVGIEPLYIKAEPASPDSPKGSSETETEPPVALAPGPAPTRCLPGHKEEEDGEGAGPGEQGGGKLVLSSLPKRLCLVCGDVASGYHYGVASCEACKAFFKRTIQGSIEYSCPASNECEITKRRRKACQACRFTKCLRVGMLKEGVRLDRVRGGRQKYKRRPEVDPLPFPGPFPAGPLAVAGGPRKTAAPVNALVSHLLVVEPEKLYAMPDPAGPDGHLPAVATLCDLFDREIVVTISWAKSIPGFSSLSLSDQMSVLQSVWMEVLVLGVAQRSLPLQDELAFAEDLVLDEEGARAAGLGELGAALLQLVRRLQALRLEREEYVLLKALALANSDSVHIEDAEAVEQLREALHEALLEYEAGRAGPGGGAERRRAGRLLLTLPLLRQTAGKVLAHFYGVKLEGKVPMHKLFLEMLEAMMD

SEQ ID NO: 101376 - protein, 109 aa, Artificial Sequence
  derived and/or modified sequence
MSSQVVGIEPLYIKAEPASPDSPKGSSETETEPPVALAPGPAPTRCLPGHKEEEDGEGAGPGEQGGGKLVLSSLPKRLCLVCGDVASGYHYGVASCEACKAFFKRTIQG

SEQ ID NO: 101377 - DNA, 2221 bp, Artificial Sequence
  derived and/or modified sequence
tcctacaagcagccggcggcgccgccgagtgaggggacgcggcgcggtggggcggcgcggcccgaggaggcggcggaggaggggccgcccgcggcccccggctcactccggcactccgggccgctcggcccccatgcctgcccgaccgcgctgccggagccccaggtgaccagcgccatgtccagccaggtggtgggcattgagcctctctacatcaaggcagagccggccagccctgacagtccaaagggttcctcggagacagagaccgagcctcctgtggccctggcccctggtccagctcccactcgctgcctcccaggccacaaggaagaggaggatggggagggggctgggcctggcgagcagggcggtgggaagctggtgctcagctccctgcccaagcgcctctgcctggtctgtggggacgtggcctccggctaccactatggtgtggcatcctgtgaggcctgcaaagccttcttcaagaggaccatccaggggagcatcgagtacagctgtccggcctccaacgagtgtgagatcaccaagcggagacgcaaggcctgccaggcctgccgcttcaccaagtgcctgcgggtgggcatgctcaaggagggagtgcgcctggaccgcgtccggggtgggcggcagaagtacaagcggcggccggaggtggacccactgcccttcccgggccccttccctgctgggcccctggcagtcgctggaggcccccggaagacagcagccccagtgaatgcactggtgtctcatctgctggtggttgagcctgagaagctctatgccatgcctgaccccgcaggccctgatgggcacctcccagccgtggctaccctctgtgacctctttgaccgagagattgtggtcaccatcagctgggccaagagcatcccaggcttctcatcgctgtcgctgtctgaccagatgtcagtactgcagagcgtgtggatggaggtgctggtgctgggtgtggcccagcgctcactgccactgcaggatgagctggccttcgctgaggacttagtcctggatgaagagggggcacgggcagctggcctgggggaactgggggctgccctgctgcaactagtgcggcggctgcaggccctgcggctggagcgagaggagtatgttctactaaaggccttggcccttgccaattcagactctgtgcacatcgaagatgccgaggctgtggagcagctgcgagaagctctgcacgaggccctgctggagtatgaagccggccgggctggccccggagggggtgctgagcggcggcgggcgggcaggctgctgctcacgctaccgctcctccgccagacagcgggcaaagtgctggcccatttctatggggtgaagctggagggcaaggtgcccatgcacaagctgttcttggagatgctcgaggccatgatggactgaggcaaggggtgggactggtgggggttctggcaggacctgcctagcatggggtcagccccaagggctggggcggagctggggtctgggcagtgccacagcctgctggcagggccagggcaatgccatcagcccctgggaacaggccccacgccctctcctccccctcctagggggtgtcagaagctgggaacgtgtgtccaggctctgggcacagtgctgccccttgcaagccataacgtgcccccagagtgtagggggccttgcggaagccatagggggctgcacgggatgcgtgggaggcagaaacctatctcagggagggaaggggatggaggccagagtctcccagtgggtgatgcttttgctgctgcttaatcctaccccctcttcaaagcagagtgggacttggagagcaaaggcccatgcccccttcgctcctcctctcatcatttgcattgggcattagtgtccccccttgaagcaataactccaagcagactccagcccctggacccctggggtggccagggcttccccatcagctcccaacgagcctcctcagggggtaggagagcactgcctctatgccctgcagagcaataacactatatttatttttgggtttggccagggaggcgcagggacatggggcaagccagggcccagagcccttggctgtacagagactctattttaatgtatatttgctgcaaagagaaaccgcttttggttttaaacctttaatgagaaaaaaatatataataccgagctc

SEQ ID NO: 101378 - DNA, 1272 bp, Artificial Sequence
  derived and/or modified sequence
atgtcatctcaggttgtgggcatcgaaccactgtatatcaaggccgaacccgcgagcccagatagccctaaaggatcttccgaaactgagactgaaccacctgtagccttggcccccgggccagctcctactaggtgccttccaggacataaagaggaagaagacggagagggtgccggcccaggggaacagggcggagggaaacttgttttgagtagcctgcctaaaaggctgtgcctggtttgcggcgatgttgcttctggttaccattacggagtggctagctgcgaggcctgcaaagccttctttaagcgcacaatccagggttccatcgaatacagttgtcccgccagtaacgaatgcgaaattacaaagaggcgcaggaaggcatgccaggcatgccgcttcaccaagtgcctgagagtgggcatgcttaaggagggtgtgcggcttgatcgggttcgggggggcagacagaagtacaaaagacgcccggaggtggatccgcttccttttccaggtcccttccctgcgggccctctggcggtcgccgggggacccagaaagactgctgcccccgtcaacgccttagtgagccacctacttgtagtagagcctgaaaagctctatgctatgcctgatccagctggccccgatgggcatctcccagctgtggctaccctttgtgatcttttcgatagagagatcgtcgttacgatttcctgggccaaaagcatcccaggcttcagtagtctctctttatccgaccagatgtccgtcctccagtcagtttggatggaggttctcgttcttggcgttgcacaacgttccctaccactccaggacgaattagcctttgccgaagatttggttcttgacgaagagggggcaagggccgctggactgggtgagctcggagctgctctgctccaactggtaaggcggctccaagctctgagactggaacgagaggaatatgtgttactaaaggcactggccctggcgaactcagattccgtgcacatcgaagatgccgaagccgtagagcagctccgggaagcactgcacgaggccttgctcgagtacgaggcgggaagagccggacctggtggaggggctgagcggaggcgggcgggaagactcttactaacacttccgttacttaggcagacagctggaaaggtactcgctcatttctatggagtgaaactcgagggaaaggtgcctatgcataaactgtttcttgaaatgttagaggctatgatggactag

SEQ ID NO: 101379 - DNA, 1272 bp, Artificial Sequence
  derived and/or modified sequence
atgtcaagccaggtagtcggaatcgagcctctatatatcaaggccgagcccgctagccctgacagcccaaagggttcaagcgagacagagacagaaccgccagtcgccctggctcccggccctgcaccaacacggtgtctgccaggccataaagaggaagaagatggcgagggcgccggtcccggcgaacagggcggtggtaaactcgttctgagttctctgcccaagcggctgtgcctggtgtgcggcgatgtcgcatctggatatcactacggggttgctagttgtgaagcctgcaaagccttcttcaagcgcaccatccaaggctccattgaatattcgtgcccagcctccaatgaatgtgaaataactaagcggagaaggaaggcgtgtcaggcttgccggttcaccaaatgtctgcgggtgggcatgctaaaggagggggtacggctggatagggtacgcgggggtaggcagaaatataaaagaagaccagaggtcgacccactcccctttccgggaccattcccagcgggacccctggcagtggcgggaggcccccgtaagactgccgcgcccgttaatgctctggtctcacacctcttagtggtagaaccagaaaagctttacgcaatgcccgacccagccggtcctgacggacatctgcccgctgtggcgaccttatgtgatctcttcgacagagaaatagtcgtgactatcagctgggccaaatctattcctggctttagtagcttgtcgttatcagatcagatgtcagttctgcaaagcgtctggatggaagtcctggtcctaggggtcgcccagcggagcctgccgctccaggatgagctggctttcgctgaggaccttgtgttggacgaggagggggcaagggccgccgggttgggggaactgggtgcagccttgctgcagctcgtccggcgcctacaagccctacgactcgaacgagaagagtacgtacttctgaaggctctggctctggctaacagcgatagcgtccacattgaagacgccgaagcggtggagcaattaagagaagcattacacgaggccctcctggagtatgaagccggacgcgcaggaccaggcggtggagccgaacgcagacgagcaggacgtctcctcttaacccttcccttgctgaggcagaccgccggaaaggttctcgcgcacttttatggagtgaaactcgagggcaaagtcccgatgcacaagctgtttctcgaaatgcttgaagcaatgatggattag

SEQ ID NO: 101380 - DNA, 1272 bp, Artificial Sequence
  derived and/or modified sequence
atgagcagccaggtggtgggcatcgagcccctgtacatcaaggccgagcccgccagcccagacagccccaagggcagcagcgagacagaaacagagccccctgtggccctggcccctggccctgcccccacccgctgcctgcccggccacaaggaggaggaggatggagagggcgccggccctggagagcagggcggcggcaagctggtgctgagcagcctgcccaagaggctgtgcctggtgtgtggagatgtggccagcggctaccactatggagtggccagctgtgaggcctgcaaggccttcttcaagaggaccatccagggcagcattgagtacagctgcccagccagcaatgaatgtgagatcaccaagagaagaaggaaggcctgccaggcctgccgcttcaccaagtgcctgcgggtgggcatgctgaaggagggcgtgcggctggacagagtgcggggcggccggcagaagtacaagagaagacctgaggtggaccccctgcccttccctggccccttccctgctggccccctggccgtggccggcggccccaggaagacagctgcccctgtgaatgccctggtgagccacctgctggtggtggagcctgagaagctgtatgccatgccagaccctgctggcccagatggccacctgcctgctgtggccaccctgtgtgacctgtttgaccgggagatcgtggtgaccatctcctgggccaagagcatccctggcttcagcagcctgagcctgagtgaccagatgtctgtgctgcagagcgtgtggatggaggtgctggtgctgggcgtggcccagaggagcctgcccctgcaggatgagctggcctttgctgaggacctggtgctggatgaggagggcgcccgggccgccggcctgggggagctgggcgccgccctgctgcagctggtgcggcggctgcaggccctgcggctggagcgggaggagtatgtgctgctgaaggccctggccctggccaacagcgacagcgtgcacattgaagatgctgaggccgtggagcagctgcgggaggccctgcacgaggccctgctggagtatgaggccggccgggccggccctgggggcggcgctgagcggcggcgggccggccgcctgctgctgaccctgcccctgctgcggcagacagctgggaaggtgctggcccacttctacggcgtgaagctggagggcaaggtgcccatgcacaagctgttcctggagatgctggaggccatgatggactag

SEQ ID NO: 101381 - DNA, 1272 bp, Artificial Sequence
  derived and/or modified sequence
atgagcagccaggtggtgggcatcgagcccctgtacatcaaggccgaaccagctagccctgactctccaaaaggctctagtgagactgaaaccgaacctcctgtggcactggcccccggtcctgcccccactaggtgcttgccagggcataaagaggaggaagacggcgagggcgccggccctggcgaacaggggggtggcaagttggtgctttccagcctgcctaagcgattgtgtctggtgtgtggggacgtggcctccggatatcactacggcgttgccagctgtgaggcctgtaaggccttcttcaagcggacaatccagggcagtatcgaatatagttgcccagctagcaatgagtgtgagatcaccaagcggcgtcgtaaagcttgccaggcgtgtcgatttaccaaatgtttgcgggtgggaatgctcaaagagggggttcgcctggaccgggtcaggggcggaaggcaaaagtacaagcgaagaccggaggttgatcccctccccttccctggaccctttcctgccggaccacttgccgtagcaggcggtccccggaagactgctgcccccgtcaacgcgcttgtatctcacctcctggttgtggaacccgaaaagctgtacgccatgcctgatccagcggggcccgacggacatttacccgccgtggcaacactctgtgacctgtttgacagggagatcgtggtaactataagctgggcaaaaagcatcccggggtttagtagcctctccctttcggaccagatgagcgtgctgcagtccgtgtggatggaagttcttgttctgggcgtggctcagcgaagcctaccacttcaagacgagctggccttcgccgaggacttggtcctggacgaggagggcgctcgggccgcaggactgggtgagctgggagcggccctactgcagttagtcaggcggctccaggctctccgcctcgaacgcgaagagtacgtattgctgaaggccctggccttagctaatagtgacagcgtgcatattgaagatgcagaggctgttgagcaactgcgggaagcattacacgaagctctactggagtatgaagccggacgcgctgggccgggaggtggcgccgaaaggcgaagggccggcaggctgctactgacactgcctctgctccgacagaccgctggcaaagtcctggcgcacttctacggggtgaagttagagggcaaggtccccatgcacaagctgttcctcgaaatgctcgaggcgatgatggactag

SEQ ID NO: 101382 - DNA, 1272 bp, Artificial Sequence
  derived and/or modified sequence
atgagcagccaggtggtgggcatcgagcccctgtacatcaaggccgagcccgcttcacccgactcacctaaagggagtagtgaaaccgaaacagaaccaccggtcgccttagcacctgggcccgcccctacacgctgccttcctggccataaggaggaagaggacggagagggagctggccccggagagcagggcgggggtaagctggtgctctcaagtctaccgaaacgcctgtgtctggtgtgcggggacgtggcatccgggtaccattatggggttgccagctgcgaggcgtgtaaggccttcttcaaacggactatccagggtagtattgagtacagttgccccgcatctaatgaatgcgaaattacgaagcgcaggcggaaggcctgtcaggcgtgtcgttttactaaatgcctccgagttgggatgcttaaggagggcgtgcgcttggacagggttcgcggcgggcggcaaaagtataaacgccgacctgaggtggatccactgcccttccctggcccatttccagcagggccgcttgctgtggcaggcggcccccggaagacagccgcaccggtgaacgccctcgtttcccatttacttgttgtcgagcccgagaaattgtacgctatgccagacccggcgggccctgacggacacttaccggcagtagctacgctttgcgatctgtttgatagggaaattgtggtgactatcagctgggccaagtcaattcctggcttctcatcgctctccctttccgaccagatgtctgtcttgcaaagcgtttggatggaagtgctagtactcggggtcgctcaaaggtcactgcccctgcaggatgaattagctttcgctgaagatctcgtgctggacgaggagggtgcccgagcggcaggattgggggaattaggcgctgccctgctgcagcttgtacgtcggctgcaggcacttcgcctggagcgcgaagaatatgtgctcctgaaagcattagccctcgccaactctgattctgtgcacattgaagacgcagaggcagtggagcagttgagggaggctctgcatgaagcattgctagagtacgaggcaggccgtgctgggccggggggaggggctgaaagacgaagggccggccggcttctgctgactctcccactgctgaggcagactgcagggaaagtcctggcccacttttacggggtcaagttggagggaaaagtcccaatgcacaaactcttcttggaaatgctcgaggcaatgatggattag

SEQ ID NO: 101383 - DNA, 1272 bp, Artificial Sequence
  derived and/or modified sequence
atgagcagccaggttgtcggcatcgaacctctgtacatcaaggcggagccggcttccccggacagcccgaaaggcagcagcgagaccgaaaccgagccccctgtggcactggcgcctggtccagcacctactcgctgtctccctggccacaaggaggaggaagatggcgagggggctggcccaggcgaacagggcggaggaaagctcgtgctctctagcctccccaagcggctttgccttgtgtgcggtgatgtagcaagcggctaccattatggagtagcctcttgtgaggcctgcaaagccttctttaagcgcaccatccaggggtctatagaatatagctgtccggcttctaatgagtgcgagattacaaagcggagaaggaaggcttgtcaggcatgtcgatttacaaagtgcctcagagtgggcatgctgaaggagggggtgagactggacagggtccggggaggcagacagaaatataagcgcaggccagaggtggaccccttaccctttccagggccattcccggctggccctcttgccgtggctggcggacccaggaaaacagctgctccagttaacgccctggttagtcaccttcttgtggtagagcccgaaaagctgtacgccatgcccgacccagccggacccgacgggcacctgcccgctgtggccaccctgtgtgacttatttgaccgtgagatagttgtaacaatttcctgggccaagtccattccagggttttcttcgctgtctctgtctgaccagatgtccgtactgcagtctgtctggatggaagtgctagtgttgggtgtggcacagcggtccctaccgttgcaggacgagcttgcattcgccgaagacctcgttctcgatgaagagggcgctcgagccgctgggctgggtgaactcggcgctgccctgctgcagttggtgaggaggctgcaagccctgagactggaaagggaagaatatgtactcctgaaagctctggcactggcaaactccgactccgtgcacatcgaagatgctgaagctgtggaacaactcagggaggcattgcacgaagctctattagagtacgaagccggaagggcgggtccgggtgggggtgctgaacgacgaagggccggaagactgctattaactcttccattgctgagacagacagcgggaaaagtcctggcccacttctatggcgttaagctggaaggaaaagtgccaatgcacaagctttttcttgagatgctggaggccatgatggactag

SEQ ID NO: 101384 - DNA, 1272 bp, Artificial Sequence
  derived and/or modified sequence
atgtcctcccaagtggtgggcattgaacctctctacattaaagccgaacctgcatctcctgacagtccgaaaggctcgtcagagactgagacagaaccacctgtcgcactcgcaccaggacccgctcccacaaggtgcctacccggtcataaagaggaagaggatggcgaaggtgccggtcctggggagcagggcggaggcaagctcgtgctgtcctctctccctaagagactgtgtttggtctgcggggatgtggcgagcgggtatcattatggggtggcctcttgtgaagcatgcaaagctttctttaagaggacaatccaggggtccatcgaatacagttgccctgctagcaatgaatgcgaaatcacgaagcggagaaggaaagcctgtcaagcctgtcgtttcacgaaatgcctccgagtgggcatgctgaaggagggcgtcaggcttgacagggtgcggggaggcaggcagaagtataagcgtaggcctgaggtcgaccctcttcctttccctggacctttcccagcgggaccactcgctgtcgctggtgggccacggaaaactgctgctcccgtaaatgcactggtctcccatctccttgtggtggagcccgagaagctttatgccatgccagatccggctgggccagacggccacttgcctgccgttgccaccttatgtgatctattcgatcgcgaaatcgtggttacaatctcctgggctaagtcgatccccggattctcgtctttgtccctgagcgaccagatgtccgtattacagagcgtgtggatggaagtgttggttcttggggtggctcagcgatccctccccctgcaggacgaactggcattcgcagaggacctggttctcgacgaagaaggcgctagagccgcagggttgggagagctgggagctgcactcctgcaactcgtcagaaggctgcaagctttgcgattggaacgcgaggaatatgtgctccttaaagcactggccctggcgaactcagactccgtgcatatcgaagatgccgaggcggtggaacagctgcgtgaggcccttcacgaagccctcctcgaatatgaagcaggaagagctggacccggaggcggtgcagaaagaagacgggctgggcgtctgcttctcacacttcctctgctacggcagaccgcgggtaaggtactggcacacttctacggagttaagctcgaggggaaggttcctatgcataagctcttcctcgagatgctcgaggcaatgatggactag

SEQ ID NO: 101385 - DNA, 1272 bp, Artificial Sequence
  derived and/or modified sequence
atgagctctcaggtggtggggatcgaaccgctctatatcaaagccgagcccgctagcccagacagtccaaagggcagctccgagaccgagacagagccacccgtagcactggcacctggacccgcccccacaagatgcctcccaggccataaagaggaggaagatggggaaggggcaggacctggagagcagggcggaggaaaactcgtgctttcaagtctaccgaaacgcttatgcctggtgtgtggggatgttgccagtgggtaccattacggcgtggccagctgtgaggcctgtaaggccttcttcaaaagaaccattcaaggatcaattgaatattcttgccctgcttcaaacgaatgtgaaattacaaagcgccggcgtaaggcgtgccaggcatgcagattcacgaaatgcctccgagtggggatgctgaaggagggcgtccgtctcgatcgcgtaagaggaggacggcagaagtataagcgcaggcctgaagtcgacccactgccctttcctggcccctttcctgcaggccccctggcggtggcagggggtccccgcaagactgccgcccccgtcaacgcacttgtgtcccacctgttggtagtcgaaccggaaaaactgtatgcgatgccagacccagctggtcccgatggacacctgcctgctgtcgccactctgtgtgatctgtttgacagggagatcgtggtcaccatatcttgggctaagtcaatcccagggtttagcagcttgtcccttagcgaccagatgtcagtgctgcagagcgtatggatggaagtactagtgctgggtgtggctcagcgatccttacccctgcaggatgaactcgctttcgcggaagaccttgttcttgatgaggagggcgcccgagctgcgggtttaggagagctgggcgcggcattacttcagctggttagacgactacaggccctccgtctggagagagaagaatacgtactgctcaaggccctcgctcttgcaaacagcgattcagtccatattgaggacgccgaggcagttgaacagctgagggaagcattgcacgaggcattgctggagtatgaggccgggcgagctggacccggcggcggggcggaacgccgccgagccggacggcttttattgaccctgcccctcctcagacagacagccggaaaggttctcgctcacttctacggtgtcaagctggagggtaaagtgcccatgcacaagctgtttcttgagatgctcgaagctatgatggattag

SEQ ID NO: 101386 - DNA, 1272 bp, Artificial Sequence
  derived and/or modified sequence
atgtctagtcaggtagttggcattgagccgctgtacataaaggccgagccagcctctccagactctcccaaaggatcctccgagacggaaaccgaaccacctgtggcactggccccgggccccgcgcctacccgttgcctacctggacacaaagaagaagaggatggcgagggagccggacccggagagcagggggggggcaaactggtcctctcatcactcccaaaacgactctgcctcgtctgtggcgatgtcgcttcagggtatcactatggtgttgcctcctgtgaggcttgtaaggccttcttcaaacgcaccattcagggaagtatcgaatactcatgtccggcctccaacgagtgtgaaattaccaagaggaggaggaaggcttgtcaggcgtgtagattcacaaaatgtcttcgagttgggatgctcaaagaaggagtcaggcttgacagggtcagagggggcaggcagaagtataagaggagacctgaggtggatccgctcccattcccagggcccttccctgccggacccttggccgtagccggtggtccccgcaaaacagctgcaccagtgaatgctttggtttcccatctactagtggtcgaaccggaaaagttatacgcaatgccagatccagccgggccggatggacatctccctgcagtcgccaccctgtgtgacctgtttgatagagagattgtagtcacaatctcctgggccaagtcaatcccaggcttctcctccctgtccctgtctgaccagatgagtgtgttgcagtccgtgtggatggaggtcctcgttctcggggtcgcccaaagatcactacctttacaggacgagctggcttttgcggaagatctagtccttgatgaggaaggggccagggccgccggcttgggggaactgggagcagccctgctgcaactcgtgagacgacttcaggctctccgcctggaacgggaagaatatgtactccttaaagcgcttgctctggccaactccgacagtgtacacatcgaggacgcagaggcggtggaacaacttagggaggctttacacgaggccctcctcgaatatgaagcaggtcgtgctgggcccggcggtggcgcagaacggcgtcgagccggcagactgctactcacactccccctgctccgacagaccgctggcaaggtgttagctcacttttatggagtgaagctggaggggaaagtaccaatgcataaactgtttctcgaaatgttggaggctatgatggattag

SEQ ID NO: 101387 - DNA, 1272 bp, Artificial Sequence
  derived and/or modified sequence
atgagcagccaggtggtgggcatcgagcccctgtacatcaaggccgagcccgccagccccgacagccccaagggcagcagcgagaccgagaccgagccccccgtggccctggcccccggccccgcccccaccagatgcctgcccggccacaaggaggaggaggacggcgagggcgccggccccggcgagcagggcggcggcaagctggtgctgagcagcctgcccaagagactgtgcctggtgtgcggcgacgtggccagcggctaccactacggcgtggccagctgcgaggcctgcaaggccttcttcaagagaaccatccagggcagcatcgagtacagctgccccgccagcaacgagtgcgagatcaccaagagaagaagaaaggcctgccaggcctgcagattcaccaagtgcctgagagtgggcatgctgaaggagggcgtgagactggacagagtgagaggcggcagacagaagtacaagagaagacccgaggtggaccccctgcccttccccggccccttccccgccggccccctggccgtggccggcggccccagaaagaccgccgcccccgtgaacgccctggtgagccacctgctggtggtggagcccgagaagctgtacgccatgcccgaccccgccggccccgacggccacctgcccgccgtggccaccctgtgcgacctgttcgacagagagatcgtggtgaccatcagctgggccaagagcatccccggcttcagcagcctgagcctgagcgaccagatgagcgtgctgcagagcgtgtggatggaggtgctggtgctgggcgtggcccagagaagcctgcccctgcaggacgagctggccttcgccgaggacctggtgctggacgaggagggcgccagagccgccggcctgggcgagctgggcgccgccctgctgcagctggtgagaagactgcaggccctgagactggagagagaggagtacgtgctgctgaaggccctggccctggccaacagcgacagcgtgcacatcgaggacgccgaggccgtggagcagctgagagaggccctgcacgaggccctgctggagtacgaggccggcagagccggccccggcggcggcgccgagagaagaagagccggcagactgctgctgaccctgcccctgctgagacagaccgccggcaaggtgctggcccacttctacggcgtgaagctggagggcaaggtgcccatgcacaagctgttcctggagatgctggaggccatgatggactag

SEQ ID NO: 101388 - DNA, 2215 bp, Artificial Sequence
  derived and/or modified sequence
aagcagccggcggcgccgccgagtgaggggacgcggcgcggtggggcggcgcggcccgaggaggcggcggaggaggggccgcccgcggcccccggctcactccggcactccgggccgctcggcccccatgcctgcccgaccgcgctgccggagccccaggtgaccagcgccatgtccagccaggtggtgggcattgagcctctctacatcaaggcagagccggccagccctgacagtccaaagggttcctcggagacagagaccgagcctcctgtggccctggcccctggtccagctcccactcgctgcctcccaggccacaaggaagaggaggatggggagggggctgggcctggcgagcagggcggtgggaagctggtgctcagctccctgcccaagcgcctctgcctggtctgtggggacgtggcctccggctaccactatggtgtggcatcctgtgaggcctgcaaagccttcttcaagaggaccatccaggggagcatcgagtacagctgtccggcctccaacgagtgtgagatcaccaagcggagacgcaaggcctgccaggcctgccgcttcaccaagtgcctgcgggtgggcatgctcaaggagggagtgcgcctggaccgcgtccggggtgggcggcagaagtacaagcggcggccggaggtggacccactgcccttcccgggccccttccctgctgggcccctggcagtcgctggaggcccccggaagacagcagccccagtgaatgcactggtgtctcatctgctggtggttgagcctgagaagctctatgccatgcctgaccccgcaggccctgatgggcacctcccagccgtggctaccctctgtgacctctttgaccgagagattgtggtcaccatcagctgggccaagagcatcccaggcttctcatcgctgtcgctgtctgaccagatgtcagtactgcagagcgtgtggatggaggtgctggtgctgggtgtggcccagcgctcactgccactgcaggatgagctggccttcgctgaggacttagtcctggatgaagagggggcacgggcagctggcctgggggaactgggggctgccctgctgcaactagtgcggcggctgcaggccctgcggctggagcgagaggagtatgttctactaaaggccttggcccttgccaattcagactctgtgcacatcgaagatgccgaggctgtggagcagctgcgagaagctctgcacgaggccctgctggagtatgaagccggccgggctggccccggagggggtgctgagcggcggcgggcgggcaggctgctgctcacgctaccgctcctccgccagacagcgggcaaagtgctggcccatttctatggggtgaagctggagggcaaggtgcccatgcacaagctgttcttggagatgctcgaggccatgatggactgaggcaaggggtgggactggtgggggttctggcaggacctgcctagcatggggtcagccccaagggctggggcggagctggggtctgggcagtgccacagcctgctggcagggccagggcaatgccatcagcccctgggaacaggccccacgccctctcctccccctcctagggggtgtcagaagctgggaacgtgtgtccaggctctgggcacagtgctgccccttgcaagccataacgtgcccccagagtgtagggggccttgcggaagccatagggggctgcacgggatgcgtgggaggcagaaacctatctcagggagggaaggggatggaggccagagtctcccagtgggtgatgcttttgctgctgcttaatcctaccccctcttcaaagcagagtgggacttggagagcaaaggcccatgcccccttcgctcctcctctcatcatttgcattgggcattagtgtccccccttgaagcaataactccaagcagactccagcccctggacccctggggtggccagggcttccccatcagctcccaacgagcctcctcagggggtaggagagcactgcctctatgccctgcagagcaataacactatatttatttttgggtttggccagggaggcgcagggacatggggcaagccagggcccagagcccttgactgtacagagactctattttaatgtatatttgctgcaaagagaaaccgcttttggttttaaacctttaatgagaaaaaaatatataataccgagctc

SEQ ID NO: 101389 - DNA, 2283 bp, Artificial Sequence
  derived and/or modified sequence
tagaggtctcccgcgggcggggagggggaggcgtagcaactttaggcaacttcccaaaggtgtgcgcaggttgggggcgggacgcggcgccccgggaggtggcggcctctgcgacagcgggagtataagagtggacctgcaggctggtcgcgaggaggtggagcggcgcccgccgtgtgcctgggaccggcatgctggggcaggagggcagccgcgtgtcaggtgaccagcgccatgtccagccaggtggtgggcattgagcctctctacatcaaggcagagccggccagccctgacagtccaaagggttcctcggagacagagaccgagcctcctgtggccctggcccctggtccagctcccactcgctgcctcccaggccacaaggaagaggaggatggggagggggctgggcctggcgagcagggcggtgggaagctggtgctcagctccctgcccaagcgcctctgcctggtctgtggggacgtggcctccggctaccactatggtgtggcatcctgtgaggcctgcaaagccttcttcaagaggaccatccaggggagcatcgagtacagctgtccggcctccaacgagtgtgagatcaccaagcggagacgcaaggcctgccaggcctgccgcttcaccaagtgcctgcgggtgggcatgctcaaggagggagtgcgcctggaccgcgtccggggtgggcggcagaagtacaagcggcggccggaggtggacccactgcccttcccgggccccttccctgctgggcccctggcagtcgctggaggcccccggaagacagcagccccagtgaatgcactggtgtctcatctgctggtggttgagcctgagaagctctatgccatgcctgaccccgcaggccctgatgggcacctcccagccgtggctaccctctgtgacctctttgaccgagagattgtggtcaccatcagctgggccaagagcatcccaggcttctcatcgctgtcgctgtctgaccagatgtcagtactgcagagcgtgtggatggaggtgctggtgctgggtgtggcccagcgctcactgccactgcaggatgagctggccttcgctgaggacttagtcctggatgaagagggggcacgggcagctggcctgggggaactgggggctgccctgctgcaactagtgcggcggctgcaggccctgcggctggagcgagaggagtatgttctactaaaggccttggcccttgccaattcagactctgtgcacatcgaagatgccgaggctgtggagcagctgcgagaagctctgcacgaggccctgctggagtatgaagccggccgggctggccccggagggggtgctgagcggcggcgggcgggcaggctgctgctcacgctaccgctcctccgccagacagcgggcaaagtgctggcccatttctatggggtgaagctggagggcaaggtgcccatgcacaagctgttcttggagatgctcgaggccatgatggactgaggcaaggggtgggactggtgggggttctggcaggacctgcctagcatggggtcagccccaagggctggggcggagctggggtctgggcagtgccacagcctgctggcagggccagggcaatgccatcagcccctgggaacaggccccacgccctctcctccccctcctagggggtgtcagaagctgggaacgtgtgtccaggctctgggcacagtgctgccccttgcaagccataacgtgcccccagagtgtagggggccttgcggaagccatagggggctgcacgggatgcgtgggaggcagaaacctatctcagggagggaaggggatggaggccagagtctcccagtgggtgatgcttttgctgctgcttaatcctaccccctcttcaaagcagagtgggacttggagagcaaaggcccatgcccccttcgctcctcctctcatcatttgcattgggcattagtgtccccccttgaagcaataactccaagcagactccagcccctggacccctggggtggccagggcttccccatcagctcccaacgagcctcctcagggggtaggagagcactgcctctatgccctgcagagcaataacactatatttatttttgggtttggccagggaggcgcagggacatggggcaagccagggcccagagcccttgactgtacagagactctattttaatgtatatttgctgcaaagagaaaccgcttttggttttaaacctttaatgagaaaaaaatatataataccgagctcaaaaa

SEQ ID NO: 101390 - protein, 422 aa, Artificial Sequence
  derived and/or modified sequence
MSSQVVGIEPLYIKAEPASPDSPKGSSETETEPPVALAPGPAPTRCLPGHKEEEDGEGAGPGEQGGGKLVLSSLPKRLCLVCGDVASGYHYGVASCEACKAFFKRTIQGSIEYSCPASNECEITKRRRKACQACRFTKCLRVGMLKEGVRLDRVRGGRQKYKRRPEVDPLPFPGPFPAGPLAVAGGPRKTAPVNALVSHLLVVEPEKLYAMPDPAGPDGHLPAVATLCDLFDREIVVTISWAKSIPGFSSLSLSDQMSVLQSVWMEVLVLGVAQRSLPLQDELAFAEDLVLDEEGARAAGLGELGAALLQLVRRLQALRLEREEYVLLKALALANSDSVHIEDAEAVEQLREALHEALLEYEAGRAGPGGGAERRRAGRLLLTLPLLRQTAGKVLAHFYGVKLEGKVPMHKLFLEMLEAMMD

SEQ ID NO: 101391 - DNA, 1269 bp, Artificial Sequence
  derived and/or modified sequence
atgagttcccaggtggtcggcatcgaacctctatacataaaagctgagccggcttcacccgacagtccaaaaggctcttctgagactgaaaccgagccgcccgtggctctcgctccagggccagccccaacacgatgcttaccaggccataaggaggaggaggatggcgagggtgccggcccaggtgaacagggcggcggcaagctggtcttgtcatctctgcctaagaggctgtgcctggtttgtggggacgtggcatccggatatcactatggtgttgcttcttgcgaagcctgcaaggccttcttcaaacgtaccatccagggtagcattgaatactcttgtccagcgtctaacgagtgtgaaattaccaagcgccgaagaaaagcttgccaggcttgcagattcaccaagtgtttgcgagtgggtatgttaaaagaaggtgtcagactggatcgcgtgagaggggggcgccagaaatacaagagacgtcctgaggtggatcctctgccgtttcctgggcctttcccggccggcccactggcagtggctgggggcccgagaaagactgcaccggttaacgccctggtgtcccatttgcttgtggtggagcccgagaaattgtatgccatgcccgatcctgctggaccagatggccatctgcccgctgttgcaactctgtgcgacctctttgatcgagaaatagtggtcacaatctcttgggctaagtcaatcccaggattttctagcttatcgttgtcagaccagatgtccgtcctgcaaagtgtgtggatggaagttttggtgttgggggtggcccagaggtctttaccactccaagatgaactcgcctttgccgaagatctggtgttagacgaagaaggagcccgggcggccgggctgggcgaactcggagccgccctgttgcagttggtgcggcgattacaggctctccgcctggaacgcgaggaatacgttctcctcaaggctctcgcattagccaacagcgattcggtgcacattgaggatgccgaagcagtagagcagctgagggaagcattacacgaggcacttctcgaatacgaggccggacgggccggacccgggggaggtgccgaacgcagacgcgccgggcgtttactcctgaccctgccgttactcaggcagacagccggaaaggttctggcccatttctatggcgtcaagctggaggggaaggtgcctatgcacaagctcttcttagagatgctcgaggctatgatggattag

SEQ ID NO: 101392 - DNA, 330 bp, Artificial Sequence
  derived and/or modified sequence
atgtccagccaagtggtcggaatagaacccctctacataaaggctgagccggcctccccggactcgccgaaaggtagttccgaaactgaaactgagccaccggtggctctggcccccggacccgcaccaacacgctgtttgcctggtcacaaggaagaagaggacggagaaggggcaggccccggcgaacagggaggcgggaagctagtgctaagcagcttgcccaagcgcctatgtctggtttgtggcgacgtggcaagcggataccactacggagttgccagctgcgaggcatgtaaagcattcttcaagcggaccatacaaggctag

SEQ ID NO: 101393 - DNA, 1269 bp, Artificial Sequence
  derived and/or modified sequence
atgagcagccaggtggtgggcatcgagcccctgtacatcaaggccgagcccgccagcccagacagccccaagggcagcagcgagacagaaacagagccccctgtggccctggcccctggccctgcccccacccgctgcctgcccggccacaaggaggaggaggatggagagggcgccggccctggagagcagggcggcggcaagctggtgctgagcagcctgcccaagaggctgtgcctggtgtgtggagatgtggccagcggctaccactatggagtggccagctgtgaggcctgcaaggccttcttcaagaggaccatccagggcagcattgagtacagctgcccagccagcaatgaatgtgagatcaccaagagaagaaggaaggcctgccaggcctgccgcttcaccaagtgcctgcgggtgggcatgctgaaggagggcgtgcggctggacagagtgcggggcggccggcagaagtacaagagaagacctgaggtggaccccctgcccttccctggccccttccctgctggccccctggccgtggccggcggccccaggaagacagcccctgtgaatgccctggtgagccacctgctggtggtggagcctgagaagctgtatgccatgccagaccctgctggcccagatggccacctgcctgctgtggccaccctgtgtgacctgtttgaccgggagatcgtggtgaccatctcctgggccaagagcatccctggcttcagcagcctgagcctgagtgaccagatgtctgtgctgcagagcgtgtggatggaggtgctggtgctgggcgtggcccagaggagcctgcccctgcaggatgagctggcctttgctgaggacctggtgctggatgaggagggcgcccgggctgctggcctgggggagctgggcgccgccctgctgcagctggtgcggcggctgcaggccctgcggctggagcgggaggagtatgtgctgctgaaggccctggccctggccaacagcgacagcgtgcacattgaagatgctgaggccgtggagcagctgcgggaggccctgcacgaggccctgctggagtatgaagctggccgggccggccctgggggcggcgctgagaggagaagagctggccgcctgctgctgaccctgcccctgctgcggcagacagctgggaaggtgctggcccacttctatggagtgaagctggagggcaaggtgcccatgcacaagctgttcctggagatgctggaggccatgatggactag

SEQ ID NO: 101394 - DNA, 330 bp, Artificial Sequence
  derived and/or modified sequence
atgagcagccaggtggtgggcatcgagcccctgtacatcaaggccgagcccgccagcccagacagccccaagggcagcagcgagacagaaacagagccccctgtggccctggcccctggccctgcccccacccgctgcctgcccggccacaaggaggaggaggatggagagggcgccggccctggagagcagggcggcggcaagctggtgctgagcagcctgcccaagaggctgtgcctggtgtgtggagatgtggccagcggctaccactatggagtggccagctgtgaggcctgcaaggccttcttcaagaggaccatccagggctag

SEQ ID NO: 101395 - DNA, 1269 bp, Artificial Sequence
  derived and/or modified sequence
atgagcagccaggtggtgggcatcgagcccctgtacatcaaggccgaaccggcttcaccagattctcccaagggatcctcagagacagagacagagcccccggtcgccctggcccctgggcccgcccctacacgttgtctgccaggtcacaaagaggaggaggatggtgagggagctgggcctggagagcagggtgggggcaaactggtattatcatcccttccgaagcggctgtgcctcgtgtgcggggatgtggcttcgggataccattacggggtagcctcttgtgaggcttgcaaagccttcttcaagagaaccatccagggctctatagagtacagctgtcctgccagcaacgaatgcgaaatcactaagcgcagacggaaggcctgtcaggcttgcaggtttactaagtgcctgcgtgttggtatgcttaaagaaggagttagactggatagggtgcgagggggcagacaaaagtacaaacggcggccggaggtggatccactcccatttcctgggcccttcccagcaggcccgctggccgttgccggaggccctagaaagacggccccggtgaacgcccttgtctcccaccttttggttgttgaaccagaaaagctatatgcaatgcccgacccagccggacctgacggacacttacccgccgtggctacgttgtgtgacttgttcgacagggaaattgtggtgactattagttgggccaagagtatccccgggttctcatccttgtccctctcagaccagatgtcagtgctgcagtcagtttggatggaggtcctggtgttgggggtggcccagcgatctctgccattgcaggacgaactcgcctttgctgaggatctggtgctggacgaggagggcgccagggccgctgggttgggagagctcggggctgctctactgcaattagttcggcgcctgcaggcacttagactcgagagggaagaatatgtgctcttaaaggcactcgcattagcaaactctgattccgtgcacatcgaagatgctgaagctgtcgaacagctgcgggaggcccttcatgaggccctcctggagtatgaagccgggagggcaggacccggagggggcgctgaaagacgccgggcaggtaggttgctgctaacgctgcctctgctgagacaaacagctggtaaagtgctggcccatttctacggggtcaagctcgaaggcaaagttcccatgcataagctgttccttgaaatgctggaggctatgatggactag

SEQ ID NO: 101396 - DNA, 330 bp, Artificial Sequence
  derived and/or modified sequence
atgagcagccaggtggtgggcatcgagcccctgtacatcaaggccgagccagcgtctcctgattccccgaaaggcagttctgaaacagagacggagcccccagtggcgctcgcacccggacctgccccgaccagatgtctgcctggtcataaagaagaggaggatggggagggagccggccctggggagcagggcggcggtaagctcgtcttaagctccctgcctaagcgtctctgtctcgtgtgtggggacgtggcctctgggtaccactacggtgtcgcgtcctgcgaagcctgtaaggctttcttcaagaggacaattcagggctag

SEQ ID NO: 101397 - DNA, 1269 bp, Artificial Sequence
  derived and/or modified sequence
atgagttcccaagttgtgggaattgaacccctatacattaaggctgaaccggcaagccctgactcgccaaagggatcctccgagacggagacagagccaccagtagccctcgcccctggcccagcgccaactcggtgtcttccagggcacaaagaagaggaggatggggaaggcgctggacccggtgaacagggaggaggaaagctcgttttgtcatccctaccaaaacgactgtgcttggtgtgcggagacgtcgcctcaggctatcattatggtgttgcaagttgtgaggcctgcaaagctttcttcaagagaacgatccagggctcaattgagtattcatgcccagcttcgaacgaatgtgagataactaagcgtcgcaggaaggcatgtcaggcctgtcgatttactaagtgtctgcgagtaggtatgctcaaagagggcgtgagactcgaccgcgtaaggggtggcagacagaaatataaaagacgacccgaagtggatccactcccgttcccgggacccttcccggctggcccattagccgtagcgggaggccctagaaaaactgctcccgtcaatgccctagtctcacatttgcttgtggtcgaaccagagaagctgtacgctatgccagatcccgctggaccggacgggcacctccctgctgttgccaccctttgcgatctgtttgacagagagattgttgtcacgattagttgggctaaaagcatccctgggttttcctctctctctctgtctgatcagatgagcgtgcttcagtcagtgtggatggaggtactggtgctcggtgttgcgcagcggagtctaccactccaagatgagctggccttcgccgaggatcttgtgctagacgaggagggagcccgagctgccggtttgggcgagctgggtgccgctctgctccagctcgttcggagactccaggccctccgtttggagagagaagaatatgtgctcttgaaggcgctagccttggctaactccgatagcgtccacattgaggatgccgaagccgtggagcagctgagggaggccctccacgaagccctcctcgaatatgaggctggcagagcaggtcctggtggcggagctgaacgcaggagagctggcaggctgctcttgactctgcctttgcttcgtcagaccgcaggtaaggtattagctcacttttacggagtgaagcttgaaggtaaggtccctatgcacaagttgtttctggaaatgctggaggcaatgatggactag

SEQ ID NO: 101398 - DNA, 330 bp, Artificial Sequence
  derived and/or modified sequence
atgtcctcccaggtcgtaggcatcgagccactgtatattaaggctgagcctgcgagtccagactcgcccaagggtagttcggagactgaaaccgaaccacctgttgccctggccccaggacccgcaccaacccggtgtctccctggacacaaagaggaggaggatggtgaaggcgcaggtcctggggagcaggggggaggcaaattagtgttgagctctcttcccaagagactctgtctcgtgtgcggggatgttgcatctggttaccactatggagtggcgagctgcgaggcatgtaaggccttttttaaaagaactatccagggatag

SEQ ID NO: 101399 - DNA, 1269 bp, Artificial Sequence
  derived and/or modified sequence
atgagcagccaggtggtgggcatcgagcccctgtacatcaaggccgagcccgccagccccgacagccccaagggcagcagcgagaccgagaccgagccccccgtggccctggcccccggccccgcccccaccagatgcctgcccggccacaaggaggaggaggacggcgagggcgccggccccggcgagcagggcggcggcaagctggtgctgagcagcctgcccaagagactgtgcctggtgtgcggcgacgtggccagcggctaccactacggcgtggccagctgcgaggcctgcaaggccttcttcaagagaaccatccagggcagcatcgagtacagctgccccgccagcaacgagtgcgagatcaccaagagaagaagaaaggcctgccaggcctgcagattcaccaagtgcctgagagtgggcatgctgaaggagggcgtgagactggacagagtgagaggcggcagacagaagtacaagagaagacccgaggtggaccccctgcccttccccggccccttccccgccggccccctggccgtggccggcggccccagaaagaccgcccccgtgaacgccctggtgagccacctgctggtggtggagcccgagaagctgtacgccatgcccgaccccgccggccccgacggccacctgcccgccgtggccaccctgtgcgacctgttcgacagagagatcgtggtgaccatcagctgggccaagagcatccccggcttcagcagcctgagcctgagcgaccagatgagcgtgctgcagagcgtgtggatggaggtgctggtgctgggcgtggcccagagaagcctgcccctgcaggacgagctggccttcgccgaggacctggtgctggacgaggagggcgccagagccgccggcctgggcgagctgggcgccgccctgctgcagctggtgagaagactgcaggccctgagactggagagagaggagtacgtgctgctgaaggccctggccctggccaacagcgacagcgtgcacatcgaggacgccgaggccgtggagcagctgagagaggccctgcacgaggccctgctggagtacgaggccggcagagccggccccggcggcggcgccgagagaagaagagccggcagactgctgctgaccctgcccctgctgagacagaccgccggcaaggtgctggcccacttctacggcgtgaagctggagggcaaggtgcccatgcacaagctgttcctggagatgctggaggccatgatggactag

SEQ ID NO: 101400 - DNA, 330 bp, Artificial Sequence
  derived and/or modified sequence
atgagcagccaggtggtgggcatcgagcccctgtacatcaaggccgagcccgccagccccgacagccccaagggcagcagcgagaccgagaccgagccccccgtggccctggcccccggccccgcccccaccagatgcctgcccggccacaaggaggaggaggacggcgagggcgccggccccggcgagcagggcggcggcaagctggtgctgagcagcctgcccaagagactgtgcctggtgtgcggcgacgtggccagcggctaccactacggcgtggccagctgcgaggcctgcaaggccttcttcaagagaaccatccagggctag

SEQ ID NO: 101401 - DNA, 2218 bp, Artificial Sequence
  derived and/or modified sequence
tcctacaagcagccggcggcgccgccgagtgaggggacgcggcgcggtggggcggcgcggcccgaggaggcggcggaggaggggccgcccgcggcccccggctcactccggcactccgggccgctcggcccccatgcctgcccgaccgcgctgccggagccccaggtgaccagcgccatgtccagccaggtggtgggcattgagcctctctacatcaaggcagagccggccagccctgacagtccaaagggttcctcggagacagagaccgagcctcctgtggccctggcccctggtccagctcccactcgctgcctcccaggccacaaggaagaggaggatggggagggggctgggcctggcgagcagggcggtgggaagctggtgctcagctccctgcccaagcgcctctgcctggtctgtggggacgtggcctccggctaccactatggtgtggcatcctgtgaggcctgcaaagccttcttcaagaggaccatccaggggagcatcgagtacagctgtccggcctccaacgagtgtgagatcaccaagcggagacgcaaggcctgccaggcctgccgcttcaccaagtgcctgcgggtgggcatgctcaaggagggagtgcgcctggaccgcgtccggggtgggcggcagaagtacaagcggcggccggaggtggacccactgcccttcccgggccccttccctgctgggcccctggcagtcgctggaggcccccggaagacagccccagtgaatgcactggtgtctcatctgctggtggttgagcctgagaagctctatgccatgcctgaccccgcaggccctgatgggcacctcccagccgtggctaccctctgtgacctctttgaccgagagattgtggtcaccatcagctgggccaagagcatcccaggcttctcatcgctgtcgctgtctgaccagatgtcagtactgcagagcgtgtggatggaggtgctggtgctgggtgtggcccagcgctcactgccactgcaggatgagctggccttcgctgaggacttagtcctggatgaagagggggcacgggcagctggcctgggggaactgggggctgccctgctgcaactagtgcggcggctgcaggccctgcggctggagcgagaggagtatgttctactaaaggccttggcccttgccaattcagactctgtgcacatcgaagatgccgaggctgtggagcagctgcgagaagctctgcacgaggccctgctggagtatgaagccggccgggctggccccggagggggtgctgagcggcggcgggcgggcaggctgctgctcacgctaccgctcctccgccagacagcgggcaaagtgctggcccatttctatggggtgaagctggagggcaaggtgcccatgcacaagctgttcttggagatgctcgaggccatgatggactgaggcaaggggtgggactggtgggggttctggcaggacctgcctagcatggggtcagccccaagggctggggcggagctggggtctgggcagtgccacagcctgctggcagggccagggcaatgccatcagcccctgggaacaggccccacgccctctcctccccctcctagggggtgtcagaagctgggaacgtgtgtccaggctctgggcacagtgctgccccttgcaagccataacgtgcccccagagtgtagggggccttgcggaagccatagggggctgcacgggatgcgtgggaggcagaaacctatctcagggagggaaggggatggaggccagagtctcccagtgggtgatgcttttgctgctgcttaatcctaccccctcttcaaagcagagtgggacttggagagcaaaggcccatgcccccttcgctcctcctctcatcatttgcattgggcattagtgtccccccttgaagcaataactccaagcagactccagcccctggacccctggggtggccagggcttccccatcagctcccaacgagcctcctcagggggtaggagagcactgcctctatgccctgcagagcaataacactatatttatttttgggtttggccagggaggcgcagggacatggggcaagccagggcccagagcccttgactgtacagagactctattttaatgtatatttgctgcaaagagaaaccgcttttggttttaaacctttaatgagaaaaaaatatataataccgagctc

SEQ ID NO: 101402 - DNA, 742 bp, Artificial Sequence
  derived and/or modified sequence
caggtgtgaaaagctctggaggtgttttcatgagtccgtgcctgtgcgtgtggatgtggggagacctagtgagagtgtgtgtgatcatgagccttgactgagttcgtggatggggtgtgcgctccaggagaagtgtgtgagcacaagtgtgagcaggagtgagcacgggtttgggaaggccggtgcaagtgtgaaagccctcagcagagagcgagcctgcgtgggcttgtggggctcctgagcaccccggtgagtggagtgtgtgaactcggtgtgagcacgtccactggccttgggtctgctctccaatgcagaatacccagatgagggcagggtctcagaggtccccccaacatctggagaaaactgggaagtatcctgctcctggctagggattccaggtgaccagcgccatgtccagccaggtggtgggcattgagcctctctacatcaaggcagagccggccagccctgacagtccaaagggttcctcggagacagagaccgagcctcctgtggccctggcccctggtccagctcccactcgctgcctcccaggccacaaggaagaggaggatggggagggggctgggcctggcgagcagggcggtgggaagctggtgctcagctccctgcccaagcgcctctgcctggtctgtggggacgtggcctccggctaccactatggtgtggcatcctgtgaggcctgcaaagccttcttcaagaggaccatccagggtga

SEQ ID NO: 101403 - protein, 377 aa, Artificial Sequence
  derived and/or modified sequence
MTEVISSLENANYKDHENGTGTNTYAALNSVYLMMNNQMRLLGMETMAWQEIRHAIILLTDGKSNMGGSPKTAVDHIREILNINQKRNDYLDIYAIGVGKLDVDWRELNELGSKKDGERHAFILQDTKALHQVFEHMLDVSKLTDTICGVGNMSANASDQERTPWHVTIKPKSQETCRGALISDQWVLTAAHCFRDGNDHSLWRVNVGDPKSQWGKEFLIEKAVISPGFDVFAKKNQGILEFYGDDIALLKLAQKVKMSTHARPICLPCTMEANLALRRPQGSTCRDHENELLNKQSVPAHFVALNGSKLNINLKMGVEWTSCAEVVSQEKTMFPNLTDVREVVTDQFLCSGTQEDESPCKGGSGELGSLQPLPWLC

SEQ ID NO: 101404 - protein, 325 aa, Artificial Sequence
  derived and/or modified sequence
MGTRSAIAAPRILCSRGLRSGSARATGSGVERSPSAANPTLMTSLRTWPLPWALPSPTCLGPPIPPRRQRIFSFEINVSVAIITFASEPKVLMSVLNDNSRDMTEVISSLENANYKDHENGTGTNTYAALNSVYLMMNNQMRLLGMETMAWQEIRHAIILLTDGKSNMGGSPKTAVDHIREILNINQKRNDYLDIYAIGVGKLDVDWRELNELGSKKDGERHAFILQDTKALHQVFEHMLDVSKLTDTICGVGNMSANASDQERTPWHVTIKPKSQETCRGALISDQWVLTAAHCFRDGNDHSLWRVNVGDPKSQWGKEFLIEKA

SEQ ID NO: 101405 - protein, 506 aa, Artificial Sequence
  derived and/or modified sequence
MGTRSAIAAPRILCSRGLRSGSARATGSGVERSPSAAIFSFEINVSVAIITFASEPKVLMSVLNDNSRDMTEVISSLENANYKDHENGTGTNTYAALNSVYLMMNNQMRLLGMETMAWQEIRHAIILLTDGKSNMGGSPKTAVDHIREILNINQKRNDYLDIYAIGVGKLDVDWRELNELGSKKDGERHAFILQDTKALHQVFEHMLDVSKLTDTICGVGNMSANASDQERTPWHVTIKPKSQETCRGALISDQWVLTAAHCFRDGNDHSLWRVNVGDPKSQWGKEFLIEKAVISPGFDVFAKKNQGILEFYGDDIALLKLAQKVKMSTHARPICLPCTMEANLALRRPQGSTCRDHENELLNKQSVPAHFVALNGSKLNINLKMGVEWTSCAEVVSQEKTMFPNLTDVREVVTDQFLCSGTQEDESPCKGESGGAVFLERRFRFFQVGLVSWGLYNPCLGSADKNSRKRAPRSKVPPPRDFHINLFRMQPWLRQHLGDVLNFLPL

SEQ ID NO: 101406 - DNA, 1134 bp, Artificial Sequence
  derived and/or modified sequence
atgacagaagtgatttcctctctcgaaaacgccaactataaagaccacgaaaatggaaccggcacaaatacttacgccgcactcaatagcgtttacctgatgatgaacaatcagatgcgactgctgggcatggaaactatggcatggcaggagattcgtcacgctatcatcctgctgactgatggaaaatctaacatgggcggatcacccaagacagcagttgatcacatcagagagatccttaatataaatcagaagcgcaatgactacttggacatttacgctatcggggtcggcaaattggacgtggattggcgcgagctgaacgagctgggcagtaaaaaagacggagaaagacatgcgttcattttacaggataccaaagctctccatcaagtgttcgagcacatgctggatgtgagcaaactgacagatacaatatgcggcgtgggcaacatgtcagccaatgcctccgaccaagagcggacaccatggcatgtgacaattaagccgaagtcccaggagacatgcagaggagcactgatttccgaccagtgggttttaaccgctgctcactgctttcgagacggcaacgaccattctctttggcgagttaacgtcggagatccaaaatctcagtgggggaaggagtttttgattgaaaaggcggtcatctcaccagggttcgatgtgtttgctaagaaaaaccagggcatcctggagttctatggggatgacattgctctccttaagcttgcccagaaagtcaaaatgtccacacatgcgcgaccaatttgcttaccatgcaccatggaggctaatctggccctccgtcgacctcagggatcaacctgcagagaccacgagaacgagctgttaaacaaacagtctgtgccagcacactttgtggctctgaatggatcaaagctgaacatcaacctgaagatgggggtggaatggacaagttgtgcagaggtcgtttcccaagagaagactatgttcccaaacctcactgacgttcgagaagtggtaaccgaccagtttttatgctccgggactcaagaagacgaaagtccctgtaagggcggcagtggagagctaggctccctccagccgctcccctggttatgttag

SEQ ID NO: 101407 - DNA, 978 bp, Artificial Sequence
  derived and/or modified sequence
atggggacccggagcgccattgccgccccacgaatcctgtgtagcagggggctgcggagcggctccgcacgcgctaccggctcaggcgtggagcggtctccatcagccgctaatcctactctgatgaccagtctgagaacctggccccttccatgggctctgcctagtccaacctgtctgggaccaccgataccacccagacgccagagaatatttagcttcgagataaatgtgtccgtggctattatcaccttcgctagtgaaccaaaagtgctgatgtccgtcctaaacgataattctagagacatgaccgaagtcatttctagcctggagaacgccaactataaggatcacgagaatggcactggcactaatacatacgccgctctgaactctgtctatctgatgatgaacaaccagatgcggctgttgggtatggaaaccatggcctggcaggagatcagacacgctattattttactgacagacgggaaatcgaatatgggcggtagccccaaaacggcagtggaccatattcgggagatccttaatataaaccaaaaacggaacgactacctcgacatttatgctattggagtcggtaagctagacgtagactggagagagctcaacgaattgggatctaagaaagacggagagaggcatgctttcatactgcaggatacaaaagcactgcatcaagtatttgagcatatgttggatgtgagcaagctcactgataccatctgtggcgtgggtaatatgtcagctaacgcatcggaccaagaacgtaccccctggcacgtcactattaagcccaaaagccaagaaacctgcaggggagcgctgatctcggaccaatgggtgttaactgccgcccactgtttccgggacggcaatgatcatagtctctggagggttaacgttggggatccaaaatctcaatgggggaaggaattccttatagagaaggcctag

SEQ ID NO: 101408 - DNA, 1521 bp, Artificial Sequence
  derived and/or modified sequence
atggggaccaggtccgccatcgctgctccacgcattctctgcagcagggggttacgttcaggcagcgcacgagcaacaggttccggagtggagcgatctccaagcgctgccatcttttcatttgagatcaacgtctccgttgccataatcaccttcgcatctgagcccaaggtgctcatgtccgttctcaatgacaattctcgcgacatgactgaggtcataagttccctcgaaaacgcgaactataaggaccacgaaaatggcactggaaccaatacatatgctgccctgaacagcgtatatctcatgatgaataatcagatgcgtctgctaggaatggaaacaatggcctggcaggagatcaggcatgccattatattgctgacagacggcaaatcaaacatggggggatctcccaagaccgccgtagaccatattagggaaatactgaacatcaaccagaaacgaaacgattatctggacatctacgctattggcgtaggtaagctggacgtcgactggcgcgagctgaatgagttgggatcaaagaaagacggtgagcggcatgcctttatcctgcaagatactaaggcactgcaccaggtgttcgaacacatgctggacgtgtctaaactcaccgacacaatctgtggtgtgggcaatatgtccgccaacgccagtgaccaggaacggactccttggcacgtgacaatcaagccaaagagccaggagacctgccggggagccctgatctctgaccaatgggtgctcaccgcagcccattgctttcgcgatggcaacgatcactcactctggcgtgtgaacgtaggtgatccaaagtcccagtggggtaaggagtttctcatcgagaaggcagtgatcagtcctggcttcgatgtattcgccaagaagaatcaggggattcttgagttctacggggacgacattgctctgttaaaattagcacagaaagttaaaatgagcacccacgctaggccgatttgtcttccttgcactatggaagcaaacctggcactcagaaggcctcaggggtccacttgtcgcgaccacgaaaacgaactgctgaacaagcagtctgtgcccgcccacttcgtagccctcaatggctctaagctcaatatcaatcttaaaatgggcgtggaatggactagctgcgccgaagtagtgagccaggaaaagacaatgttcccgaatctaactgatgtgagggaggtggtgacagaccagttcctgtgttccggaactcaagaagatgagtcaccttgtaagggggaatccggtggggccgttttcctggagcgtcgttttcgctttttccaggtaggactggtgagctggggcctgtacaacccctgcctcggttcagccgataaaaactcgagaaagcgggctccgcggtccaaagttccacctcccagggattttcatatcaacctctttcgcatgcagccatggttgcggcaacacctgggcgacgtcttaaacttcctgcctctttag

SEQ ID NO: 101409 - DNA, 1521 bp, Artificial Sequence
  derived and/or modified sequence
atggggacacgttcagctatcgccgccccaagaattctgtgttccagggggctcagaagtgggtcagcacgggcaaccggaagcggcgtcgaacggtccccatcagccgccattttctcatttgagatcaacgtgtctgtcgcgattattacttttgcatcagaacctaaggtactgatgagcgttttgaatgacaatagcagagatatgactgaagttatcagctccctcgagaatgccaactataaagaccatgagaacggtacagggaccaacacttatgcggcgctcaacagtgtgtacctaatgatgaataatcagatgcggttattgggtatggaaaccatggcatggcaggagatccggcacgcaatcatcctgctgactgatggcaagtccaatatgggcggatcaccgaagaccgcagtggatcatatacgcgagatcttaaacattaatcagaagcgcaatgactatctggatatctacgcaatcggcgtcggcaaactggatgtcgactggcgcgagcttaatgagctggggagcaaaaaggatggggaaagacatgccttcattctccaggataccaaggcgctccatcaggtgtttgaacacatgctggacgtttcaaagctgaccgacaccatatgtggggttgggaatatgtctgccaacgcaagtgaccaggagagaacaccttggcacgttactatcaaaccaaagtcacaagaaacctgtcggggcgcactgattagcgaccagtgggtacttacagccgctcactgcttccgcgatggaaatgaccactctctttggcgggtcaatgttggcgaccccaagtctcaatgggggaaagagttcctgatcgagaaagcagtgatctcccctggcttcgacgtgttcgccaagaagaaccagggcatactggagttctatggagatgatattgccctgctgaagctagcgcagaaagtaaaaatgtccacccacgcccgcccaatctgtctgccctgtacaatggaagcgaatctggccctgcggcggccccaaggcagtacttgtcgggatcatgaaaatgagctcttgaacaaacagagtgtcccggcccacttcgtcgccctgaatggcagcaaactgaacatcaacctgaagatgggggtggagtggaccagttgcgccgaggttgtcagtcaagaaaaaactatgtttcccaacttaactgatgtgagggaagtcgtaaccgatcagttcctgtgctccggcacccaggaggatgagtcaccatgcaagggagagtccggcggagctgtgtttttggaaagacggttccgcttcttccaggttggtctcgtctcttgggggctctacaatccctgtctgggctcggctgacaaaaacagtcgcaagcgggcgccgagatctaaggtccccccgccacgtgattttcatatcaatctgttccgcatgcaaccctggctgcggcagcatctcggggatgtgctgaacttcctgccactgtag

SEQ ID NO: 101410 - DNA, 1521 bp, Artificial Sequence
  derived and/or modified sequence
atgggtacccggagtgctatcgcggccccccggattctctgtagtcgaggactccggagtggttctgctagagcgacaggttcaggggtggagcgtagcccctcagccgccattttttcatttgaaatcaatgtttccgtggctattataaccttcgcaagcgagcctaaggtcttgatgtctgtgctgaatgataattctcgagatatgaccgaagtgattagtagccttgagaacgctaactacaaggaccacgagaatggaaccggcaccaacacttacgcagccctcaactccgtttatctgatgatgaacaaccaaatgcggcttcttggtatggaaacgatggcttggcaggagattcgccacgccataatcctgttaactgatggaaagtccaatatggggggaagccccaaaactgccgtggaccatattagggagattttgaacataaaccagaagcggaatgattatctcgacatatatgcaattggcgtgggcaagctggacgttgattggcgggagctgaatgagctcggcagtaaaaaagacggagaaagacatgcttttattcttcaagatactaaggccttgcaccaagtctttgagcatatgcttgacgtgtccaagctgacggacacgatctgcggcgttggaaatatgtccgccaatgcgtccgatcaagagcgcacgccatggcacgtgaccatcaaacccaaatcccaggagacatgccgaggcgccctgattagcgaccagtgggtcctgacggctgcgcattgttttagggatgggaacgaccattctctttggagggttaacgttggggacccaaagagtcaatgggggaaagagttcttaattgagaaggctgtcattagccctggctttgacgtcttcgcgaagaagaatcaagggatcctggaattctatggggatgatattgccttactgaagctggcacagaaggtcaaaatgtctacacacgctagaccgatttgcctgccctgcaccatggaggcaaacctcgccttaaggcgacctcaggggtccacatgccgcgaccacgaaaatgagctcctgaacaaacaatccgtgcccgcgcactttgttgctctcaatggcagtaagctgaatattaacttgaaaatgggggttgaatggacctcctgcgctgaggtagtatctcaggagaagaccatgttccctaatcttacagatgtgcgagaagtggtgactgaccaattcctgtgttctggaacacaggaagacgaatccccgtgtaagggggaatcaggcggtgcggtgttcttagagagacggtttagattcttccaggtcgggctggtgagttgggggttatataacccgtgcctgggttccgccgacaaaaactctcggaagagagcacctagatcaaaggtacccccaccccgtgattttcatatcaacctcttccggatgcagccatggctccggcagcatttgggagatgttcttaacttccttccactgtag

SEQ ID NO: 101411 - DNA, 1134 bp, Artificial Sequence
  derived and/or modified sequence
atgacggaggtaattagctcactcgagaacgcaaattataaggatcacgagaacggaacaggtacaaatacttacgctgccctcaactccgtgtacttgatgatgaacaaccagatgcgcttgctcggcatggagacaatggcttggcaagaaattcggcacgctataattctcctaactgacggcaagtcaaacatgggcggaagccccaagaccgccgtcgaccatatcagagagatactaaacataaaccagaagcggaatgattacctggacatttatgccatcggagtcggcaagctggatgtcgattggagggagctgaatgagttaggctctaaaaaggacggcgagaggcacgcctttatccttcaggatactaaggccctgcatcaggtcttcgagcacatgctggatgtatccaagctcacagacactatctgcggcgtgggtaacatgagtgctaacgcttccgatcaggagcgaacaccctggcacgttacaattaaaccaaagagccaggaaacatgcaggggggctctcataagcgaccagtgggttctgacggccgctcactgcttcagggatggcaacgaccactcactgtggagagtgaacgttggcgatcctaaaagccagtgggggaaagaatttcttattgagaaggcagttatttcccccgggtttgacgttttcgccaaaaagaatcaaggcatcctggagttttatggagacgacattgctctcctgaaactggcacagaaggtgaagatgtcgactcacgcaagacctatctgccttccgtgtaccatggaagctaacttagccttgcggcggccacaaggaagcacctgccgcgatcatgaaaatgaactgctgaacaagcaatctgtaccggcccacttcgtggccctgaatggctctaaactgaatattaatctcaaaatgggggtcgaatggacttcctgcgctgaagtggtcagccaggagaagaccatgtttcctaatctgactgacgtcagagaagtggttactgaccagttcctctgcagcggaacccaggaggacgagagcccgtgcaaaggagggagcggcgagctgggatcactccagccgctgccatggctttgttag

SEQ ID NO: 101412 - DNA, 978 bp, Artificial Sequence
  derived and/or modified sequence
atgggaaccaggtctgccatagccgccccacgaatactctgctccagaggactgagatccggcagtgccagggcaaccggatccggagtggaacgttcaccgtccgcggcaaatccgaccctgatgacctccttacgaacgtggccactgccctgggcccttccaagcccaacctgcttgggcccccctatcccccctcggcgccagcggatcttctctttcgagattaacgtgagcgtagccatcatcacctttgcgagcgagcctaaagttctgatgtctgtactaaacgataactcgcgcgatatgacggaggtgatctccagcctggagaatgctaactataaagatcacgagaacgggaccgggaccaacacatacgccgctctgaattccgtttatctgatgatgaataaccagatgaggctactcggcatggagactatggcatggcaggaaattaggcatgccatcatcctcctgaccgacggcaagagcaatatgggtggcagccccaaaaccgcagttgaccatatacgcgaaatcttgaatatcaaccagaaacggaacgactatctggatatatacgcaattggtgtgggtaagttggatgtggactggcgagagctaaacgagctgggtagtaaaaaggatggtgaacggcatgcgttcatcttgcaggatacaaaggctcttcaccaagtgtttgagcacatgctcgatgtatctaaactgacggatactatttgcggtgtggggaatatgagtgcaaatgcaagcgatcaagaaagaactccgtggcacgtaactatcaaacctaagtcccaagagacgtgtcgcggcgcgctcatttccgatcagtgggtgctcactgctgcgcattgcttccgagacggcaatgatcactccctgtggcgggtgaacgttggcgaccccaagagtcagtggggcaaggaattcctgattgaaaaagcttag

SEQ ID NO: 101413 - DNA, 1521 bp, Artificial Sequence
  derived and/or modified sequence
atgggaacaagaagcgccatcgcagcccctcgtattctgtgttctcgcgggttgcggtccggttctgctcgcgcgaccgggtctggcgttgaacgcagccccagcgctgcaatcttctcctttgaaattaatgtgtcagttgccatcatcacattcgctagcgagcctaaggtcctaatgtctgtcctgaatgacaatagtagagacatgaccgaggtcattagcagtcttgaaaacgctaattataaagaccacgaaaatgggacaggtactaacacatacgcagcgctgaatagtgtataccttatgatgaacaatcagatgcggcttctgggtatggagaccatggcctggcaggagatccggcatgcgatcatcttgttgaccgatgggaagtccaatatgggggggtccccaaagacagcagtagatcacatccgcgaaattttaaacatcaaccagaagcggaacgactacctggacatttacgcgattggcgtgggcaagctagacgtcgattggcgtgagttaaacgaactcggatctaaaaaggacggcgagcggcatgccttcatcttacaagataccaaggccttacatcaggtgttcgaacatatgttggacgtgtctaaactgacagacacaatctgtggggtgggaaatatgtccgccaacgctagcgaccaggaaagaaccccctggcacgtgactatcaaacctaagtctcaggagacatgccgaggggctctgatatctgaccagtgggttctgacagccgctcactgctttagagatggtaatgaccattctctgtggagagtgaacgtgggagatccaaagagccagtggggaaaagagttcctaatagagaaggcagtgattagcccagggtttgacgttttcgctaagaagaaccagggaatactcgagttttatggagacgatattgctctgcttaagctggcccaaaaggtgaagatgtcgacccacgcccggcctatttgcttaccctgtacaatggaagccaatctcgctctgaggcggccccagggctcaacatgccgcgaccatgagaacgagctgctgaataaacagagcgtccccgcccactttgtcgcgttgaatggctccaagctgaatatcaatttgaagatgggagtggagtggaccagttgcgctgaggtagtatcccaggaaaagacaatgttcccaaatctgaccgatgtgcgcgaggtagttaccgaccaattcctgtgttctggcacccaggaagacgaaagcccatgcaaaggggagagtggtggcgctgtgttcctggagcgccgattcagattctttcaggtggggctggtgagttgggggctgtacaacccttgtctcggctccgcagacaaaaattctcgaaaacgcgccccccgctctaaggtacccccaccccgcgactttcacatcaacctgttccggatgcagccatggctgcggcaacatcttggtgatgtcctaaatttcctaccgttatag

SEQ ID NO: 101414 - DNA, 1521 bp, Artificial Sequence
  derived and/or modified sequence
atgggcaccagatctgccattgcggctcctaggattctgtgcagtcggggtctaagatccggcagcgctcgggccaccggttccggagtggagagaagcccctccgctgcaatcttctcctttgagataaacgtgagcgtggcaataattacttttgctagtgaacccaaagtactgatgtcagtcttgaacgataactccagagacatgactgaggtgatcagcagcctggagaacgccaattacaaggatcatgaaaacgggactggcaccaatacctatgcagctctgaattctgtatacctgatgatgaacaatcagatgcgcttgctgggtatggaaacaatggcatggcaggaaatcaggcacgctataatcctcctgacagatgggaaatccaacatgggtgggagccccaagactgctgttgatcacattagagaaatcctgaatataaatcaaaaacggaacgactatttggacatttacgcaattggtgtgggtaagctggacgtcgattggcgcgagttgaacgaactagggagcaaaaaagacggtgaacggcacgcatttatactccaggacacaaaggcacttcaccaggtttttgaacacatgctggacgtgtccaagttgacggataccatttgcggcgtcggaaatatgtctgcaaacgccagcgatcaggaacgaacaccctggcatgtgacgatcaagccgaaaagccaggagacatgcagaggcgccctgattagtgaccagtgggtgctgacagctgcgcactgttttcgggatgggaatgaccatagcctttggagggtgaatgttggcgatcccaagtcccagtggggcaaggaattccttattgaaaaggcggttatctctcccggttttgatgttttcgccaaaaaaaaccagggaatcctggagttctatggagacgacattgccctgctgaaactcgcccagaaggtgaaaatgtccacccacgcccgaccgatttgcctcccgtgcaccatggaagccaatctggctctgcggcgccctcaaggatctacctgtagagaccacgaaaacgaattactgaataaacagtctgtcccagcacattttgtggctcttaacggaagtaaacttaatatcaacctcaagatgggcgtagagtggacctcttgtgcagaggtggtgagtcaggagaaaactatgtttccaaatctgacggacgtgcgcgaagtggtcactgaccagttcctttgttccggaacacaggaggacgagagcccttgtaaaggagagtctggcggagcagtgttcctggaacggagattccgcttcttccaggtgggcctcgtttcctgggggctgtacaatccctgtctcgggtcagcagataagaacagccgtaagagagctccgcgttcaaaggttcctcctcccagggacttccacattaacctctttcggatgcagccctggctgcgacagcatctcggcgatgtcctcaatttcttacccctgtag

SEQ ID NO: 101415 - DNA, 1134 bp, Artificial Sequence
  derived and/or modified sequence
atgacagaggtgatatcctcactggaaaatgccaactacaaggatcacgaaaatggcactggtaccaatacctatgccgccctgaacagcgtgtatctgatgatgaataatcaaatgcgccttctcggaatggagaccatggcttggcaagagatccggcacgcaatcattctgttgacagacgggaagtcgaatatgggaggatccccgaagaccgctgttgaccatatcagggagatcttgaacattaaccagaagagaaatgattacttggatatttatgccatcggcgttggcaagttggatgtggactggcgcgagctgaacgaactcggaagcaaaaaggacggcgagagacacgcctttattttgcaagacacgaaagccctgcaccaagtgttcgaacatatgctcgatgtgtctaagctgacagatactatctgcggtgttggaaatatgagcgccaacgcgtccgatcaggagcgaaccccgtggcatgtcacaattaagcccaaaagccaagaaacttgtcggggtgccctcattagcgatcagtgggtcctcacagctgcccattgcttccgcgatgggaatgaccattcactttggcgggtcaacgtcggagaccctaagagccagtggggcaaggagttccttatagaaaaagcagtcatttccccgggatttgatgttttcgctaaaaagaatcaggggattctagagttctacggagacgatatcgcactccttaaactggctcagaaggtgaagatgagcactcacgcccgaccaatctgtctgccgtgtacaatggaggccaatctggcactgcgccggccacagggctccacatgtagggatcatgagaatgaactgctcaacaagcagtccgtccccgcacatttcgtcgctctgaacgggtctaagctgaatataaacttgaagatgggagtcgaatggaccagttgcgcagaggtggtcagccaagaaaaaactatgttccccaacctgaccgatgttagagaggtggtgaccgatcaatttctgtgcagtggaactcaagaggatgaatccccctgcaaaggcggatccggagagttgggaagcctgcagccgctcccctggctgtgctag

SEQ ID NO: 101416 - DNA, 978 bp, Artificial Sequence
  derived and/or modified sequence
atggggactcgcagtgcaattgctgcacctaggattctgtgctccaggggcctgcgctctgggtccgcccgcgccactggctccggtgtcgagcgatctcccagcgcggccaacccgaccttaatgaccagcttgaggacatggcccttaccttgggctctgcccagtcctacctgcctgggaccccccatcccccccagacgccaaagaattttctccttcgaaataaatgtgtcagttgcaattatcacattcgcctcagaacccaaggttctaatgtctgtgctgaatgacaacagtcgcgacatgaccgaagtgatttcctcacttgagaatgcaaactataaggaccatgagaacggcactggtactaacacctatgctgctttgaactcagtttacctgatgatgaataaccagatgcgcctgttaggcatggagaccatggcctggcaagaaatcagacacgcaattattcttctcaccgatggcaagtccaatatgggcggcagtcccaaaacagcggtggaccatattagggagatcctcaacattaaccagaagagaaacgactacttggatatctacgccattggtgtaggcaaactggacgtggattggcgcgaactgaacgagctcggaagcaaaaaagatggcgagcgacacgccttcatcctgcaggacactaaggctctgcatcaggtgtttgagcacatgttagatgtatccaagctgacagacacaatttgtggagtgggcaatatgtccgctaatgcatccgatcaggaacggacaccctggcatgttacaataaagcccaagtcacaggagacatgtcgcggcgcactgattagcgaccaatgggtgttaacggccgctcattgctttagagacggcaatgatcactctctgtggcgggtgaacgttggggaccccaaaagccagtggggaaaggagttcctgatcgagaaagcgtag

SEQ ID NO: 101417 - DNA, 978 bp, Artificial Sequence
  derived and/or modified sequence
atgggcacaaggtccgccatcgccgctccacgcatcctgtgtagccgggggctaagaagcggctccgcccgagctaccgggtccggggtcgagcgaagtcctagcgccgctaaccccaccctcatgacctcactcaggacctggccactgccctgggctctgcctagcccaacttgcctcgggccacctatacctccaagacgccaacggatcttctcttttgagatcaatgtatccgtggcaatcattacattcgccagtgaacccaaagtgttgatgtctgtgctaaacgacaacagccgcgacatgaccgaggtgatctctagtttggaaaacgccaattataaagatcacgaaaacggcacaggaactaatacatatgccgccctgaattctgtgtatctcatgatgaacaatcaaatgcgtctcttaggcatggagacaatggcctggcaggagataagacacgccataattctgctgacagacggaaagtcaaacatgggtgggagcccaaaaacggctgttgatcacatccgggagatcctgaatattaaccagaaaagaaatgattatctggacatttacgctataggcgtaggcaagctcgatgtagactggcgggaactgaatgagctcggatcaaagaaagatggcgaacgacacgctttcatattgcaggatacaaaggccctccaccaggtctttgagcacatgctcgacgtatccaaactcacagatacaatatgcggtgtcggcaatatgtccgcaaatgcttccgaccaggaaaggactccttggcatgtaaccattaagcccaagtctcaggagacttgccgcggcgcacttattagtgaccagtgggtcctcacagccgcacattgtttccgagacgggaatgaccatagcctgtggagggtcaacgtaggtgaccccaagagccagtggggcaaggaattcttgattgaaaaggcttag

SEQ ID NO: 101418 - DNA, 1521 bp, Artificial Sequence
  derived and/or modified sequence
atgggaactagatcggccatagctgctcctagaattctgtgcagcagaggactcaggagcgggagcgcacgagccactgggtccggtgttgaacgatccccgtctgccgccatttttagtttcgaaatcaacgtgagcgttgcaatcatcacattcgcctccgagcctaaggtgcttatgagcgtgcttaacgataattcccgcgacatgaccgaagtaattagctccctggaaaatgctaactataaggaccatgaaaacggcacaggaacaaacacttacgcggcgctaaattctgtttatctcatgatgaataatcagatgcgactcctgggcatggagaccatggcatggcaggagattaggcatgcaatcatactactcacagacggtaagtcaaatatggggggcagcccgaagactgcggttgatcatattagggagattctgaatataaatcagaaacgtaatgactatttggacatttatgccatcggcgttggcaagctggacgtcgattggcgagaactgaatgagctcggcagcaaaaaagacggagagcggcatgcattcatcctccaggataccaaggctctgcatcaggtctttgagcacatgctggacgtatctaaactaaccgacactatatgtggagtgggtaacatgtctgctaatgcctcggaccaggaaagaacaccatggcacgtgacaattaagcctaagtcacaggagacatgtcggggtgccctgatcagcgaccagtgggtgttgaccgctgcacattgttttcgggatggaaatgaccattccctgtggcgggtgaatgtcggagatccaaagagtcaatggggtaaagagttcctgatcgaaaaagctgttatttcgcctggtttcgacgtgttcgcgaaaaagaatcagggcattttggaattctacggagatgacatagccctactgaaattagcgcagaaggtgaagatgagtacccatgctcggcccatctgtctgccctgcacaatggaggcgaatctcgccctgaggaggccccaaggctcaacgtgcagggaccatgagaacgaactcctcaataagcagtccgtgcccgcccatttcgtcgcccttaacgggagtaaactgaacattaacttaaagatgggggttgaatggacatcttgtgctgaagtagtgtctcaggagaagactatgttccctaacttgacagatgtccgcgaagtcgtgaccgatcaattcttatgttccgggacacaggaggacgaatcaccctgcaagggcgaatctgggggagccgtattcttggagagaagatttcggttcttccaggtaggcttggtctcctggggcttatacaacccttgcctgggtagtgccgacaagaactcccgtaagagagccccacgctccaaagtcccgccacctcgcgatttccacattaatcttttccggatgcagccatggttgagacagcacctgggagacgtgcttaactttttgcccctgtag

SEQ ID NO: 101419 - DNA, 978 bp, Artificial Sequence
  derived and/or modified sequence
atggggactagaagtgccatcgccgccccccgcattctgtgcagcagagggcttagaagcggctctgccagggctactggcagcggcgtggagcggagcccttccgctgctaacccgacgttaatgacctcattgcggacgtggcctctgccctgggcactccctagtcccacgtgcctgggccctccaattcccccaaggaggcagaggatattttcattcgagatcaatgtctcagttgccataattacgttcgcgtctgagccaaaagtgctcatgtctgtcttgaacgacaacagccgagacatgacagaagtcatttcgagtcttgaaaacgccaactacaaggatcacgaaaacgggactggcacaaatacctacgcggcattgaattcagtctacttaatgatgaacaatcagatgcgattgctgggaatggaaacgatggcatggcaggagatacggcatgctattattctcctgaccgacggcaagagcaacatgggagggagccccaagacagccgtggaccatatcagagagatcctgaacatcaaccagaaaaggaatgattacctagatatctacgccatcggagtgggcaagttggatgtggactggcgggagctgaacgaactggggagtaagaaggacggggaaaggcacgctttcatactgcaagacaccaaagcactacaccaggtgtttgagcacatgctggacgtgagcaagctgactgacacaatttgcggcgtgggcaacatgagcgccaacgctagcgaccaggagcgaacgccttggcatgttaccattaagccaaaatcccaggaaacctgtagaggcgctctgatatctgaccagtgggtgctaacagctgcacactgtttcagggacgggaatgatcacagcctgtggcgcgtaaatgtcggcgacccaaagtcacaatggggcaaggagttcctgatcgagaaagcctag

SEQ ID NO: 101420 - DNA, 1134 bp, Artificial Sequence
  derived and/or modified sequence
atgaccgaggtgatctccagcctggagaacgctaactataaggaccacgagaatggaacaggaaccaatacctacgccgcactgaatagcgtgtacctaatgatgaacaatcaaatgcggctcttgggtatggagactatggcgtggcaggaaatccgacacgccatcatcctgctgacagacgggaaaagtaacatgggcggctcacctaagacagccgttgaccacatcagagagatccttaacattaaccagaagaggaacgattatcttgacatctatgccataggcgttggcaagctcgatgttgactggcgggagctgaacgaactcggatcaaaaaaggacggggaacggcacgcgttcatactgcaggatactaaggcgctccaccaggttttcgagcatatgctggacgtgagcaagttaacagacaccatctgtggagtggggaacatgtccgctaatgcgagcgaccaagagcgaaccccctggcacgtgacaatcaaacccaagagccaagagacatgcagaggagctctcattagcgatcagtgggttctgacagcggcacactgtttccgcgacggtaatgaccactccctttggcgggttaatgtgggagatcccaaaagtcagtgggggaaggaatttctcattgaaaaggctgtgattagtcctgggttcgacgtgtttgctaagaagaatcagggtatcttggaattctacggagatgacatcgcactcctgaagctggcccagaaagttaagatgtctacacacgctcgacctatatgcctgccatgtacaatggaagcgaatctggctctcagacgcccacaggggagcacctgccgagatcacgagaatgagctcttaaacaagcaatccgttcctgctcatttcgtggctttaaacgggtccaaactgaacattaatctgaagatgggcgtggaatggactagctgtgctgaggttgtgagccaggagaagaccatgttcccaaatcttacagacgtgagggaagtcgtgacggaccaatttttgtgctccggcacccaggaagatgagtccccttgcaaaggcggtagcggcgagctcggctcgctacagcccctgccctggctatgttag

SEQ ID NO: 101421 - DNA, 1134 bp, Artificial Sequence
  derived and/or modified sequence
atgactgaagttatctcctctcttgaaaacgccaattacaaagaccacgaaaacggaacaggcacaaacacctacgccgctctcaactctgtgtacttaatgatgaataatcaaatgagactgcttggtatggagactatggcttggcaagaaataagacacgcaattattctcttgactgacggtaagagcaacatgggtggctcacccaagactgctgtggaccacattcgtgagattctgaacatcaaccagaaaaggaacgattatctggacatttacgccattggcgttggcaaactggatgtggattggagagagctcaatgagcttggatcgaaaaaagacggagagcgacacgccttcatcctccaggataccaaagcgctgcatcaggtgtttgaacatatgctggatgtttccaagctgaccgacacgatctgtggggtcggcaatatgtccgcaaacgccagcgaccaggaaaggacaccctggcatgtgacaattaaaccaaagtctcaagagacctgtagaggcgccctgattagcgaccagtgggtgctcaccgccgctcactgcttccgcgatgggaacgatcatagtctgtggagagtgaatgtcggggaccctaagagccagtggggaaaagagtttcttatcgagaaggctgtgatctcacctgggtttgatgtgttcgcaaaaaagaatcaaggtattctcgaattctacggagacgatatcgctttgctcaagctggcccagaaagttaagatgagtacccatgccagacctatctgtttgccctgcactatggaggcaaacctagctctgagacgcccacagggctctacttgccgcgaccatgaaaatgagttgctaaacaagcagagtgtaccagcccacttcgtggccttgaacggcagcaagttgaatattaatcttaagatgggcgttgagtggacttcttgcgccgaggtcgtgagtcaagaaaagacaatgttcccgaacctgactgatgttcgcgaggtggttaccgaccaattcctgtgctcaggaacacaggaagatgagagcccctgcaagggggggagcggcgagcttggcagcctccagcctcttccatggctgtgttag

SEQ ID NO: 101422 - DNA, 978 bp, Artificial Sequence
  derived and/or modified sequence
atggggactcgaagcgcgatcgctgctcccaggatattatgttctcggggactgagatcgggctctgcaagagcaaccggctcaggagtggagcgcagtccatctgcagctaacccgacgttgatgacaagcctccggacgtggcccctgccatgggccctgccttcccccacctgtctaggcccacccatcccccctaggagacaaaggattttctcattcgagatcaatgtctctgtggccattattacgtttgccagcgagcccaaggtgctaatgtccgtgctcaatgataactccagggacatgaccgaggtgatatcgtctctagagaatgccaactacaaggaccacgaaaacggtaccggcaccaacacttacgcagctctgaactcagtgtacctgatgatgaacaatcagatgagattactgggaatggagaccatggcttggcaggaaatccgacacgcaattattttgctgactgacgggaagtccaacatggggggatcacctaagaccgccgtagaccacatacgggaaattcttaatattaatcaaaaacgaaatgactatctcgacatctacgcaatcggggtcggcaagctggacgtcgattggcgtgagttgaacgaactagggtctaagaaagatggcgagaggcacgccttcatcctgcaggacacgaaagctctacaccaggtgttcgaacacatgttagatgtttcaaagctgactgacacaatttgcggcgtcggaaatatgagtgctaatgcctctgaccaggagcggacaccatggcacgtgacaataaagccaaagtcgcaggagacatgtaggggagctctcattagtgaccaatgggttcttacagctgcacactgcttcagggacggaaatgaccacagcctgtggagggttaacgttggggacccgaagtcacagtggggcaaagagttcctgattgaaaaggcttag

SEQ ID NO: 101423 - DNA, 1134 bp, Artificial Sequence
  derived and/or modified sequence
atgaccgaagtgatttcttccctcgaaaatgccaattacaaggaccacgagaacggaactgggacaaatacttatgccgccctgaattccgtttacctgatgatgaacaatcagatgaggctgctggggatggagaccatggcctggcaagaaatcagacatgctatcatcctgctgacagacggaaaatccaacatgggaggaagccccaaaaccgccgtcgatcacattagagagatactgaacatcaaccaaaagaggaacgactacttggacatctacgccatcggcgtggggaaattggatgtcgactggcgcgagctaaatgagctcggctccaaaaaagatggagagaggcatgcctttattcttcaagacaccaaggcactccaccaggtctttgagcacatgctggatgtaagtaaattaacagacactatctgcggggtcggaaacatgagcgccaacgcaagcgatcaagaacgcactccctggcatgtgaccattaagccaaaatctcaagaaacctgtaggggcgctctgatctcagatcaatgggtcctgacagcagctcactgtttccgggacgggaatgatcatagcctttggcgtgtgaatgtcggagaccccaaatctcagtggggtaaggaatttctgattgaaaaggctgtgatcagccccggatttgatgtttttgcaaagaagaatcagggaattcttgaattctacggcgatgacattgccctcctaaagttggcccagaaggtgaagatgagcacccatgcaaggcccatttgccttccctgtaccatggaggcaaacctggccttgcgacggcctcaggggtctacctgtcgggatcacgaaaatgagttactgaacaagcaaagtgtacctgcccactttgtggccctcaatggatccaagttaaatattaacctcaagatgggagtggagtggacatcctgtgcagaggtggtttcgcaggagaagaccatgtttcccaatctgaccgacgtcagggaggtcgttaccgaccagttcctgtgctccgggacacaggaggatgagtcgccctgcaagggcggctccggtgagctcggctccctgcagcctctgccgtggctctgctag

SEQ ID NO: 101424 - DNA, 978 bp, Artificial Sequence
  derived and/or modified sequence
atgggcacacggagtgccattgccgctccccgaatactgtgttcacgagggcttagaagcggaagtgcgcgggctacagggtccggggtcgagagatcaccatcggctgccaatccaactttgatgacaagtctccgcacgtggcccctcccatgggcattgccctcacctacctgcctgggacctcccattccgccacgccgccaacgcattttttccttcgaaattaatgttagcgtggctatcatcacctttgccagtgagcccaaggtgctgatgtcagtcttgaatgataactcacgagacatgaccgaggtcattagctctttagaaaacgcaaattacaaagatcatgagaacggcaccggtacaaacacctacgcggcactcaacagcgtctacctcatgatgaacaatcagatgcgcctactgggtatggagactatggcatggcaagaaatacgccacgcaatcattcttctgaccgatggaaagtccaacatggggggctctcctaaaactgccgttgaccacatacgcgagatccttaacattaatcagaaacggaacgactatctcgacatttacgcgatcggtgtgggaaaactggatgtggattggcgggagttgaacgaactcggctcaaagaaggacggtgagaggcacgcatttatactgcaggacaccaaggccctgcaccaggtcttcgaacatatgctcgatgtatccaagctgactgacacgatctgcggcgttggaaatatgtccgctaatgctagtgaccaagagagaacaccgtggcacgttactataaagcctaagagtcaagaaacttgtaggggcgccttaatctcagaccagtgggtcctcaccgctgcacattgttttcgtgacggcaatgaccactctttgtggcgggtgaacgtcggggatcctaagtctcagtggggtaaggaattcctgatagagaaggcttag

SEQ ID NO: 101425 - DNA, 1134 bp, Artificial Sequence
  derived and/or modified sequence
atgaccgaagtaatttccagcctggagaacgctaattataaggaccatgaaaacgggacaggaacgaacacctacgccgcacttaactccgtgtatctgatgatgaacaaccaaatgcgattactggggatggagacaatggcttggcaggagatcagacacgcaatcattttgcttaccgacggaaaaagcaacatggggggatcaccaaaaacagccgttgaccacatccgggaaatcctgaacattaaccagaaaagaaacgactacctggacatctacgctattggggtgggcaaactggacgttgattggcgggaacttaacgaactcgggagcaagaaggacggagaaagacacgcatttatcctccaagacaccaaagctctccaccaggtctttgaacatatgctcgacgtgtctaaattaacagataccatctgtggagtgggcaacatgagtgctaatgccagtgaccaagagaggactccctggcacgtaacaatcaaaccaaagtctcaggagacatgtaggggagctctaatatctgaccagtgggtcttgacggcagcacattgtttccgtgatgggaatgaccactcattgtggagagtcaatgttggcgatcccaaatcacagtgggggaaggaattcctcattgagaaagctgtgatcagccccggtttcgacgtgttcgctaagaagaaccagggaatcctggaattttatggtgatgacatcgccttgttgaagctggcccagaaggtaaaaatgagcactcatgcccgtcctatttgtcttccttgtaccatggaggccaatctggcgctgagaagaccccaggggagcacttgtcgtgatcatgaaaatgagttgctgaataaacagagcgtgcctgctcattttgtggctttgaatggctctaagctcaatataaaccttaagatgggagtggaatggacctcttgcgccgaggtggtgagccaagagaagaccatgttccctaatctcacagatgtgagggaggtggtgactgatcagtttttatgttctggaacgcaggaagatgagtcgccatgcaagggtggctccggtgagctggggtcactgcagcctctgccttggctgtgttag

SEQ ID NO: 101426 - DNA, 1134 bp, Artificial Sequence
  derived and/or modified sequence
atgacagaggtgatcagcagcctggagaatgccaactacaaggaccatgaaaatggcaccggcaccaacacctacgccgccctgaacagcgtgtacctgatgatgaacaaccagatgaggctgctgggcatggagaccatggcctggcaggagatcagacatgccatcatcctgctgacagatggcaagagcaacatgggcggcagccccaagacagctgtggaccacatccgggagatcctgaacatcaaccagaagagaaatgactacctggacatctatgccatcggcgtgggcaagctggatgtggactggagggagctgaatgagctgggcagcaagaaggatggagagagacatgccttcatcctgcaggacaccaaggccctgcaccaggtgtttgagcacatgctggatgtgtccaagctgacagacaccatctgtggggtgggcaacatgtctgccaatgccagtgaccaggagaggaccccctggcacgtgaccatcaagcccaagagccaggagacctgccgcggggccctgatcagtgaccagtgggtgctgacagctgcccactgcttcagagatggaaatgaccacagcctgtggagggtgaatgtgggggaccccaagagccagtggggcaaggagttcctgattgagaaggctgtgatcagccctggctttgatgtgtttgccaagaagaaccagggcatcctggagttctatggagatgacatcgccctgctgaagctggcccagaaggtgaagatgagcacccacgcccggcccatctgcctgccctgcaccatggaggccaacctggccctgcggcggccccagggcagcacctgccgggaccatgaaaatgagctgctgaacaagcagagcgtgcctgcccactttgtggccctgaatggcagcaagctgaacatcaacctgaagatgggcgtggagtggaccagctgtgccgaggtggtgtcccaggagaagaccatgttccccaacctgacagatgtgcgggaggtggtgacagaccagttcctgtgcagcggcacccaggaggatgagagcccctgcaagggcggcagcggggagctgggcagcctgcagcccctgccctggctgtgctag

SEQ ID NO: 101427 - DNA, 978 bp, Artificial Sequence
  derived and/or modified sequence
atgggcaccaggtctgccatcgccgccccccgcatcctgtgcagccggggcctgcggagcggcagcgcccgggccaccggcagcggcgtggagaggagccccagcgctgccaaccccaccctgatgaccagcctgcggacctggcccctgccctgggccctgcccagccccacctgcctgggcccccccatccccccccggcggcagaggatcttctcctttgagatcaacgtgtctgtggccatcatcacctttgccagcgagcccaaggtgctgatgtctgtgctgaatgacaacagccgggacatgacagaggtgatcagcagcctggagaatgccaactacaaggaccatgaaaatggcaccggcaccaacacctacgccgccctgaacagcgtgtacctgatgatgaacaaccagatgaggctgctgggcatggagaccatggcctggcaggagatcagacatgccatcatcctgctgacagatggcaagagcaacatgggcggcagccccaagacagctgtggaccacatccgggagatcctgaacatcaaccagaagagaaatgactacctggacatctatgccatcggcgtgggcaagctggatgtggactggagggagctgaatgagctgggcagcaagaaggatggagagagacatgccttcatcctgcaggacaccaaggccctgcaccaggtgtttgagcacatgctggatgtgtccaagctgacagacaccatctgtggggtgggcaacatgtctgccaatgccagtgaccaggagaggaccccctggcacgtgaccatcaagcccaagagccaggagacctgccgcggggccctgatcagtgaccagtgggtgctgacagctgcccactgcttcagagatggaaatgaccacagcctgtggagggtgaatgtgggggaccccaagagccagtggggcaaggagttcctgattgagaaggcctag

SEQ ID NO: 101428 - DNA, 1521 bp, Artificial Sequence
  derived and/or modified sequence
atgggcaccaggtctgccatcgccgccccccgcatcctgtgcagccggggcctgcggagcggcagcgcccgggccaccggcagcggcgtggagaggagccccagcgctgccatcttctcctttgagatcaacgtgtctgtggccatcatcacctttgccagcgagcccaaggtgctgatgtctgtgctgaatgacaacagccgggacatgacagaggtgatcagcagcctggagaatgccaactacaaggaccatgaaaatggaacaggcaccaacacctatgctgccctgaacagcgtgtacctgatgatgaacaaccagatgaggctgctgggcatggagaccatggcctggcaggagatcagacatgccatcatcctgctgacagatggcaagagcaacatgggcggcagccccaagacagctgtggaccacatccgggagatcctgaacatcaaccagaagagaaatgactacctggacatctatgccatcggcgtgggcaagctggatgtggactggagggagctgaatgagctgggcagcaagaaggatggagagagacatgccttcatcctgcaggacaccaaggccctgcaccaggtgtttgagcacatgctggatgtgtccaagctgacagacaccatctgtggggtgggcaacatgtctgccaatgccagtgaccaggagaggaccccctggcacgtgaccatcaagcccaagagccaggagacctgccgcggggccctgatcagtgaccagtgggtgctgacagctgcccactgcttcagagatggaaatgaccacagcctgtggagggtgaatgtgggggaccccaagagccagtggggcaaggagttcctgattgagaaggccgtcatcagccctggctttgatgtgtttgccaagaagaaccagggcatcctggagttctatggagatgacatcgccctgctgaagctggcccagaaggtgaagatgagcacccacgcccggcccatctgcctgccctgcaccatggaggccaacctggccctgcggcggccccagggcagcacctgccgggaccatgaaaatgagctgctgaacaagcagagcgtgcctgcccactttgtggccctgaatggcagcaagctgaacatcaacctgaagatgggcgtggagtggaccagctgtgccgaggtggtgtcccaggagaagaccatgttccccaacctgacagatgtgcgggaggtggtgacagaccagttcctgtgcagcggcacccaggaggatgagagcccctgcaagggggagagcggcggcgctgtgttcctggagcggcgcttccgcttcttccaggtgggcctggtgtcctggggcctgtacaacccctgcctgggcagcgctgacaagaacagcaggaagagggcccccaggagcaaggtgcccccaccccgggacttccacatcaacctcttcaggatgcagccctggctgcggcagcacctgggagatgtgctgaacttcctgcccctgtag

SEQ ID NO: 101429 - DNA, 1134 bp, Artificial Sequence
  derived and/or modified sequence
atgaccgaggtgatcagcagcctggagaacgccaactacaaggaccatgaaaatggaaccggaaccaatacttacgcagccttgaattctgtatacctgatgatgaacaatcagatgaggctccttggcatggagactatggcttggcaggaaattcgccatgccattattctgctgactgatgggaaatctaacatggggggatcgccgaagacggccgttgatcacatccgtgaaattctgaacattaaccagaagcgcaacgattacctggacatctatgctatcggagtcggcaaattggacgtggactggcgcgagttgaatgagttgggatccaagaaagatggggagaggcacgcatttatccttcaggatactaaggccttgcaccaggtgtttgagcatatgttggacgtgtctaagctgacagacacaatctgcggcgtgggtaacatgagtgcgaatgccagtgaccaagagaggaccccgtggcacgtgaccattaagcccaagtcccaggagacttgccgcggagcactgatctctgaccaatgggtgctcaccgcggcccactgttttcgtgacggcaacgaccattccctctggagagtcaacgtgggcgaccccaagagccaatggggcaaagaattcttaatagagaaagcagtgatctcccccggcttcgacgtattcgcaaagaaaaaccaaggtatcttggagttttatggagatgacatcgccctacttaagttggctcaaaaggtcaaaatgtccacccatgcgcgtcccatctgcttaccatgtactatggaggccaatctcgctctgagacggcctcagggctcaacctgtcgggaccatgagaacgagttgcttaataagcagtctgtacctgcgcattttgtggccctgaatgggtctaagttgaacataaacctaaagatgggagtagagtggacctcttgcgcggaggtggtgtcccaggaaaagactatgtttcctaaccttactgacgtaagagaggtggtaactgaccaatttttatgcagcgggacgcaagaggatgagtccccttgtaagggaggatccggcgagttgggctcactgcagcctctgccttggttatgctag

SEQ ID NO: 101430 - DNA, 978 bp, Artificial Sequence
  derived and/or modified sequence
atgggcacccggagcgccatcgccgccccccggatcctgtgcagccgtggcttgcgctctggaagcgccagagccaccggttccggtgtggagcggtcacctagcgctgctaatccaaccttgatgacctctctccgcacctggcccttgccctgggccttaccttcccctacctgtcttgggcccccaatccccccaaggagacagcgcattttcagttttgaaatcaacgtgtccgtggccatcataacattcgcttcagagcctaaggtgctgatgtccgtcctgaatgataacagcagagacatgacagaagtgattagcagcttggaaaatgcaaattacaaagaccatgaaaacggaacagggaccaatacttacgccgcattgaacagtgtttatttaatgatgaataaccagatgcggctgcttggcatggagacaatggcctggcaagaaatccgccacgccattatattgctgacagatggaaagagtaacatgggcgggtcaccaaaaacagccgtggatcatattagagagatcctgaacattaatcagaaacggaatgactacctggatatctacgcgatcggagtaggcaagctggatgtagattggcgggagttgaacgaattagggtcaaaaaaggatggtgaaaggcacgccttcatcctccaggacaccaaggccttacaccaggtgtttgagcatatgttagatgtatcaaaactgactgacaccatctgcggtgtgggcaacatgtcagcaaatgcatcagatcaggaaaggacaccttggcatgtgactatcaagccaaagagccaagaaacctgtagaggagcactgatctctgatcagtgggttttgaccgccgcacattgctttcgagacggcaacgatcactcactctggagagtgaatgtgggcgaccccaaatctcagtggggaaaagagttcctgatcgaaaaagcttag

SEQ ID NO: 101431 - DNA, 1521 bp, Artificial Sequence
  derived and/or modified sequence
atgggcacccggagcgccatcgccgccccccggatcctgtgcagccgaggcttgcgatctggatcagctcgcgccacagggagcggcgtcgaacggagcccatccgctgccatcttttcattcgaaatcaatgtgagcgtggctatcataacgtttgctagtgagcccaaggtgctcatgagcgtgctcaatgacaatagcagggacatgacagaggtgatatcatctctagagaacgctaactacaaagatcacgaaaacggaactggcaccaacacgtatgcggctctgaactccgtgtacctaatgatgaataatcagatgagactgttgggaatggagaccatggcatggcaggaaatcagacacgccattatcttattgacagacggcaaaagtaacatgggggggagcccaaagactgccgtggaccacatccgagaaatcttgaacattaaccagaaacgaaacgattatcttgacatctacgcaatcggagtgggcaaactggacgtggattggcgcgaacttaacgaactggggtctaaaaaggacggagaacggcatgcctttatcctacaagacacgaaagctctacaccaagtctttgagcatatgctggatgtatcaaagctcaccgatacaatatgtggcgtaggaaacatgtccgcaaacgcctccgatcaggagagaacgccttggcatgtgacaattaagcccaagtcccaagagacctgtcgaggagctctgattagcgatcaatgggttttgacagccgcccattgcttcagggacggaaatgatcactctctctggagggtgaacgttggggacccgaaatcacagtggggaaaagagttcctaattgagaaggctgttatctcgccaggctttgacgtgttcgcaaaaaaaaaccaaggtatcttggaattctatggggacgacatcgcccttttgaaactggcacagaaagttaagatgtccactcacgccagacctatttgtcttccttgcaccatggaagccaacctcgcacttcgtcgtccacagggctcaacctgtagagaccacgagaacgaacttctgaacaaacagtctgtaccagcccactttgtggccctcaatggttccaaactgaacataaatttgaagatgggggtcgaatggacctcctgtgccgaagtagtctcccaggagaaaaccatgttccctaacctgaccgacgtgcgggaggtcgtgactgaccagttcctctgcagcggcacgcaagaggacgagagtccctgtaagggtgagtcaggtggcgctgtctttctcgagagacgctttcgattcttccaggtgggacttgtgtcttggggcctatataatccatgtcttggcagtgctgacaagaactcacgtaagagagccccaagaagcaaggtgccccccccccgggattttcatatcaacctctttcgcatgcagccttggctgagacagcacctgggtgacgttcttaatttcctccctctctag

SEQ ID NO: 101432 - DNA, 1521 bp, Artificial Sequence
  derived and/or modified sequence
atgggcacccggagcgccatcgccgccccccggatcctgtgcagccgaggtttgagaagcggctccgccagggctactggttcaggcgtggaacgatccccgtcagccgctatattcagctttgaaatcaacgtgagtgtggccataattacattcgccagtgagccaaaagttctgatgagcgtcttgaatgacaactccagggatatgactgaggttatctctagcttggaaaatgccaactacaaggatcacgagaatggtacaggaacaaacacgtatgcagccctgaactcagtctacctcatgatgaacaaccaaatgcggctgctggggatggagaccatggcatggcaagagatccggcacgccattatactcctgaccgacggcaagtctaacatgggcggatctcctaaaaccgccgtggaccatatcagagagatacttaacatcaaccagaaaaggaatgactatctcgacatttacgcaatcggcgtgggcaaattggacgtggactggcgggaactgaatgaactgggtagcaaaaaagatggcgagaggcacgctttcatattacaggataccaaggccctgcaccaggtcttcgagcacatgctcgatgtgagtaagttaactgatacaatatgcggcgtgggaaatatgtccgcgaatgcaagcgaccaggagagaacgccgtggcacgtgacaattaagccaaagagccaagagacgtgtagaggggcattgatcagtgaccagtgggtccttactgccgcccattgcttccgtgatgggaacgatcattccctttggcgagtgaatgtaggggatccaaagtctcagtggggtaaagaattcctcatcgagaaggcagtgatctcacctggctttgacgtctttgccaaaaagaatcagggtattctcgaattctacggagatgatatcgccctgctgaagcttgcccagaaggtgaaaatgtctacccatgccaggcctatctgtctaccttgcacgatggaggccaacctggccctgcggaggccacagggttctacgtgcagggatcatgaaaacgagctcctgaataaacaaagtgtacctgcccatttcgttgcacttaacgggagtaagctgaatataaatctgaagatgggtgtggagtggacttcctgtgcagaagtagtctctcaggagaaaaccatgttcccgaatttgacagacgtgcgagaggtagtcactgaccagttcctctgtagcggcacccaagaagatgagtcgccctgcaaaggggagtccgggggcgcagtctttttagagcgccggtttaggttcttccaagtgggactggtctcctggggactgtataatccttgtttgggaagtgccgacaagaacagcagaaagagagcacctcggagcaaagtaccgcccccccgagactttcacattaacctgttccgtatgcagccctggctacggcagcatctgggcgatgtactcaattttctgcccctgtag

SEQ ID NO: 101433 - DNA, 1521 bp, Artificial Sequence
  derived and/or modified sequence
atgggcacccggagcgccatcgccgccccccggatcctgtgcagccggggtctgcggagtggctccgctcgagccaccggttcaggcgttgagcgaagtcccagcgccgccatttttagttttgagattaacgtgtctgtggcaatcatcaccttcgcgtccgagccaaaagtactaatgagcgtgcttaacgacaactctagagacatgaccgaagtgatcagttccctggagaatgccaattacaaggaccatgagaatggcaccggaacaaacacttatgcagccctgaactccgtatatctcatgatgaataaccaaatgcggttactgggcatggaaacaatggcgtggcaggaaatccgccatgctataatcctgctgactgatggtaagagcaacatgggcggttctccaaagacggctgtggaccacatccgagagatcctcaatatcaatcagaagcgcaacgactatctcgacatttatgctatcggcgtcggaaagcttgatgtggattggagagaacttaacgaacttgggagcaagaaggatggggagaggcacgccttcatcctccaggacactaaggcgctgcaccaggtgttcgagcatatgctggacgtctccaaactgactgatacaatctgcggggtcggcaatatgtcagccaatgcttctgatcaggagagaaccccctggcacgtgaccattaaacccaagtctcaggagacttgtaggggggcgctaattagcgaccagtgggtcctcaccgccgcacactgttttcgtgacgggaacgaccatagtttgtggcgggtgaacgtgggcgaccctaagagtcaatggggtaaggagtttctgatcgagaaagccgttatctcaccgggcttcgacgtcttcgcaaaaaaaaaccaaggaatcctagaattctacggtgacgacatcgcattactcaagttggcccaaaaggtgaaaatgtccactcatgcgcgccccatttgcctgccatgtacaatggaggctaatctcgcactgcgccggccacaggggagtacatgccgagaccatgagaacgaactcctgaataagcagagcgtcccggcccacttcgtggcattaaatggatctaagctcaacatcaatctgaagatgggagtggagtggacctcctgcgctgaagttgtgtcgcaggagaaaaccatgtttcccaatctcactgacgtgcgcgaggtagtgaccgatcagtttctatgcagcggcacccaggaagacgagagcccttgcaagggtgaatccgggggtgcagtctttctggagcgacggttccggttctttcaggtggggttggtctcctggggtctgtacaatccatgcttgggatcagccgacaagaattcccggaagagggctcctaggagcaaggtcccgccccctcgagattttcacatcaacctatttagaatgcaaccatggctaagacaacatctgggagatgtgctgaatttcctaccactctag

SEQ ID NO: 101434 - DNA, 1134 bp, Artificial Sequence
  derived and/or modified sequence
atgaccgaggtgatcagcagcctggagaacgccaactacaaggaccacgagaatgggaccggaaccaatacctatgccgcattgaattcagtatatctgatgatgaacaaccagatgagattactcgggatggaaacaatggcctggcaggagatccgccatgctattatcttactgaccgatgggaaaagcaatatgggaggatcacccaaaaccgccgtcgaccacatacgtgaaatcctgaatatcaaccagaagcgcaatgattatctagatatttacgccattggggtgggaaaattagatgtggactggagggagctgaacgagctgggatcaaagaaagatggcgagagacacgccttcattctgcaggacaccaaggcattgcatcaagtattcgaacatatgttggacgtcagtaagctaacggacaccatctgcggagtgggaaacatgtccgcgaatgcctccgatcaagagagaaccccctggcacgtgacaatcaaacctaaatcccaagagacctgtaggggcgcccttatttcagatcagtgggtcctgaccgctgctcattgcttccgggacggcaatgatcattccctttggcgtgttaacgtcggagaccctaaatcccaatggggaaaggaattcctcatcgagaaggctgttatttcccctggcttcgacgtgttcgctaagaaaaaccaagggattctggagttctacggtgacgatatcgctctgctgaagctggcccaaaaggtaaagatgtccacccatgccagaccaatctgtctgccatgcacaatggaggctaatctggcactgaggcggccccagggctccacatgcagggaccacgaaaacgagttactcaacaagcagtcagtgccagcccacttcgttgcactcaatggttctaaattgaacattaacctcaaaatgggagtagagtggaccagttgtgctgaggtggtaagtcaggagaagacaatgtttcccaatcttacggacgtccgcgaggtggttacagatcagtttttgtgttctggcacacaggaagatgagtcaccttgtaagggaggcagtggtgagttggggagcttacaaccactgccctggctgtgttag

SEQ ID NO: 101435 - DNA, 978 bp, Artificial Sequence
  derived and/or modified sequence
atgggcacccggagcgccatcgccgccccccggatcctgtgcagccgcggcctgcgcagcggatctgctagggcgactggctcaggagtggagcgcagtcccagcgcagccaatcccacactgatgacctctctacgcacgtggcccctaccctgggctctccccagtccaacgtgcctaggcccccctatcccaccaaggagacagcgtatcttttctttcgagattaatgtaagtgtcgccattattacattcgctagcgagccaaaagttctcatgagcgtattaaacgataattctcgagatatgaccgaggtgatcagctccctggagaacgccaattataaagatcacgaaaatggaactggtaccaacacatatgccgccctgaacagcgtgtacctgatgatgaataaccagatgcggttactcggcatggaaaccatggcctggcaggagataagacacgccattattctgctgactgacggaaaatctaacatgggaggatcacccaagacggccgtggatcatattagagagatcttgaatataaatcagaagagaaatgactatctggatatttacgcgatcggcgtgggcaaactggatgtggattggagggagctgaacgagctaggcagcaaaaaagacggggagcgtcacgctttcatactacaggacactaaggccctgcatcaggtctttgagcacatgctggacgtgagtaagctaaccgatacaatctgtggtgttgggaatatgagcgctaatgcgagtgaccaggaacggaccccatggcacgttaccattaagcccaagagtcaagagacctgccggggcgccctgatcagcgaccagtgggtgttgacagcggcccactgttttagggatgggaatgaccactccctatggagggtgaacgtcggtgacccaaaatctcagtggggtaaggagttcttgatagaaaaggcatag

SEQ ID NO: 101436 - DNA, 1521 bp, Artificial Sequence
  derived and/or modified sequence
atgggcacccggagcgccatcgccgccccccggatcctgtgcagccgtggcctgaggagcggatctgcccgcgcaaccggtagtggagtggaaaggtccccaagcgcagccatcttctcctttgagatcaacgtctctgtggccattattacctttgctagcgaacccaaggtcctgatgtctgttttgaacgataactcccgcgacatgacggaagttatcagttctctagagaacgccaactacaaggatcatgagaatggtactggaaccaacacttatgcagcattaaattcagtgtacctgatgatgaataaccagatgagattgctggggatggagacaatggcctggcaggaaattcggcacgcaattatcttactgaccgacggcaaatccaatatggggggatctcctaaaacagccgtggatcacatacgcgagatccttaacatcaatcagaagcgaaatgactatctggacatttatgccataggcgtgggcaaactcgatgttgactggagagagctgaacgagctgggaagcaaaaaagatggagaaagacacgcttttatactccaggacacaaaggccctccaccaggttttcgaacacatgctggacgtatctaaacttacggataccatctgcggggtgggaaacatgtctgcgaatgcgtctgatcaggagcgaacaccctggcacgtgacaataaaacccaagtcccaggagacttgtcgtggggctcttatatccgatcaatgggtgctgactgccgcgcattgtttcagagatggcaacgaccatagcctttggcgggtcaatgtgggggacccaaaatcccagtggggcaaagagttcctgattgagaaagccgtgatttcaccagggtttgatgtgtttgcaaagaagaatcaggggatcttagagttttatggcgacgacatcgcgcttctgaaactggcacagaaagtgaaaatgtccacccacgcaaggcccatatgtttgccttgtacaatggaggctaatcttgccctgagaaggccccaggggtccacatgccgggaccacgagaatgaactcttgaataagcagtcagtgccggcccattttgtggcactgaatggatccaagttaaacatcaatttgaaaatgggagtagagtggaccagctgtgccgaggtggtgagccaggagaagaccatgtttcccaacctgacagatgtgcgagaagtggtcacagaccagtttttatgcagcgggacgcaggaggatgagtctccgtgcaaaggcgagtccggaggggcggtgtttcttgagcgaaggtttagattttttcaggttgggctggtgtcttggggcctatacaacccatgtcttgggagtgcagataaaaattcacgaaagcgagcccccaggagtaaagtgccaccaccaagagattttcacattaatctgttcagaatgcaaccgtggctaaggcagcacctcggagatgtgctgaacttcctgccactgtag

SEQ ID NO: 101437 - DNA, 1521 bp, Artificial Sequence
  derived and/or modified sequence
atgggcacccggagcgccatcgccgccccccggatcctgtgcagccgcggcctccgaagtggatcagcccgggccacagggtccggagttgaacgcagtccaagcgccgcaattttcagcttcgaaataaatgtctcagtggccattattaccttcgctagcgagcctaaggtgctgatgagtgtcctgaacgacaattctagagacatgaccgaagtgatcagttctctagaaaatgccaactataaggaccatgagaacggcaccggaacgaatacctatgcagcattgaatagcgtgtatctgatgatgaacaatcaaatgagacttctcggcatggagactatggcctggcaggagattaggcatgcgatcattcttctgacagacggcaaatctaacatgggtggttcccctaagacagcagtggaccacatccgcgaaatcctgaacatcaaccagaaacgtaacgactatctggacatctatgccatcggtgtggggaagctggatgtcgattggagagagcttaacgaactaggttcaaaaaaagacggtgagaggcacgcatttattctgcaggacaccaaggcattgcatcaggttttcgagcacatgctggacgttagcaagttgaccgatactatctgtggcgtgggcaacatgtccgcaaacgcctctgaccaagagagaaccccttggcacgtcactattaagcccaagagccaagaaacatgcaggggcgctctgatctccgatcagtgggttttgaccgcagcccattgctttagagacggcaacgaccatagcctatggcgtgtcaacgttggcgaccctaagagccagtggggaaaggaatttcttatcgaaaaggctgtcatttcccctgggttcgacgtcttcgccaagaagaatcaggggattttggagttctacggcgacgacatcgccttactgaagctagcccagaaggttaagatgtccacacacgctcgccccatttgcctgccttgcacgatggaagcaaatctggcgttacgtaggccccaaggaagtacctgcagagatcacgagaacgaactactgaataagcagtctgtacctgctcacttcgttgcgttgaatggctcaaaattaaacatcaacctgaagatgggcgtggagtggactagctgtgccgaagttgtatcacaggagaagacgatgttccctaacctcaccgatgtgcgcgaggtggtcacagatcagttcctatgttctggtacccaggaagatgagagtccatgtaaaggggagagcggtggggctgtgtttctcgaacggagatttagatttttccaagtaggcctggtgagctggggcctctacaacccatgtcttggatctgccgataagaacagccgcaagagagcaccaaggtcaaaggtgccacccccccgcgatttccatattaatcttttccgcatgcagccctggttgcgtcagcaccttggggacgtgttaaattttcttcccctgtag

SEQ ID NO: 101438 - DNA, 1134 bp, Artificial Sequence
  derived and/or modified sequence
atgaccgaggtgatcagcagcctggagaacgccaactacaaggaccacgagaatggcactggcaccaacacttacgctgccctgaatagtgtgtatctgatgatgaacaatcagatgcggctgctcggcatggaaacgatggcctggcaggaaatccggcatgccatcatccttctgactgacgggaagagcaacatgggcggctcccccaaaactgccgtcgatcatatcagggaaatactcaacatcaaccagaagagaaatgattacctggacatctatgcaataggcgtgggaaaacttgacgtagactggcgggagctgaatgagctcggatcgaagaaggacggagaaagacatgcattcatcctacaggacacaaaggccctgcaccaggtgtttgagcatatgcttgatgtctccaagctgaccgataccatctgcggcgttggcaatatgtcggctaatgctagcgaccaggaacggactccgtggcacgtgaccatcaagccgaagtcccaagagacatgtcggggggccctgatttccgatcagtgggttctcaccgccgcccactgctttcgcgatggaaacgaccacagcctttggagagtgaacgtgggagaccccaagtcccaatggggcaaggagtttctgatcgagaaggcagtgatctctccgggcttcgatgtgtttgctaaaaagaaccaagggatcctcgagttctatggcgatgatatcgccttgctgaagctggcccagaaagtcaaaatgtccacacatgcaaggcccatttgcttgccatgtacgatggaagcaaatctcgccttgcgccgccctcagggctcgacctgtcgggatcacgagaatgaactcctcaacaagcagtcggtgcctgctcatttcgtagcactgaacggctcgaagttgaacatcaacctgaagatgggagtggaatggacttcatgtgccgaagtcgtcagccaggaaaagactatgttccctaacctgactgatgtgagagaggtagtgacagatcagttcctttgctctggtacacaggaggatgagtctccctgcaagggcggatctggtgagctcggatctttgcagcctctgccttggctttgctag

SEQ ID NO: 101439 - DNA, 978 bp, Artificial Sequence
  derived and/or modified sequence
atgggcacccggagcgccatcgccgccccccggatcctgtgcagcaggggcttacggtccggctccgcaagagcgaccggtagcggggtggagcgcagccccagcgccgccaaccccacccttatgacaagcctgcgcacatggcctcttccctgggcactacccagccccacctgcctggggccccccatccccccgagaaggcaacgcattttttccttcgagatcaatgtgagcgtcgccatcatcacattcgcctctgaacctaaagtgctgatgagcgtgctgaatgacaattcgcgagacatgaccgaggttatttctagtctggagaatgcaaactacaaagaccacgagaacggtacaggtacaaacacctatgccgccctcaattcggtgtatctcatgatgaacaaccaaatgcgtctgttaggcatggaaactatggcttggcaggagatccggcatgccatcattctgctgactgatggcaagagtaacatggggggctcccctaaaaccgcagtcgatcatattcgggagatccttaacattaaccagaagaggaatgactatctcgatatctatgccatcggagtaggcaagctggacgttgactggcgcgagttgaacgaactgggatctaaaaaagatggagagagacatgcgtttatcctccaggacacaaaggctctgcatcaggtgtttgagcacatgctggacgtgtctaagcttacggacactatatgcggcgttggcaatatgagtgcgaatgcttccgatcaagaacgcaccccttggcatgtgacaatcaagccaaaatcacaggaaacgtgtcgtggggcactgatcagtgaccagtgggtcctgacagcagcccactgcttcagggatggtaatgatcatagcctctggcgggtgaacgtgggcgatccaaaaagtcagtgggggaaagaattcctaattgaaaaagcctag

SEQ ID NO: 101440 - DNA, 978 bp, Artificial Sequence
  derived and/or modified sequence
atgggcacccggagcgccatcgccgccccccggatcctgtgcagcagagggcttagatcaggaagcgctcgcgcgactgggtccggagtggagagaagcccctcagcagctaaccccaccctgatgacctctctgcgcacttggcccctgccttgggctctgccaagcccgacatgtttaggaccccccattcctccgagaaggcagaggatcttttccttcgagattaatgtgtccgttgcaattattacttttgcaagcgagccgaaagtgttgatgagtgtactgaatgacaattcacgtgatatgactgaggtcatcagtagtctggaaaacgctaactataaggaccatgaaaacggcacgggtaccaacacgtacgcagcattgaactccgtgtatctcatgatgaataaccagatgcggctcctcggcatggaaaccatggcatggcaagaaatcagacacgccataatcctcctaacagatggaaagtccaacatgggtggatctcctaaaacagccgttgatcacattagggaaatcctcaacatcaaccagaagaggaatgattatcttgatatttatgctatcggtgtgggcaagctggatgtggactggcgagagctgaacgagctggggtccaaaaaagatggggagcgtcacgcattcatcctgcaggacaccaaggcgcttcaccaagtttttgaacacatgctggacgtgagcaagcttactgacacaatttgcggcgttggtaatatgagtgctaacgcctccgatcaggaaagaacaccatggcacgtcacaatcaagccaaaaagccaggagacttgtaggggcgctctaatttctgatcaatgggtcctgacggcagcacattgcttccgagacggaaacgatcactccctgtggcgggtcaatgttggggacccaaagtcacagtggggtaaagagtttctgatcgaaaaggcatag

SEQ ID NO: 101441 - DNA, 1521 bp, Artificial Sequence
  derived and/or modified sequence
atgggcacccggagcgccatcgccgccccccggatcctgtgcagcagaggcctgcgtagtgggagtgccagggcaaccggctccggcgtggaacggtccccatctgccgccattttctcgttcgaaattaacgtgtccgtggctatcatcacgttcgcaagcgagcccaaagtcctgatgagcgtgttgaacgataactctcgcgacatgaccgaggtaattagcagtttggaaaacgccaactataaggaccacgagaacggcaccggcaccaacacatacgccgctcttaactcagtatatttaatgatgaacaatcagatgagattactaggcatggagacaatggcttggcaagaaattcgtcatgcaattattctcctgacggacggaaaaagcaacatgggtgggtcaccaaagaccgctgtggatcacatcagagaaattctcaatattaatcagaagagaaacgattatctggacatttacgccattggtgtggggaaactggacgtcgattggcgggaactgaatgaattgggatcaaagaaagatggggagcgccacgctttcattctccaggacactaaggcactccaccaagtgttcgagcatatgctggatgtctccaagctgacagacacaatttgcggggttggaaacatgtctgccaacgcctccgatcaggaacgtactccatggcacgtgacaatcaaaccaaaaagccaggagacttgccggggagccctcatttctgaccagtgggttctgactgccgcccactgcttccgcgatggcaatgatcactctctctggagggtaaacgtaggagaccctaagagtcagtggggcaaggaatttctcatcgagaaagcagtgatttcccccgggttcgatgtgtttgctaagaagaaccaggggattcttgagttctacggagacgacattgctctccttaaattggctcaaaaggtgaagatgtcgactcatgccaggcctatttgtcttccatgcaccatggaagctaatctggctcttcgtcggccccagggttccacatgtcgggaccacgaaaatgaactgctgaacaagcagtctgtccccgcacactttgtagcacttaatggctcaaagctaaacataaatcttaaaatgggtgtggagtggacatcttgcgcagaggttgttagccaggagaagaccatgtttccaaatttaaccgatgtgagagaagttgtgacggatcaattcttgtgttcgggcactcaggaggacgagagcccgtgtaagggagagagtggcggcgccgtcttcctagagagacgcttcagattcttccaggtggggttagtgtcatggggcttgtacaatccgtgcctggggtccgccgacaaaaatagcaggaagcgtgccccgagatctaaagtgcctcctccgcgagacttccatatcaacctgttcaggatgcagccatggctgagacaacatctgggggatgtgctcaattttctcccattgtag

SEQ ID NO: 101442 - DNA, 978 bp, Artificial Sequence
  derived and/or modified sequence
atgggcacccggagcgccatcgccgccccccggatcctgtgcagcagaggtctccgctctggctcagcccgcgcaaccgggtccggagtggagaggtcccctagcgctgcaaatccaacacttatgaccagccttcgaacctggcctcttccttgggcgctcccttcaccaacgtgcctgggcccacctattccgccaaggcggcaacggatctttagcttcgagatcaacgtgtctgtagccattattacctttgcatccgaacctaaagtgttgatgagtgtcttgaacgacaatagccgcgatatgacagaggttatctctagcttggagaacgcaaactacaaggaccatgaaaacggtacgggcaccaatacctacgcagcactaaactctgtctacctcatgatgaataaccagatgaggctactcgggatggaaaccatggcctggcaggagatacgccatgccatcatcctcctgacggacggaaaatccaatatgggtggaagtccaaagaccgcggtcgaccatatacgtgaaatcttgaacatcaaccaaaagcggaacgactatctggacatctacgccatcggggtgggaaagctggacgttgactggcgcgaattgaacgaattggggtcgaagaaagatggcgaacgtcatgccttcatccttcaggacactaaggccctgcatcaagtgttcgaacacatgctcgacgtcagtaagctgaccgacactatctgtggggtcggcaatatgtctgccaatgccagcgaccaggagaggacaccctggcacgtcacaattaagccgaagagtcaagaaacttgccgcggggcacttatcagcgatcaatgggtgcttaccgccgcacactgcttccgcgatggaaatgaccatagtctgtggagggttaacgtcggagatccaaagtcccagtggggtaaggagttcctcatagagaaggcttag

SEQ ID NO: 101443 - DNA, 1134 bp, Artificial Sequence
  derived and/or modified sequence
atgaccgaggtgatcagcagcctggagaacgccaactacaaggaccatgagaacgggacaggcactaacacatacgccgcactgaactccgtttatcttatgatgaacaaccagatgaggctgctgggcatggaaactatggcatggcaggagattaggcacgctatcatcctactcacagatggaaaatccaacatgggaggaagccccaagacagccgtagaccacatccgcgagatcctgaacatcaaccagaaacggaacgattatcttgacatctatgccatcggggtcggtaaactggatgtggactggagagagctgaatgagctcggaagcaagaaggatggcgaacggcacgcattcattttacaggatacgaaggcccttcaccaagtcttcgagcacatgttggacgtaagtaaattgaccgatacgatctgcggtgttgggaacatgagcgcgaatgcaagcgatcaagagcgaacaccgtggcatgtaaccatcaagcccaagtctcaggaaacttgtcggggcgctctgatctctgatcaatgggtactgactgcagcacattgcttcagggacggtaatgatcacagcctgtggagagtgaacgtgggcgaccccaaatcccagtggggtaaggaatttctgatcgagaaagccgtgatttcaccagggtttgatgttttcgctaaaaagaaccagggaatcctcgagttctacggagacgacatagctttgctcaaactggcacagaaggtcaaaatgtccacgcacgccaggcctatctgcctgccgtgcaccatggaagccaatttagccctccgtcggccgcagggctcaacctgccgcgaccacgaaaatgagttgttgaacaaacagtctgtgccagcacattttgtggctcttaatgggtcgaagctgaacatcaatctgaagatgggggttgaatggacctcctgtgcggaggtcgtgagtcaagagaagaccatgttccccaatctcacagatgtcagagaagttgttaccgatcagttcttgtgttccgggacacaggaggacgaatcaccctgcaaggggggctcaggtgaactcggaagcctgcaacccctaccttggctgtgttag

SEQ ID NO: 101444 - DNA, 1134 bp, Artificial Sequence
  derived and/or modified sequence
atgaccgaggtgatcagcagcctggagaacgccaactacaaggaccacgagaacggcacagggacaaacacttacgctgccttgaactcagtctacctaatgatgaacaatcagatgcgtctgctgggcatggaaacaatggcatggcaggagatcagacacgccattatcctcctaaccgatggcaaaagtaacatgggcgggtctcccaagaccgctgtggatcacatccgggagatattaaatatcaatcagaaaagaaacgattatctcgatatttacgctatcggagtaggcaagctggatgtcgattggagagaactcaacgaacttggatctaagaaggatggagagaggcatgccttcatcctccaggacacaaaggcattacatcaggtttttgaacacatgttagatgtctccaagttgacagacactatctgcggcgtcggaaatatgagcgccaatgctagtgaccaggagcgcacgccctggcacgtgacgatcaaaccaaaatcacaagaaacctgcagaggcgctctgataagcgatcagtgggttctgaccgcagcccactgctttagagacggcaacgaccattcgctgtggagagtgaatgtgggagaccccaaaagccagtggggtaaggagttcctaattgagaaagccgtcatctcccccgggttcgatgtcttcgccaaaaagaaccaggggatcttagagttctacggagatgacatcgcgcttctgaaactagcccagaaagtaaagatgagtacccacgccagacctatatgcctgccctgtaccatggaagcaaatctcgctttaagacggccacaggggagcacctgccgggatcacgaaaatgagctcctgaacaagcagtccgttccagcccactttgtggctctcaacggttctaaactgaacatcaacctgaaaatgggagtagagtggacttcctgcgccgaagtggttagtcaagaaaagacgatgttcccaaatctgacggacgttcgggaggttgtcaccgaccagtttctgtgcagcgggacccaggaagatgagtctccatgtaaaggaggaagtggtgaactcgggagcctgcagccactgccatggctgtgctag

SEQ ID NO: 101445 - DNA, 978 bp, Artificial Sequence
  derived and/or modified sequence
atgggcacccggagcgccatcgccgccccccggatcctgtgcagccgcgggctaaggtctggttccgcgcgggccaccggaagcggcgtcgaacgctcaccctcagccgctaatccaactctgatgactagcctccggacttggccacttccatgggcgctcccaagtccaacctgtcttgggccaccgataccaccgagaaggcaacgcattttttccttcgagattaatgtttctgttgccatcatcacattcgcttctgaaccaaaggttttgatgagcgttctgaatgacaacagtcgcgacatgacagaagtgatcagctccctggaaaacgctaactacaaggaccatgaaaacgggacaggaactaatacctacgccgcattaaactcagtgtacttaatgatgaacaaccaaatgagactgctgggtatggagaccatggcctggcaggagatccgtcacgccattattctcttaaccgacggaaaaagcaatatggggggatcccctaagaccgcagtggaccacattagagaaattctgaatatcaaccagaaacgcaacgactacctggacatttatgccatcggcgtcgggaaattggacgtcgactggcgtgagctcaatgaactgggctctaagaaggacggagaaagacacgcgtttattctgcaagatacaaaggcactccatcaggtgtttgaacacatgctagacgtgtctaaactgactgacaccatctgtggcgtgggtaatatgtccgcaaatgccagtgatcaggagagaactccttggcacgttaccattaaacccaagagccaggagacctgccgtggggccctcatatctgaccaatgggtgcttacggccgctcactgcttcagggatggaaatgatcactcgctatggagggtaaatgtcggcgatccgaaaagccagtgggggaaggaatttctgatagagaaggcgtag

SEQ ID NO: 101446 - DNA, 1134 bp, Artificial Sequence
  derived and/or modified sequence
atgaccgaggtgatcagcagcctggagaacgccaactacaaggaccatgagaacggaactggcactaatacatacgccgccctcaactcagtgtatttgatgatgaataatcaaatgcgtctgctgggaatggaaaccatggcctggcaggaaatccgccacgcgatcatattgcttacagacggaaaatccaatatgggagggtcccccaagaccgcggtggatcatatccgagagatccttaacatcaaccagaaacgcaacgactatttggacatctatgccataggggtgggcaaactggacgttgattggagggagctgaatgagcttgggtctaaaaaggatggcgaaagacacgccttcattttgcaggatacaaaggcattgcatcaagtcttcgagcatatgcttgacgtctccaagcttacagatacgatttgcggcgtgggtaacatgtccgcaaacgccagtgaccaagaaaggacaccttggcacgtcaccattaagccaaagagtcaggaaacttgccggggggctcttatcagcgaccagtgggtgttaacagcagcccactgctttcgggacggcaacgatcattctctatggagagtgaacgtgggggaccccaagtcccaatgggggaaggaattcctcatagagaaggccgtgatctccccaggatttgacgtgtttgctaagaaaaatcagggtatcctcgagttctacggtgacgacatcgcgctgctgaagcttgctcagaaggtcaagatgtccactcacgctcgccctatttgcctgccttgcaccatggaggccaatttagctctgcgcaggccacagggcagtacttgcagagatcatgagaacgagctgctgaataagcagtcagttcccgcacactttgtcgccctgaacggctcaaaactaaacatcaacttgaagatgggggtcgagtggacatcctgcgccgaggttgtgagccaagagaagaccatgttccctaacttgactgatgtgagagaggttgtaaccgatcagtttctgtgttctggaacacaagaggacgagagcccgtgcaaaggagggagcggagagctgggatcactgcaacccttgccttggctctgctag

SEQ ID NO: 101447 - DNA, 978 bp, Artificial Sequence
  derived and/or modified sequence
atgggcacccggagcgccatcgccgccccccggatcctgtgcagcaggggcctcagatctggatccgcgagggccacaggttctggcgtcgaaagaagcccctccgcggccaaccctactttgatgactagcttgcggacttggccccttccatgggctctccccagcccaacctgcctgggtccgcctattccacctcggaggcagagaatattcagctttgagattaacgtgagcgtggcgatcataacctttgcctctgaaccaaaagtgctcatgtcagtcctgaatgataattcccgtgatatgactgaggttatcagcagccttgaaaatgctaattataaggatcatgagaatgggactggcaccaatacgtacgctgccctcaactctgtgtaccttatgatgaataaccagatgaggctcctcggcatggaaaccatggcctggcaggagatccgacatgctattatcctgctgacagatggtaagagcaatatgggggggagcccgaagacagcggtcgaccacattcgggagattttaaacattaatcagaaacgaaatgactaccttgacatctacgccattggagtaggcaagctagacgtggactggcgcgagctgaatgagctaggttccaaaaaggatggagagcgccacgctttcatcctacaagataccaaagccctgcaccaagtattcgaacacatgctcgacgtgagtaagctcacagacaccatctgtggtgtcgggaacatgtctgctaacgcatcagatcaagaaagaaccccgtggcacgtgacaattaaacctaaaagccaggaaacatgccgcggggctctaatcagtgatcagtgggtactcacagcggctcattgttttagagacggcaacgatcattcattgtggagagttaacgtgggcgatcccaagtctcagtgggggaaagagtttcttatagagaaggcatag

SEQ ID NO: 101448 - DNA, 1134 bp, Artificial Sequence
  derived and/or modified sequence
atgaccgaggtgatcagcagcctggagaacgccaactacaaggaccacgaaaatggaacagggactaatacgtacgccgctttaaacagcgtctacctcatgatgaataatcagatgcggctgttgggcatggaaactatggcctggcaggagattcgacacgctatcatcctgttgaccgatgggaaatccaatatggggggtagtcctaaaaccgcagtggaccatatcagggaaattcttaacattaatcaaaagcggaacgactaccttgatatctacgccatcggcgtgggaaagctggacgtagactggcgtgaactaaacgagttaggttccaagaaggacggagaaaggcatgcctttatcctgcaggataccaaagccctccaccaggtgttcgaacacatgttagacgtaagtaagttaacagacacaatctgtggggtcgggaacatgtccgctaacgccagcgatcaagaaagaacgccctggcacgtgacaatcaagcccaagtcgcaggaaacctgtcggggagctctgataagtgatcagtgggtgctgaccgccgctcactgcttccgggacggcaacgaccacagtctgtggcgggttaatgtgggagaccctaaatcccaatggggcaaggagtttctcatcgagaaggccgtgatatccccgggctttgacgtgttcgccaagaagaaccaagggattctggagttctacggagatgacattgccctcctgaagttggcgcagaaagttaagatgtctacacacgccaggcccatttgcctgccatgcacaatggaagccaacttagcgctcagacgtcctcagggctccacttgcagagaccacgaaaacgagctgctgaataagcagtctgtacctgcacattttgtggcactgaatggttcaaagctaaatatcaaccttaagatgggggtcgagtggacatcttgtgccgaggtcgtttcacaagagaagactatgttccccaatcttactgatgttcgcgaggttgtcactgaccagtttctgtgctcaggcacacaggaggatgagtccccctgcaaaggcggtagcggcgagttgggctctctgcagccgttgccatggctgtgctag

SEQ ID NO: 101449 - DNA, 1134 bp, Artificial Sequence
  derived and/or modified sequence
atgactgaggtcatttcttctctggagaacgccaactataaggatcatgaaaacggtacaggcaccaacacttacgctgctttgaatagcgtgtacctcatgatgaataaccaaatgaggcttttgggaatggaaacgatggcatggcaggagatccgccatgcgatcatccttctgactgatggaaagagtaacatgggaggaagtcctaagaccgccgtggaccacattcgagaaattctgaacatcaaccagaagcgaaatgactatcttgatatatatgctattggtgtgggaaagttggacgtggactggagagaattgaacgaattgggcagcaaaaaggatggtgaaagacacgccttcattctgcaagatactaaagccctccatcaggtattcgagcatatgctggatgtgtccaagctcaccgatacaatttgtggggtggggaatatgagcgctaacgcgagcgaccaggagcgtaccccatggcacgtgacaatcaagccgaagagccaggaaacttgtcgcggtgctttaatctccgatcaatgggtgctgacggctgcccattgcttcagagacggaaatgaccactcgctctggcgggtcaacgtcggcgaccctaaatcacaatgggggaaagaattcctgattgaaaaagcagtcatttctcccggattcgatgtcttcgccaagaagaaccagggtattctggagttctatggtgacgatatcgcgttgttaaaactggctcagaaagtaaagatgtctactcacgctcggcctatttgcttgccttgtacgatggaggcaaatcttgccctgcgaagaccgcagggctctacgtgcagggatcatgagaacgaactgctgaataagcagagcgttcctgcccacttcgtggctctcaatggcagtaagctgaatattaacctgaagatgggggttgagtggaccagttgcgcagaagtcgttagccaagagaagaccatgttccccaatttaacagatgtacgtgaagtagtgaccgaccagttcctctgcagcggaacccaagaggacgagagcccctgcaagggcggtagcggggagcttgggagtttgcagcccctaccgtggctgtgttag

SEQ ID NO: 101450 - DNA, 978 bp, Artificial Sequence
  derived and/or modified sequence
atgggtacgaggagtgcaatcgccgcaccccgtatcctgtgttctcgcggtctgcggagtggcagcgcgagggcgactggctctggggtagagcggagcccatctgccgcaaatcccaccttgatgacctcgctgcgaacttggcccctcccctgggcattgccatctcccacctgtctaggaccaccaatccccccacgcagacagcgcattttttcattcgagatcaacgtttccgtggccatcatcacctttgcatctgagccaaaggtgctcatgtctgtgcttaacgacaattcaagagatatgacagaagtgatatccagtctagaaaacgctaattacaaggaccatgaaaatggaaccggaactaatacttacgcagcgctaaactctgtttatttgatgatgaacaaccagatgaggcttcttggaatggagaccatggcctggcaagaaatccgccatgccatcatccttctaaccgatggcaaatctaatatgggtggttctcccaagaccgccgtggatcatatacgggaaatacttaatatcaaccagaaacggaatgactatctggacatctacgcgattggcgtcgggaagttggacgtggactggagggagctgaacgaacttgggagcaagaaagatggtgagagacatgcctttatcctccaggatacgaaggcacttcaccaggtgttcgagcacatgctagatgtatcaaaactcacagacacaatttgcggggtgggaaatatgagcgcgaacgcgagtgatcaggagaggacaccctggcacgtcaccatcaagcccaagtcacaggaaacttgcaggggtgccctgatctccgaccagtgggtgctgaccgccgcacactgctttagagacggcaacgatcactccctttggcgggttaacgttggggatccgaaaagtcaatgggggaaagagttcttgatcgaaaaggcctag

SEQ ID NO: 101451 - DNA, 1521 bp, Artificial Sequence
  derived and/or modified sequence
atgggcacacgctccgcaatagctgcccctcgtattctttgcagccggggacttaggagcggctccgcccgagccactggctctggcgtcgaacgatctccttccgcggcaatcttctcattcgaaatcaacgtgagcgtggccattatcaccttcgcctctgagcccaaagtactcatgagtgtactgaatgacaacagcagggatatgacggaggtgattagctcattggagaatgccaattacaaggaccacgagaacgggaccggtacgaacacctacgctgccctaaacagtgtttacttgatgatgaacaatcagatgcgattacttggcatggagactatggcttggcaggaaattcgacacgcaattattctgctgaccgatgggaaatcaaacatggggggaagcccgaaaactgccgtggaccacataagagagattctgaatatcaaccagaaacgcaacgattacctcgacatatacgcaatcggggtgggaaagctggacgtcgactggagggaactgaatgaactgggctctaagaaggacggcgaaagacacgcattcatcctgcaggatacaaaggctctgcaccaggttttcgagcacatgctggacgtgagtaaactgaccgatacaatctgtggagtggggaacatgagcgccaacgcatccgaccaagagaggaccccttggcatgttaccattaagcccaaatctcaggagacctgcaggggggcactcatttcagatcagtgggttctcacggcggctcattgttttagagacgggaacgaccattcactttggcgtgtgaacgtaggtgatccaaagagtcagtggggaaaggaatttcttatcgagaaggcggtgatctcacccggattcgatgtcttcgcgaagaagaatcaggggatccttgaattttacggtgacgatattgccctgttaaagctggcccagaaagtcaagatgtccacccacgctagacctatctgcctcccttgtactatggaagccaacttggccctccggagaccccagggcagcacttgccgcgatcacgaaaacgaactgctcaacaaacagtccgtgccagcacattttgttgcactcaatggatcaaaactgaatattaatctgaaaatgggcgtcgagtggacaagttgcgctgaagtggtaagtcaggagaaaaccatgttcccaaatctgacagatgtgcgggaagtggtgactgaccagttcctctgttccggtacccaggaggatgaaagcccatgcaagggcgagagcggcggagctgtgtttttggagcgaagatttcggttttttcaggtcggcttagtgtcctggggactgtataatccctgtctgggtagcgcagacaagaattcaaggaaacgggctccccgtagcaaagtcccccctcccagggattttcatatcaacttgtttcgaatgcagccttggcttcgccaacatctcggtgatgttttaaatttcctgcctctgtag

SEQ ID NO: 101452 - DNA, 1521 bp, Artificial Sequence
  derived and/or modified sequence
atgggaacaaggagtgcgattgctgcccctcggatcctatgctcacgcggactgagatctgggagtgcccgtgcaacaggtagcggtgtggaaagatccccatctgccgctatctttagttttgagattaatgtttctgtggctattattacatttgcttcagaacccaaggtgttaatgagtgttcttaacgataacagtcgcgatatgacagaagtgatttcttccctcgaaaacgcgaattataaggaccatgagaatggcactggaacaaatacatacgccgctttaaattccgtgtacttaatgatgaacaaccaaatgagactgttgggcatggagacaatggcgtggcaagagatcaggcatgcaatcatactgctcaccgacgggaaatctaatatgggaggtagccctaagaccgctgtggatcatatccgggagatccttaacatcaatcagaagcgaaatgattacctggacatatatgccatcggcgttgggaaactggacgtcgattggagggaattgaacgaactaggcagcaagaaagacggcgagagacacgccttcatcttgcaggacactaaagcactccatcaggtcttcgagcacatgcttgatgtgtcaaagctgaccgatacaatttgcggtgtgggcaatatgtcagctaatgcttctgaccaggaacggacgccatggcacgtcacaattaaaccaaagtctcaggagacctgcaggggggcactgattagcgatcagtgggttctcacagcagcacattgcttccgggacggtaacgatcactccctctggagggttaatgtgggcgatcctaagagtcagtgggggaaggaatttctcatcgaaaaagccgtcataagcccaggctttgacgtattcgccaaaaaaaatcagggcatcctggagttctacggcgacgacatagctttgctcaagctggctcagaaggtgaaaatgtcaactcacgcccgtccaatatgtctaccctgcaccatggaagctaacctggccttgcgtaggcctcaaggatctacatgtcgtgaccatgaaaatgaactgttaaataagcagtcagtcccagcccacttcgtcgccctcaatggttcgaagctgaatatcaatcttaagatgggcgtagagtggaccagctgtgcagaggtcgtttcccaggaaaagacaatgttcccaaatctcacagacgtgagggaagtagtaaccgaccagttcctgtgcagcggcacacaggaggacgaaagtccctgtaaaggagaatcgggtggagctgtgtttctggagcgtcggtttcgattcttccaggtgggtttggtcagctggggactctataatccatgtctcgggagtgccgacaaaaacagcagaaaacgggctccacgttccaaagtcccacctccccgtgactttcacatcaacctcttccggatgcaaccctggttgaggcaacacttgggagacgtgcttaattttctcccgctttag

SEQ ID NO: 101453 - DNA, 1521 bp, Artificial Sequence
  derived and/or modified sequence
atgggcacgagatccgccattgccgcacccaggatcctatgcagtaggggtttaaggtcaggcagtgctagggccactggaagcggcgttgagcgctctccttcggcagccatattctcgtttgagattaatgtatctgtggccatcatcacttttgccagtgagcccaaggtgttaatgtccgtcctcaacgataactcaagagatatgacggaggtgattagcagtctggagaatgctaattacaaggaccacgagaacgggactggcaccaacacttacgccgctctaaacagtgtgtatctgatgatgaacaaccagatgagactgctgggtatggagacaatggcctggcaggaaatcagacacgccattattctgctgacagatggtaagtccaatatgggtgggtcgccgaagaccgccgtggaccatataagagagatcctgaacatcaaccagaaacggaacgattacctggacatttacgctataggagtcggaaagctggatgtggattggcgtgaactcaacgaattaggaagtaaaaaggatggcgaacgccacgcgtttattctgcaggacaccaaggctctgcaccaagtgtttgagcatatgctggacgtgtctaaactgacagacacgatttgtggggtcggcaacatgagcgcaaatgcctccgatcaggagagaacgccatggcacgtaacaatcaaacctaagtcccaggagacctgtcggggagccctcatcagcgaccaatgggtacttaccgcagctcactgtttccgcgatggcaatgaccactccctctggcgcgtgaatgtgggtgaccccaagtcacagtggggaaaagagtttctgatcgaaaaagccgtgatttctcccggatttgatgtgttcgctaagaaaaaccagggcatcctggaattctatggcgatgatatcgctttactgaagctggctcaaaaggtcaagatgtctactcacgcacgccctatctgtttgccctgcacgatggaggctaatctggctctgaggcgaccacagggttccacctgtcgcgatcacgagaacgagctgctaaataaacaatccgttcccgctcattttgtggccctgaatggcagtaaattgaatataaatctcaagatgggggtggaatggactagttgcgctgaggttgtgtcccaggagaagacaatgtttccaaatctgaccgatgttcgggaggtggtgaccgatcaattcctgtgtagtggtacgcaggaagatgagagcccgtgcaaaggggaaagtgggggtgcagtgtttctcgaacggcgtttccggttttttcaagtagggctggtcagctggggcctgtacaacccatgtttgggttccgcagataagaattcccggaaaagagccccacgctctaaggtgcccccaccgagggacttccacattaacctgttcaggatgcagccatggctgcgacagcatctcggcgacgtcctgaattttcttcctctgtag

SEQ ID NO: 101454 - DNA, 1134 bp, Artificial Sequence
  derived and/or modified sequence
atgactgaggtgatttcatccctagagaatgcaaattacaaggatcacgagaacggcactggaacaaatacatacgctgcccttaacagcgtttacctgatgatgaataaccagatgagactgttgggcatggagactatggcttggcaagaaatccgccacgccataatcctgctgaccgacgggaaatctaacatgggaggatcccctaaaacagcggtggatcatatacgagagatcctcaacattaaccagaagcgcaatgattatcttgatatctatgcaattggcgtgggtaaactggatgtggactggcgggagcttaacgaactgggctctaaaaaagatggtgaaagacatgcgttcatcttgcaggacacaaaggctttgcatcaagtgttcgagcacatgctggacgtgagcaagctgaccgacaccatctgcggcgtggggaacatgtcagcaaacgctagtgaccaggagagaaccccatggcacgtaactattaagccaaagagtcaggaaacatgccgaggagcattgatcagtgaccagtgggttttaactgccgctcactgtttccgggatgggaacgaccattcattgtggcgggttaacgtgggagatccaaagtctcagtggggtaaggaatttctgatcgagaaagctgtaattagccccggattcgacgtgttcgccaagaagaaccagggcattctggaattctatggcgacgacattgccttgcttaagctggcccagaaggtgaagatgagtacacatgcgcgacctatctgcctgccatgtacaatggaggctaatttggccctgaggaggccccaaggctcaacatgccgcgatcatgagaacgaactcctcaataaacagagcgtacccgcacactttgtggcactgaacggctcaaagctcaatattaatcttaagatgggggtcgaatggacctcttgtgccgaggtggtgtcccaggagaagacaatgtttcccaacctgactgacgtcagggaagttgttaccgaccagtttctgtgctctggtacgcaggaagacgaatccccctgcaaagggggaagcggggagctgggctcattgcagcccctgccttggttgtgttag

SEQ ID NO: 101455 - DNA, 978 bp, Artificial Sequence
  derived and/or modified sequence
atggggaccagaagcgctatagcagcacctcgcattctttgcagtcgaggactgagaagcggctctgccagggcaaccggcagtggggtggaacggtccccaagcgcagccaatccaacactcatgacgtcgctgcggacgtggcccctgccgtgggctcttcccagtcccacctgtcttggcccacccattccgccacgtcgccagaggatttttagctttgaaataaacgtgtcagtcgcgattattactttcgcgtcggaacccaaagtgctgatgtccgtcctcaatgacaacagtcgggacatgaccgaggtgatttcaagtcttgaaaacgccaattacaaagatcacgaaaacggaacaggcacgaatacatacgcagccctgaattctgtctatctcatgatgaataatcaaatgcgcctactcgggatggagacaatggcatggcaagagatcaggcacgctatcattctgctgaccgatgggaagtccaacatgggcggaagccctaagacagcagtggatcacatcagggagatcctgaatataaatcagaagagaaacgactacctggacatttacgctataggcgttggcaagctagacgttgattggcgagaactcaacgagctcggttcaaagaaagacggggaaagacatgcgtttatccttcaggataccaaagccctgcaccaggtgttcgaacatatgctcgacgtgagtaaactcactgacacaatatgcggcgtcggaaacatgagtgctaatgcctcagatcaggaaaggacaccttggcacgtcactattaagcctaagtctcaggagacctgtcgaggagccctgattagcgatcagtgggtgctgacggctgcacattgttttagagatgggaacgatcatagtttgtggcgtgttaatgtgggtgaccccaagagccagtgggggaaggagtttctcattgagaaggcatag

SEQ ID NO: 101456 - DNA, 1521 bp, Artificial Sequence
  derived and/or modified sequence
atgggcacacgatctgctatcgccgctccgagaatactgtgctccagaggtctcaggtcaggcagcgcacgcgctacgggctccggcgtggagcggagtccttccgcagcgatcttcagctttgaaatcaatgtgtccgtagccattataacatttgccagtgaacctaaagtcctgatgtctgtactcaacgacaactcccgggatatgacagaggtaatctcatcactagagaacgccaactacaaggatcacgagaacggcaccgggacaaacacatatgctgctctcaatagcgtttatcttatgatgaataatcagatgcgtctgctgggaatggagacgatggcgtggcaggaaatcagacatgccatcatactattaaccgacggaaagagcaacatgggagggtccccgaaaaccgctgtcgatcacattcgcgaaatcctgaatattaaccagaagcgcaacgattacttagacatctacgctatcggcgtcggcaagctcgacgttgattggcgggagctcaacgaactcggttctaaaaaggatggtgaacggcacgcttttattttgcaggacaccaaagcacttcatcaagtgtttgagcacatgctggatgtcagtaaattgacagacaccatttgtggcgtcggcaacatgtcggccaacgcttccgatcaggaacgcacaccctggcatgtgaccatcaaacccaagtcccaggagacctgtaggggcgctctcatctctgatcagtgggtgctgaccgctgcccactgcttccgtgacggaaatgaccattctctctggcgcgtcaacgttggagaccccaagagccaatgggggaaggaattcctcatagaaaaggctgtgatttctccaggattcgacgtgttcgctaaaaaaaatcagggcatcctggaattctatggcgatgacattgcgctgcttaagttggcccagaaggtcaaaatgtctacccacgcacgacccatctgcttgccatgtactatggaagccaatctggccctgcgcagacctcaaggcagcacgtgccgcgaccatgaaaacgaactcttaaataagcagtctgtccccgctcactttgtcgcattgaacgggtctaagcttaatatcaacctgaagatgggggtggaatggacctcatgtgctgaggtggtctcacaggaaaaaaccatgtttcctaatctgaccgacgtgcgcgaggtggtcaccgatcaattcctgtgttctgggactcaggaggacgaatctccctgcaagggtgagtctggaggtgccgttttccttgagaggcgtttccggttctttcaggtgggtctggtttcatgggggttgtacaacccgtgtttgggcagcgccgataaaaatagcaggaagcgcgctccaaggagcaaggtgccgccacctagagactttcacatcaacctgtttcgaatgcagccatggctacgccaacatttaggcgatgtgctgaacttcctgccactctag

SEQ ID NO: 101457 - DNA, 1521 bp, Artificial Sequence
  derived and/or modified sequence
atgggtacaagatccgcgatcgctgcgcctcggatcctttgttctaggggcctgcggagcggttcagcgagggcaactggttctggcgtcgagaggtcacctagcgcagcaattttcagctttgagatcaatgtgtcagtggccattattacctttgcatcagagccaaaggttctcatgtctgtgcttaacgacaacagccgggacatgacagaagtgatcagctccctggagaatgccaattataaagatcacgagaatgggacaggtactaatacttacgcagctctaaattctgtttatctgatgatgaataaccagatgcgcctgctagggatggagacgatggcctggcaggagattcgccacgccattattctgctgacagatggcaagagtaacatgggcggaagcccaaagacagccgtggaccatattcgcgagatccttaatattaaccagaagaggaatgactatcttgacatctatgccatcggagtcggcaagctcgatgtggattggagggaattgaacgaacttgggtctaagaaggacggcgagaggcatgctttcatcctgcaagataccaaggctctgcatcaggtgtttgagcacatgctggatgtgtcaaaactgactgacacaatctgtggagtgggtaacatgtcggcaaacgcaagcgatcaggagcgaaccccgtggcacgtcactatcaagccaaaatcccaggagacatgccggggagctcttatctccgatcagtgggtgctcactgcagcccattgttttcgtgatgggaacgaccactcactgtggcgtgtaaacgtgggggacccaaagtctcaatggggcaaggagttcctcatcgaaaaagctgtaattagccctgggtttgacgtgtttgccaagaaaaatcagggtatactggagttctacggtgacgatatcgctctccttaagctagcccagaaagtgaaaatgtcaactcacgcccgtcccatatgtctgccttgcacaatggaggccaacctggcgctcagacgccctcagggaagtacctgtcgggatcacgaaaatgaactgctgaacaagcaatctgtgcccgcacacttcgtggcactgaacggaagcaagctcaatatcaatctcaagatgggagtggagtggacctcctgtgccgaggttgtgtctcaggaaaaaacaatgtttcccaatctcacagacgtgcgcgaggtggtaactgaccagttcttgtgctcaggtacccaagaagacgagagtccctgcaagggggaatccggaggagccgtgttcctggagcggcgttttagattttttcaagtcggcctcgtttcctgggggctgtacaatccctgtctcggttctgcagataagaatagtcgcaaacgggctcccaggagcaaggtcccaccaccacgggatttccatataaacctgtttcgaatgcaaccctggctgagacagcatctgggtgacgttctcaactttctgcctctctag

SEQ ID NO: 101458 - DNA, 1134 bp, Artificial Sequence
  derived and/or modified sequence
atgaccgaggtcatttccagtctagagaatgcgaattacaaggatcacgaaaatgggaccggtactaatacatatgcagcactgaattctgtgtatcttatgatgaataaccagatgcgcctcttgggcatggaaaccatggcttggcaggaaatcaggcacgccataatcctgttgactgatggaaaatccaacatgggcggttctcctaagacagccgtcgatcacatcagagagatattgaacattaatcaaaaacgcaacgactacctggatatctatgcaatcggagtgggaaagttggatgtcgactggagggagcttaacgagctgggctcaaaaaaagatggcgagaggcacgccttcatactccaggataccaaggcgctacaccaggtgttcgaacatatgcttgacgtctcaaaactgactgatactatatgcggcgtggggaatatgtccgctaatgcctcagaccaggagcgcactccatggcatgttacgattaagcccaaatcacaggaaacctgcagaggggctctgatatcagaccaatgggttctcacggcagcacactgtttccgcgacggtaatgatcacagtctctggagggtgaacgtgggcgaccccaagtcccagtggggcaaagagtttctcattgaaaaagccgtgatttctccaggatttgatgtgtttgcaaaaaaaaatcaaggcattctcgaattctatggagacgacatcgccctactgaagcttgctcagaaggttaagatgagtacccatgccagaccaatatgtctcccgtgtactatggaggccaatctggctctccggaggcctcagggatcaacctgtcgggatcacgagaatgagcttctaaacaagcaaagcgtgcccgcacattttgtggcgctcaacggctccaaacttaacattaacctaaagatgggcgtggaatggacaagctgcgccgaggtagtatcccaggagaagactatgttcccaaatctgacagatgtgagagaagtggtgaccgaccaatttctgtgctccgggacgcaggaagacgagtccccatgtaagggcggttcaggggagctcggaagcttacagcctttgccttggctatgctag

SEQ ID NO: 101459 - DNA, 978 bp, Artificial Sequence
  derived and/or modified sequence
atgggcacacggtccgccattgctgccccacggattctttgctcaaggggcttgaggagtggttcagcgagagccactgggagtggagtggagcgctcccctagtgcagcgaatccaaccctgatgactagtctacgtacatggcctctgccttgggcactgcccagccccacttgcttgggcccacctataccgccacgacgacaaagaattttctcattcgaaatcaacgtgtcagtcgctattatcacgttcgcctctgagccgaaggttctgatgagcgtccttaatgataatagcagggatatgaccgaggttatcagttcgctcgagaatgccaactataaagaccatgagaacgggacgggtaccaatacttacgccgctctcaattctgtatatctgatgatgaacaaccagatgcgtttattaggtatggagactatggcatggcaagaaataaggcacgccatcatcctgcttacagacggaaagtcaaacatgggtgggtcgcccaagaccgcagtggaccatataagagagatccttaatatcaatcagaagcgcaacgactacctggatatatacgcaataggggttggcaaactcgacgttgactggagggagctcaacgagctgggttctaagaaggatggagaacggcacgccttcatcctacaagacactaaggctctgcatcaggtttttgagcacatgctcgatgtgtctaaacttaccgacacaatttgtggggtgggcaacatgagcgctaacgcctccgaccaggagagaaccccgtggcatgttactattaagcccaagtcacaggaaacttgtcgtggcgctttaattagtgatcagtgggtcctcacagccgctcactgcttccgggacggtaatgaccatagcctatggagagtcaatgtgggcgatccaaagtcccagtggggaaaagagtttctcatcgaaaaagcctag

SEQ ID NO: 101460 - DNA, 978 bp, Artificial Sequence
  derived and/or modified sequence
atggggaccaggagcgctatcgcagctccacgaatactttgttcccgaggcctgagatcaggctccgcgagggcaacaggcagcggggtggaacggtccccaagcgccgcaaatcccacgctgatgacatccctccgaacgtggccccttccgtgggcactgccgtctccaacatgcctcggccctccaattcccccacgtagacaacggattttttcctttgagataaatgtctcagttgcgattatcacatttgcatcggaacccaaggttctgatgtccgttctcaacgataatagtagagacatgaccgaggtgatctcatcactggagaatgctaactataaagaccacgagaatggcacaggcactaatacttacgccgctctgaatagcgtttacctcatgatgaataaccagatgcgccttcttggcatggagacaatggcatggcaggaaatccgccacgccataatcctcctaaccgacggaaaatcaaatatggggggatcaccaaagaccgccgtggatcatatacgcgaaattctcaacattaaccagaaaagaaatgactatcttgacatttatgcaataggggtgggtaagctcgacgtagactggcgggaacttaacgagctaggaagtaaaaaggacggagagcgacacgccttcattctgcaagacactaaagccctccaccaggtgtttgaacatatgctggacgtctctaagctgacagacactatttgcggggttggcaatatgagcgcaaacgccagcgatcaggagcggaccccttggcacgttacaataaagcctaagagccaggaaacctgtaggggagcccttatctctgatcagtgggtactgaccgctgcacattgctttagagacgggaacgaccactcactgtggcgagtgaatgttggcgaccctaaatcccagtggggcaaggagtttctcatcgaaaaagcctag

SEQ ID NO: 101461 - DNA, 1521 bp, Artificial Sequence
  derived and/or modified sequence
atgggcacacgatctgcaattgccgctcccagaatcctgtgttcccggggattgaggtctgggtcggccagagcaaccggttcgggggttgagcggtctccgtccgcagctattttttcctttgagatcaatgtgagcgtcgccatcatcacttttgcgagcgagccaaaggttctcatgagcgtgcttaatgacaattctagggatatgaccgaagtgattagctccctggagaacgctaattataaggaccatgaaaacggaaccggcacgaatacctacgcagccctgaattcagtctaccttatgatgaacaaccagatgagactactgggaatggaaactatggcatggcaggaaattcgtcacgccattattttgctgaccgacggaaagagcaacatgggcggtagtccgaagacagctgtcgatcatattagggagattctgaacattaaccaaaaaagaaacgattatctggatatatatgccatcggggttgggaagctggatgtggactggagggagctgaatgaattgggctccaaaaaagatggagagcgacacgcctttatactacaggatactaaggccctccaccaggtgtttgaacacatgctggacgtaagtaaactcactgatactatctgtggagtcggcaatatgtctgcgaatgcttcggaccaggaaagaacaccctggcacgttaccatcaaaccgaagagccaggagacgtgcagaggcgctctgatttccgaccagtgggttctgaccgcagctcattgtttccgggatggtaacgaccactccctatggcgggtgaacgtcggcgacccgaaatcccagtggggaaaggaattcttaatcgagaaggccgtgattagcccaggcttcgacgtcttcgccaagaagaatcagggcattctagagttttatggagacgacattgcgctgctcaaactggcccagaaggtgaaaatgagtacccatgctagacctatatgcctgccctgcacgatggaggctaatctggcgcttcgacgccctcaggggagcacgtgcagagatcacgaaaatgagttgctgaataaacaatcagtgcccgctcacttcgtggctctcaacggatctaaacttaacatcaatttgaaaatgggagtggagtggacctcttgtgctgaggtggtatcccaggagaagacaatgtttccaaacctgacagacgttagggaagtggtcacagatcagtttctgtgtagcggcactcaggaggacgagagtccttgtaaaggcgaaagcggtggggctgtattcctagagcgcaggttcagattcttccaagtggggttggttagctgggggctctataacccttgcttggggtcggcagataagaatagcaggaagagagcacccagaagtaaagtgcctcctcctcgtgatttccacattaaccttttcaggatgcagccttggctgagacaacacctcggcgacgtgctgaatttcctgccattatag

SEQ ID NO: 101462 - DNA, 978 bp, Artificial Sequence
  derived and/or modified sequence
atgggtactcgatctgctatagctgccccaaggatcctgtgtagtcggggtctgcggagtggaagcgcacgggcaaccggctccggcgtcgagcgatctccaagcgccgcaaatccaaccctgatgacgagcctccggacctggcctcttccctgggccttgccatcgccaacgtgcctcggcccacccataccacccaggagacagcggatcttctcattcgagatcaatgtgagcgtcgcgattatcaccttcgcctcagaacccaaggttcttatgagtgtgctgaatgacaactctcgcgacatgaccgaagtcatctcgtctctcgaaaatgctaactataaagaccatgagaatggtacaggaactaacacatatgctgcgttaaatagcgtgtatctgatgatgaataaccagatgcgcctgctgggcatggaaaccatggcatggcaggaaatccgacacgcgattatcctcctgaccgacggaaagagtaatatggggggatcacctaagactgccgtggaccacattagagaaatcctgaacattaaccaaaaacgcaacgattatctggacatctacgctattggagtaggaaaacttgatgtggattggcgcgaattaaatgagttgggttctaagaaggacggagagcgccacgctttcattctgcaggacaccaaagcgttacaccaagtcttcgagcatatgcttgatgtcagtaagttaaccgacacaatctgtggagtgggaaacatgagcgccaacgctagcgatcaagagcgaacgccttggcatgtcacgatcaaaccgaagagccaggaaacctgcaggggtgctcttatatccgatcagtgggtgctgacagctgcacactgcttcagagatggaaacgaccactcgttatggcgagtgaacgttggtgatcccaagagtcagtggggaaaagaattcttgatagagaaggcatag

SEQ ID NO: 101463 - DNA, 1134 bp, Artificial Sequence
  derived and/or modified sequence
atgacggaggtcattagcagcttggaaaatgcgaattacaaggaccacgaaaacggtacaggaaccaacacctacgccgcattgaactctgtgtacttaatgatgaacaatcagatgcgcctgctgggtatggagacaatggcctggcaggaaattaggcacgcgattatcctgctcaccgatggcaagtctaacatggggggttctccgaagaccgcagtcgaccatatacgcgagattctcaacatcaaccaaaagcgtaatgattatctcgatatctacgccataggggtggggaagcttgatgttgactggagggagctgaatgagctgggaagcaagaaggacggggagaggcatgcctttattttgcaggacaccaaggctctccaccaagtgttcgagcacatgctcgatgtctcaaagctcaccgacactatttgcggggtcggcaacatgtccgccaatgctagcgatcaggaacgcactccttggcacgtgacaataaaacctaagagtcaggagacgtgccgcggtgccctgatcagcgaccagtgggtcctgaccgcagctcactgctttcgtgacggaaatgaccatagcctgtggagagtcaacgtcggggaccctaagagtcaatggggcaaagaatttttgattgagaaagccgtgatcagtcctggattcgatgtttttgcaaagaaaaaccagggtatcctggaattttatggagatgacatcgccttgctcaaattggcccagaaggtgaaaatgagcacccacgccaggcctatctgtctgccttgcaccatggaggctaatttggctctgagacgcccacagggctcgacctgtagagaccacgagaacgagctgctgaataagcagtccgtgccggctcattttgtcgctctgaacggctcaaagcttaacatcaacctgaaaatgggggtggagtggacgagttgtgcggaggtagtgtctcaggaaaaaaccatgtttcccaatctgacggacgttcgggaagtagtgacagaccagttcctgtgttcaggcacacaggaagatgagagtccctgcaaaggaggatccggagagttgggaagcctccagcccctgccttggctctgctag

SEQ ID NO: 101464 - DNA, 1134 bp, Artificial Sequence
  derived and/or modified sequence
atgactgaagtaatctcatccctcgagaatgcgaattacaaagatcacgaaaatgggaccggcacaaatacatatgctgctttaaactctgtgtacctgatgatgaacaaccagatgcgacttctagggatggaaaccatggcctggcaggagatccgtcatgccatcatcctgctgacagatggaaaaagtaacatgggaggcagtcctaagacagcagtggaccacatccgagagattctcaacattaaccagaaacggaatgactacctggacatctacgctattggggtaggcaagctcgatgtggattggcgggaactaaatgagctgggctccaagaaagacggggagcggcacgcgtttatcctgcaagatacgaaagctctgcaccaggttttcgagcatatgcttgatgtgagtaaactaactgacactatttgcggggttggaaatatgtctgcgaatgcatctgatcaggaacgcaccccttggcatgtcaccatcaaaccgaagtctcaagaaacatgcaggggagccctgatcagcgatcagtgggtccttactgcagcccactgtttcagggacggaaacgatcactccctgtggagggtgaatgtcggcgaccccaagagccagtgggggaaggagtttttaatcgagaaggccgtcatctctccgggtttcgacgtctttgccaagaagaatcagggaatcctagagttttacggggacgacatagccctcctcaagctggcccagaaggtcaagatgtctactcatgcacgccctatttgcctcccatgtacgatggaggctaatctggcacttcgcaggcctcaggggtccacctgcagggatcatgagaatgagctcctcaacaaacagtctgtgccagctcactttgtagctctgaacgggtctaaactcaacatcaacctcaaaatgggcgttgagtggacgtcctgcgcagaagtggtatcccaggaaaagaccatgtttccaaatcttacagacgtcagggaggtagtcaccgatcagtttttatgttcaggcacccaggaagatgagtcaccctgcaaaggaggcagtggagaattaggcagcctgcagcccctcccatggctctgctag

SEQ ID NO: 101465 - DNA, 978 bp, Artificial Sequence
  derived and/or modified sequence
atgggaacccgttccgctatcgctgcacctcgcattttgtgttcccggggtcttcgaagcggcagcgcccgagccacggggtccggtgtcgagcgctctcccagcgctgcgaatcctactctaatgacatccctgagaacatggcccttaccctgggccctgccctcaccaacatgtctgggccctccaattccacccagaagacagcggatttttagcttcgagataaatgtgtctgtcgctatcatcacatttgcatctgaaccaaaggtcctcatgtcagtgctgaatgacaacagtcgggatatgacagaggtgatttcctctctggagaatgctaactacaaggaccacgaaaacgggaccggcaccaatacgtacgctgctttaaacagcgtctacctcatgatgaataatcagatgagactgctcggcatggagacgatggcctggcaggaaatacgccacgcaataattctgctcactgatggaaagtccaatatggggggaagccccaaaactgccgttgaccatatcagggagatccttaacattaaccagaaacgcaatgactacctggatatttatgctattggcgtgggcaagttggatgtcgactggcgcgagttgaatgaactcggttctaaaaaagacggagaaaggcacgcttttatactgcaggacaccaaggcattgcaccaggtttttgagcacatgctcgatgttagcaagctcaccgacactatatgcggggttggcaatatgagcgcaaatgcaagcgaccaggaacgcacaccatggcatgtgaccatcaaacccaagtcccaggagacatgtcgaggggcactcataagtgatcagtgggttctgaccgctgcacactgttttagggacggcaacgaccactccttatggagggtaaatgtaggtgaccccaagtcccagtggggcaaggaatttctgatagagaaggcctag

SEQ ID NO: 101466 - DNA, 1134 bp, Artificial Sequence
  derived and/or modified sequence
atgaccgaggtaattagctcactggaaaatgcaaattacaaggatcacgagaatggcaccggcaccaatacatatgccgctctgaattccgtgtatctcatgatgaataatcagatgcgtctcctggggatggagacgatggcatggcaagagatccgccacgccatcattctccttaccgatggaaaatcgaatatggggggatcccctaagacggctgtggatcacatccgtgaaatcttgaacataaatcaaaagcgtaacgattacctggacatttatgcaatcggggtgggaaagctggatgtggactggcgcgagctgaacgaactgggaagcaagaaagacggggagagacacgccttcatcctgcaggatactaaggccctgcaccaagtgttcgagcatatgctggatgtcagtaagcttacagatacgatctgtggtgtgggaaacatgtcagcaaacgcaagcgaccaggaaagaaccccctggcacgtaaccatcaaacctaaatcccaggaaacatgtcgcggtgctttgatctcagaccagtgggtgctaacagcggctcactgttttcgggacgggaacgaccacagcctgtggcgtgtaaatgtgggggacccgaagtcgcagtggggcaaggaattcttaatcgagaaggccgttatatcccccggattcgacgtattcgccaaaaagaatcaaggaatcctggagttctatggcgacgacatagcactgctgaagctagcgcagaaagtgaaaatgagcacccatgctaggccgatctgtctcccttgcaccatggaggcgaaccttgcactgaggcggcctcaaggctccacatgccgggatcacgagaacgagctgctgaacaaacagtccgtccctgcccatttcgttgcactgaacgggtccaaattgaacataaatctgaagatgggcgtcgaatggacatcctgtgccgaggtcgtcagccaggagaaaaccatgtttcctaaccttaccgacgttcgcgaagtcgtcaccgaccaattcttatgctctgggactcaggaggatgagagtccatgcaagggtggatccggcgaactgggcagcttacaacccctgccctggctatgttag

SEQ ID NO: 101467 - DNA, 978 bp, Artificial Sequence
  derived and/or modified sequence
atgggtacccgatctgcgattgccgctccgaggattctctgtagtcgaggactgaggagcggatccgcccgagcaaccggctcaggcgttgaacgctctccttccgctgctaaccccaccctaatgacgtccttaagaacatggcctcttccatgggctttaccctctcccacctgcctgggtccgcctatacctccaagacggcagcgcattttttcatttgagattaacgtgtctgtcgcaataatcactttcgcaagcgagcccaaggtgctgatgtccgtgctgaacgataactcgagggacatgactgaggttatctcgagtttagagaacgccaactataaagaccacgagaatgggacaggcacgaatacctatgccgcactgaattctgtgtacttgatgatgaataaccagatgaggttactgggtatggaaacaatggcctggcaagaaattagacacgctattatcctgctcacagatggcaagtcaaacatgggtggatcacccaagaccgctgtggaccacattcgggagatccttaatataaatcagaaaaggaacgattatctcgatatctatgccattggggtcggcaagctagatgttgactggagggagctaaatgagcttggaagcaagaaggatggtgagcgtcacgccttcatcctccaggatacaaaggcattgcaccaggttttcgagcacatgcttgacgtcagtaagctaaccgatacgatctgcggtgtgggtaatatgagtgctaacgcaagcgatcaggaaagaaccccttggcacgtcaccatcaagccaaagagtcaagaaacctgcagaggggcactgatctccgatcaatgggtactcactgctgcccactgctttcgggacgggaatgatcatagcctgtggcgggtgaacgttggggacccgaagtcacaatggggaaaggagttcctgatcgaaaaggcctag

SEQ ID NO: 101468 - DNA, 1134 bp, Artificial Sequence
  derived and/or modified sequence
atgacagaagtgatctcttctctagagaatgctaattataaggaccacgaaaatggaacagggacaaatacctatgccgcactgaattctgtgtacttaatgatgaataatcagatgcgactattgggtatggagacaatggcgtggcaggagattcgacacgcaattatcctcctgaccgatggcaaatccaatatgggagggtcacctaaaaccgctgttgaccacatccgggagattctgaatataaatcagaagagaaacgactacctggatatctacgctatcggcgtgggcaaattggatgtggactggagggaattaaacgagcttggcagcaaaaaggacggcgagcggcacgccttcatattacaggatacaaaggcgctgcatcaagtatttgaacacatgttggatgtgtccaaacttactgacactatctgtggggtgggtaacatgtccgccaacgcttctgaccaagagcggacaccttggcacgtgacaattaagccgaagagccaggagacatgtcggggtgcgcttatttctgaccaatgggtcctgactgccgcacactgttttcgcgatggaaacgatcatagtttgtggcgtgtgaatgtaggtgaccccaaatctcaatggggaaaggagttcctcatcgagaaggccgtcatttctccagggttcgacgtattcgctaaaaagaatcagggcattcttgaattctacggggatgacatcgcccttctcaaattggcccagaaggttaagatgtccactcacgcccgtcccatctgtctgccgtgtactatggaggccaatctggcactgagacgaccgcagggctcaacctgccgtgatcacgagaacgaattgctcaataaacagtccgttcccgctcactttgtggccttgaatggctctaagctaaatataaaccttaagatgggggtggagtggaccagctgcgcggaggtggtatcacaggagaaaaccatgtttccaaatctgacagatgtgagggaagtcgtgacggaccaattcctctgttcaggtacccaggaagacgagtctccctgcaaggggggatcaggtgaactaggttctttacaacctcttccatggctgtgctag

SEQ ID NO: 101469 - DNA, 1134 bp, Artificial Sequence
  derived and/or modified sequence
atgaccgaagtcatctcaagtttagaaaacgccaactataaagaccacgagaacggtaccggtacaaacacatacgccgcactgaatagcgtatatttgatgatgaataaccaaatgcgactactggggatggaaactatggcttggcaggagataagacatgctattatcttactcacagatgggaaaagcaacatgggcggttcacccaagacagcggtagaccatatcagggaaattctcaatattaatcagaaaagaaacgattatcttgacatatatgccatcggggtaggcaagctcgatgtcgactggcgagaattaaacgagctaggttctaaaaaggacggggaaagacatgcatttattctgcaggataccaaagcactgcaccaggtattcgagcacatgctggacgtcagtaagttgaccgacactatttgcggcgttggaaatatgtcagctaatgcctccgaccaggaaaggactccgtggcatgttaccataaaaccaaaaagccaggagacttgtcggggcgctctgattagtgaccaatgggtgctcactgcagcacactgttttcgagacggtaacgaccattctctgtggcgggtgaatgttggagacccaaagtcccagtgggggaaggaatttttgattgaaaaggctgttatctctcctggctttgacgtgttcgcaaagaagaatcaaggaatattggagttctacggtgacgatattgccctgcttaagctcgcacaaaaggtgaagatgtcaacccatgcacggccaatctgtcttccttgcacaatggaagcaaacttagcactgagacgtccccaaggtagtacttgtagagaccacgagaatgagctccttaacaaacagagtgttcccgcacactttgttgccctcaatggctccaagttgaatatcaaccttaaaatgggcgtcgaatggacatcgtgtgctgaggtggtgtcccaggagaagactatgttccctaacctgaccgacgtgagggaagtggttacggatcagttcctgtgcagcgggacacaggaggacgaatcgccttgtaagggaggcagcggcgaactgggcagcctacagccactgccctggttatgctag

SEQ ID NO: 101470 - DNA, 978 bp, Artificial Sequence
  derived and/or modified sequence
atgggaaccagatccgccattgccgcccctagaattctgtgctcaagaggacttaggagtggttctgcccgcgccaccggttctggagttgaaaggtccccctccgccgctaaccctacgctgatgacatccctacggacctggcctctgccctgggctcttcctagccccacttgtctgggaccacctattccgcccagacgacagcggatctttagcttcgagatcaatgtgtcagtcgctatcattacattcgcatccgagcccaaggtgctaatgtccgtactcaatgacaattcccgcgatatgactgaggtgattagctcgttagaaaatgctaactacaaagaccatgaaaacggaaccggaacaaatacttatgcagccctgaactccgtttaccttatgatgaacaatcagatgagacttctgggaatggagaccatggcttggcaagaaatcaggcatgcaataatcctgctgacggatgggaagtcaaacatgggcggctctccaaaaacagccgtggatcacatccgcgaaatactcaatatcaatcagaaacgtaacgattatttagatatctacgccattggagtgggtaaactggatgtggactggagggagctgaatgagctaggaagtaaaaaagatggtgagagacatgcatttatactgcaggatacgaaggccctgcaccaagtgttcgaacatatgctggatgtgagtaagttaactgacacaatctgcggtgtgggcaacatgagcgcaaacgcgtcggaccaggaaaggacaccctggcatgtaaccatcaagcccaaaagccaggagacctgtcgcggagcacttatttctgatcagtgggtcttgacagcagctcactgttttcgggatgggaatgaccactcactttggcgagtgaacgtgggagaccctaagagtcagtggggaaaagagttcctgatcgaaaaagcctag

SEQ ID NO: 101471 - DNA, 1134 bp, Artificial Sequence
  derived and/or modified sequence
atgaccgaagtcatctcaagtttagaaaacgccaactataaagaccacgagaacggtaccggtacaaacacatacgccgcactgaatagcgtatatttgatgatgaataaccaaatgcgactactggggatggaaactatggcttggcaggagataagacatgctattatcttactcacagatgggaaaagcaacatgggcggttcacccaagacagcggtagaccatatcagggaaattctcaatattaatcagaaaagaaacgattatcttgacatatatgccatcggggtaggcaagctggacgtcgattggagagaattgaatgagttaggcagcaaaaaggacggcgaacgtcatgcattcatcctgcaggataccaaagccctccatcaagtatttgagcacatgctcgacgtgagcaagctgaccgacaccatatgcggagttggcaatatgagcgccaatgcatcggatcaagaacgaactccctggcacgtgacaattaaacctaagagtcaggagacctgtcgcggtgctctgattagtgatcaatgggtgttgaccgctgcccactgctttagagacgggaatgaccactctctgtggcgggtgaatgttggagacccaaagtcccagtgggggaaggaatttttgattgaaaaggctgttatctctcctggctttgacgtgttcgcaaagaagaatcaaggaatattggagttctacggtgacgatattgccctgcttaagctcgcacaaaaggtgaagatgtcaacccatgcacggccaatctgtcttccttgcacaatggaagcaaacttagcactgagacgtccccaaggtagtacttgtagagaccacgagaatgagctccttaacaaacagagtgttcccgcacattttgttgccctgaacggatccaagcttaacattaacctcaaaatgggggtagagtggacgtcctgtgctgaagtcgtgagccaggagaaaactatgtttcctaacttgacagacgttcgagaggtggttaccgatcaattcctttgcagtggtacccaggaagacgaaagcccttgtaagggaggttctggggaattaggcagcctccagccccttccatggctgtgctag

SEQ ID NO: 101472 - DNA, 978 bp, Artificial Sequence
  derived and/or modified sequence
atgggaacacgctccgctatcgctgccccgagaattctctgcagccgaggtttacggtctgggtccgcacgcgccacaggctctggggtcgagcgttcaccatctgctgcaaacccaacccttatgacttccctgcgaacttggcctctcccctgggcactcccgtcccccacgtgtcttggcccgccaattccacccagaagacagcggatcttttcttttgaaattaatgtgtctgtggcaatcatcactttcgcttccgagcctaaggtactgatgagcgtccttaacgacaattcacgcgatatgactgaggtgattagctcgttagaaaatgctaactacaaagaccatgaaaacggaaccggaacaaatacttatgcagccctgaactccgtttaccttatgatgaacaatcagatgagacttctgggaatggagaccatggcttggcaagaaatcaggcatgcaataatcctgctgacggatgggaagtcaaacatgggcggctctccaaaaacagccgtggatcacatccgcgaaatactcaatatcaatcagaaacgtaacgattatttagatatctacgccattggagtggggaagctcgacgtggattggcgcgagctgaatgaactcggaagtaaaaaagatggcgaaaggcatgcatttatcctgcaagacacgaaggcacttcaccaagttttcgagcacatgctggacgtaagcaagttaaccgataccatctgcggcgtgggaaatatgtcagccaatgcatccgatcaggaacgcacaccgtggcacgttacaattaaaccaaaatcccaagaaacctgtcgtggagcgttaatctcagatcaatgggtcttgaccgccgctcactgcttcagggacggaaacgatcacagtctgtggagggttaacgtgggcgatccaaaaagccagtggggtaaagaatttctgattgagaaggcctag

SEQ ID NO: 101473 - DNA, 2150 bp, Artificial Sequence
  derived and/or modified sequence
cccctgagagcggcctcggagatggctgtgactgtcctaagctgggagctgcaagggagaattcctgtcattcctggcctcagttctgcagggaccgagggcgagacacgcctgggcccaggtgtggcgtctctgtccccatctggttttagctggccactgccccaacccaggcatttcactgggcgcagtgcggacaggcttccgctttggtcatggggacaaggtccgctatcgctgctcctcgaatcttgtgctcacggggtcttcggagcgggagtgccagggcaacggggtctggagtggaacggagcccatctgccgccaaccctactcttatgacttccctgaggacgtggcccctgccctgggcacttccttctcccacatgcttggggccaccaatcccacccagaagacaaaggatcttcagctttgagatcaatgtgagcgttgccattatcacctttgcctcagagcccaaagtcctcatgtctgtcctgaacgacaactcccgggatatgactgaggtgatcagcagcctggaaaatgccaactataaagatcatgaaaatggaactgggactaacacctatgcggccttaaacagtgtctatctcatgatgaacaaccaaatgcgactcctcggcatggaaacgatggcctggcaggaaatccgacatgccatcatccttctgacagatggaaagtccaatatgggtggctctcccaagacagctgttgaccatatcagagagatcctgaacatcaaccagaagaggaatgactatctggacatctatgccatcggggtgggcaagctggatgtggactggagagaactgaatgagctagggtccaagaaggatggtgagaggcatgccttcattctgcaggacacaaaggctctgcaccaggtctttgaacatatgctggatgtctccaagctcacagacaccatctgcggggtggggaacatgtcagcaaacgcctctgaccaggagaggacaccctggcatgtcactattaagcccaagagccaagagacctgccggggggccctcatctccgaccaatgggtcctgacagcagctcattgcttccgcgatggcaacgaccactccctgtggagggtcaatgtgggagaccccaaatcccagtggggcaaagaattccttattgagaaggcgtgatctccccagggtttgatgtctttgccaaaaagaaccagggaatcctggagttctatggtgatgacatagctctgctgaagctggcccagaaagtaaagatgtccacccatgccaggcccatctgccttccctgcacgatggaggccaatctggctctgcggagacctcaaggcagcacctgtagggaccatgagaatgaactgctgaacaaacagagtgttcctgctcattttgtcgccttgaatgggagcaaactgaacattaaccttaagatgggagtggagtggacaagctgtgccgaggttgtctcccaagaaaaaaccatgttccccaacttgacagatgtcagggaggtggtgacagaccagttcctatgcagtgggacccaggaggatgagagtccctgcaagggcaggagaatctgggggagcagttttccttgagcggagattcaggttttttcaggtgggtctggtgagctggggtctttacaacccctgccttggctctgctgacaaaaactcccgcaaaagggcccctcgtagcaaggtcccgccgccacgagactttcacatcaatctcttccgcatgcagccctggctgaggcagcacctgggggatgtcctgaattttttacccctctagccatggccactgagccctctgctgccctgccagaatctgccgcccctccatcttctacctctgaatggccacccttagaccctgtgatccatcctctctcctagctgagtaaatccgggtctctaggatgccagaggcagcgcacacaagctgggaaatcctcagggctcctaccagcaggactgcctcgctgccccacctcccgctccttggcctgtccccagattccttccctggttgacttgactcatgcttgtttcactttcacatggaatttcccagttatgaaattaataaaaatcaatggtttcc

SEQ ID NO: 101474 - DNA, 1906 bp, Artificial Sequence
  derived and/or modified sequence
cattttcccctgagagcggcctcggagatggctgtgactgtcctaagctgggagctgcaagggagaattcctgtcattcctggcctcagttctgcagggaccgagggcgagacacgcctgggcccaggtgtggcgtctctgtccccatctggttttagctggccactgccccaacccaggcatttcactgggcgcagtgcggacaggcttccgctttggtcatggggacaaggtccgctatcgctgctcctcgaatcttgtgctcacggggtcttcggagcgggagtgccagggcaacggggtctggagtggaacggagcccatctgccgccatcttcagctttgagatcaatgtgagcgttgccattatcacctttgcctcagagcccaaagtcctcatgtctgtcctgaacgacaactcccgggatatgactgaggtgatcagcagcctggaaaatgccaactataaagatcatgaaaatggaactgggactaacacctatgcggccttaaacagtgtctatctcatgatgaacaaccaaatgcgactcctcggcatggaaacgatggcctggcaggaaatccgacatgccatcatccttctgacagatggaaagtccaatatgggtggctctcccaagacagctgttgaccatatcagagagatcctgaacatcaaccagaagaggaatgactatctggacatctatgccatcggggtgggcaagctggatgtggactggagagaactgaatgagctagggtccaagaaggatggtgagaggcatgccttcattctgcaggacacaaaggctctgcaccaggtctttgaacatatgctggatgtctccaagctcacagacaccatctgcggggtggggaacatgtcagcaaacgcctctgaccaggagaggacaccctggcatgtcactattaagcccaagagccaagagacctgccggggggccctcatctccgaccaatgggtcctgacagcagctcattgcttccgcgatggcaacgaccactccctgtggagggtcaatgtgggagaccccaaatcccagtggggcaaagaattccttattgagaaggcggtgatctccccagggtttgatgtctttgccaaaaagaaccagggaatcctggagttctatggtgatgacatagctctgctgaagctggcccagaaagtaaagatgtccacccatgccaggcccatctgccttccctgcacgatggaggccaatctggctctgcggagacctcaaggcagcacctgtagggaccatgagaatgaactgctgaacaaacagagtgttcctgctcattttgtcgccttgaatgggagcaaactgaacattaaccttaagatgggagtggagtggacaagctgtgccgaggttgtctcccaagaaaaaaccatgttccccaacttgacagatgtcagggaggtggtgacagaccagttcctatgcagtgggacccaggaggatgagagtccctgcaagggagaatctgggggagcagttttccttgagcggagattcaggttttttcaggtgggtctggtgagctggggtctttacaacccctgccttggctctgctgacaaaaactcccgcaaaagggcccctcgtagcaaggtcccgccgccacgagactttcacatcaatctcttccgcatgcagccctggctgaggcagcacctgggggatgtcctgaattttttacccctctagccatggccactgagccctctgctgccctgccagaatctgccgcccctccatcttctacctctgaatggccacccttagaccctgtgatccatcctctctcctagctgagtaaatccgggtctctaggatgccagaggcagcgcacacaagctgggaaatcctca

SEQ ID NO: 101475 - DNA, 2602 bp, Artificial Sequence
  derived and/or modified sequence
agtacacaaagcctgtgggggagatctattgaccctatagatatattagcatcagggagacagggcaaaggtttcacccttcagttcagtccccaatccctgcttattatttccctaacagaagaccatcccccttgccactccctggtttttcttctctggcagcaatgaagcagctgctgacccagctctagttttcgggaagtcagatgaccttttccctcccgcggctctctacctctcgccgcccctagggaggacaccatgggcccactgatggttcttttttgcctgctgttcctgtacccaggtctggcagactcggctccctcctgccctcagaacgtgaatatctcgggtggcaccttcaccctcagccatggctgggctcctgggagccttctcacctactcctgcccccagggcctgtacccatccccagcatcacggctgtgcaagagcagcggacagtggcagaccccaggagccacccggtctctgtctaaggcggtctgcaaacctgtgcgctgtccagcccctgtctcctttgagaatggcatttataccccacggctggggtcctatcccgtgggtggcaatgtgagcttcgagtgtgaggatggcttcatattgcggggctcgcctgtgcgtcagtgtcgccccaacggcatgtgggatggagaaacagctgtgtgtgataatggggctggccactgccccaacccaggcatttcactgggcgcagtgcggacaggcttccgctttggtcatggggacaaggtccgctatcgctgctcctcgaatcttgtgctcacggggtcttcggagcgggagtgccagggcaacggggtctggagtggaacggagcccatctgccgccatcttcagctttgagatcaatgtgagcgttgccattatcacctttgcctcagagcccaaagtcctcatgtctgtcctgaacgacaactcccgggatatgactgaggtgatcagcagcctggaaaatgccaactataaagatcatgaaaatggaactgggactaacacctatgcagccttaaacagtgtctatctcatgatgaacaaccaaatgcgactcctcggcatggaaacgatggcctggcaggaaatccgacatgccatcatccttctgacagatggaaagtccaatatgggtggctctcccaagacagctgttgaccatatcagagagatcctgaacatcaaccagaagaggaatgactatctggacatctatgccatcggggtgggcaagctggatgtggactggagagaactgaatgagctagggtccaagaaggatggtgagaggcatgccttcattctgcaggacacaaaggctctgcaccaggtctttgaacatatgctggatgtctccaagctcacagacaccatctgcggggtggggaacatgtcagcaaacgcctctgaccaggagaggacaccctggcatgtcactattaagcccaagagccaagagacctgccggggggccctcatctccgaccaatgggtcctgacagcagctcattgcttccgcgatggcaacgaccactccctgtggagggtcaatgtgggagaccccaaatcccagtggggcaaagaattccttattgagaaggcggtgatctccccagggtttgatgtctttgccaaaaagaaccagggaatcctggagttctatggtgatgacatagctctgctgaagctggcccagaaagtaaagatgtccacccatgccaggcccatctgccttccctgcacgatggaggccaatctggctctgcggagacctcaaggcagcacctgtagggaccatgagaatgaactgctgaacaaacagagtgttcctgctcattttgtcgccttgaatgggagcaaactgaacattaaccttaagatgggagtggagtggacaagctgtgccgaggttgtctcccaagaaaaaaccatgttccccaacttgacagatgtcagggaggtggtgacagaccagttcctatgcagtgggacccaggaggatgagagtccctgcaagggagaatctgggggagcagttttccttgagcggagattcaggttttttcaggtgggtctggtgagctggggtctttacaacccctgccttggctctgctgacaaaaactcccgcaaaagggcccctcgtagcaaggtcccgccgccacgagactttcacatcaatctcttccgcatgcagccctggctgaggcagcacctgggggatgtcctgaattttttacccctctagccatggccactgagccctctgctgccctgccagaatctgccgcccctccatcttctacctctgaatggccacccttagaccctgtgatccatcctctctcctagctgagtaaatccgggtctctaggatgccagaggcagcgcacacaagctgggaaatcctcagggctcctaccagcaggactgcctcgctgccccacctcccgctccttggcctgtccccagattccttccctggttgacttgactcatgcttgtttcactttcacatggaatttcccagttatgaaattaataaaaatcaatggtttcc

SEQ ID NO: 101476 - DNA, 2602 bp, Artificial Sequence
  derived and/or modified sequence
agtacacaaagcctgtgggggagatctattgaccctatagatatattagcatcagggagacagggcaaaggtttcacccttcagttcagtccccaatccctgcttattatttccctaacagaagaccatcccccttgccactccctggtttttcttctctggcagcaatgaagcagctgctgacccagctctagttttcgggaagtcagatgaccttttccctcccgcggctctctacctctcgccgcccctagggaggacaccatgggcccactgatggttcttttttgcctgctgttcctgtacccaggtctggcagactcggctccctcctgccctcagaacgtgaatatctcgggtggcaccttcaccctcagccatggctgggctcctgggagccttctcacctactcctgcccccagggcctgtacccatccccagcatcacggctgtgcaagagcagcggacagtggcagaccccaggagccacccggtctctgtctaaggcggtctgcaaacctgtgcgctgtccagcccctgtctcctttgagaatggcatttataccccacggctggggtcctatcccgtgggtggcaatgtgagcttcgagtgtgaggatggcttcatattgcggggctcgcctgtgcgtcagtgtcgccccaacggcatgtgggatggagaaacagctgtgtgtgataatggggctggccactgccccaacccaggcatttcactgggcgcagtgcggacaggcttccgctttggtcatggggacaaggtccgctatcgctgctcctcgaatcttgtgctcacggggtcttcggagcgggagtgccagggcaacggggtctggagtggaacggagcccatctgccgccatcttcagctttgagatcaatgtgagcgttgccattatcacctttgcctcagagcccaaagtcctcatgtctgtcctgaacgacaactcccgggatatgactgaggtgatcagcagcctggaaaatgccaactataaagatcatgaaaatggaactgggactaacacctatgcggccttaaacagtgtctatctcatgatgaacaaccaaatgcgactcctcggcatggaaacgatggcctggcaggaaatccgacatgccatcatccttctgacagatggaaagtccaatatgggtggctctcccaagacagctgttgaccatatcagagagatcctgaacatcaaccagaagaggaatgactatctggacatctatgccatcggggtgggcaagctggatgtggactggagagaactgaatgagctagggtccaagaaggatggtgagaggcatgccttcattctgcaggacacaaaggctctgcaccaggtctttgaacatatgctggatgtctccaagctcacagacaccatctgcggggtggggaacatgtcagcaaacgcctctgaccaggagaggacaccctggcatgtcactattaagcccaagagccaagagacctgccggggggccctcatctccgaccaatgggtcctgacagcagctcattgcttccgcgatggcaacgaccactccctgtggagggtcaatgtgggagaccccaaatcccagtggggcaaagaattccttattgagaaggcggtgatctccccagggtttgatgtctttgccaaaaagaaccagggaatcctggagttctatggtgatgacatagctctgctgaagctggcccagaaagtaaagatgtccacccatgccaggcccatctgccttccctgcacgatggaggccaatctggctctgcggagacctcaaggcagcacctgtagggaccatgagaatgaactgctgaacaaacagagtgttcctgctcattttgtcgccttgaatgggagcaaactgaacattaaccttaagatgggagtggagtggacaagctgtgccgaggttgtctcccaagaaaaaaccatgttccccaacttgacagatgtcagggaggtggtgacagaccagttcctatgcagtgggacccaggaggatgagagtccctgcaagggagaatctgggggagcagttttccttgagcggagattcaggttttttcaggtgggtctggtgagctggggtctttacaacccctgccttggctctgctgacaaaaactcccgcaaaagggcccctcgtagcaaggtcccgccgccacgagactttcacatcaatctcttccgcatgcagccctggctgaggcagcacctgggggatgtcctgaattttttacccctctagccatggccactgagccctctgctgccctgccagaatctgccgcccctccatcttctacctctgaatggccacccttagaccctgtgatccatcctctctcctagctgagtaaatccgggtctctaggatgccagaggcagcgcacacaagctgggaaatcctcagggctcctaccagcaggactgcctcgctgccccacctcccgctccttggcctgtccccagattccttccctggttgacttgactcatgcttgtttcactttcacatggaatttcccagttatgaaattaataaaaatcaatggtttcc

SEQ ID NO: 101477 - DNA, 2701 bp, Artificial Sequence
  derived and/or modified sequence
agtacacaaagcctgtgggggagatctattgaccctatagatatattagcatcagggagacagggcaaaggtttcacccttcagttcagtccccaatccctgcttattatttccctaacagaagaccatcccccttgccactccctggtttttcttctctggcagcaatgaagcagctgctgacccagctctagttttcgggaagtcagatgaccttttccctcccgcggctctctacctctcgccgcccctagggaggacaccatgggcccactgatggttcttttttgcctgctgttcctgtacccaggtctggcagactcggctccctcctgccctcagaacgtgaatatctcgggtggcaccttcaccctcagccatggctgggctcctgggagccttctcacctactcctgcccccagggcctgtacccatccccagcatcacggctgtgcaagagcagcggacagtggcagaccccaggagccacccggtctctgtctaaggcggtctgcaaacctgtgcgctgtccagcccctgtctcctttgagaatggcatttataccccacggctggggtcctatcccgtgggtggcaatgtgagcttcgagtgtgaggatggcttcatattgcggggctcgcctgtgcgtcagtgtcgccccaacggcatgtgggatggagaaacagctgtgtgtgataatggggctggccactgccccaacccaggcatttcactgggcgcagtgcggacaggcttccgctttggtcatggggacaaggtccgctatcgctgctcctcgaatcttgtgctcacggggtcttcggagcgggagtgccagggcaacggggtctggagtggaacggagcccatctgccgccaaccctactcttatgacttccctgaggacgtggcccctgccctgggcacttccttctcccacatgcttggggccaccaatcccacccagaagacaaaggatcttcagctttgagatcaatgtgagcgttgccattatcacctttgcctcagagcccaaagtcctcatgtctgtcctgaacgacaactcccgggatatgactgaggtgatcagcagcctggaaaatgccaactataaagatcatgaaaatggaactgggactaacacctatgcagccttaaacagtgtctatctcatgatgaacaaccaaatgcgactcctcggcatggaaacgatggcctggcaggaaatccgacatgccatcatccttctgacagatggaaagtccaatatgggtggctctcccaagacagctgttgaccatatcagagagatcctgaacatcaaccagaagaggaatgactatctggacatctatgccatcggggtgggcaagctggatgtggactggagagaactgaatgagctagggtccaagaaggatggtgagaggcatgccttcattctgcaggacacaaaggctctgcaccaggtctttgaacatatgctggatgtctccaagctcacagacaccatctgcggggtggggaacatgtcagcaaacgcctctgaccaggagaggacaccctggcatgtcactattaagcccaagagccaagagacctgccggggggccctcatctccgaccaatgggtcctgacagcagctcattgcttccgcgatggcaacgaccactccctgtggagggtcaatgtgggagaccccaaatcccagtggggcaaagaattccttattgagaaggcggtgatctccccagggtttgatgtctttgccaaaaagaaccagggaatcctggagttctatggtgatgacatagctctgctgaagctggcccagaaagtaaagatgtccacccatgccaggcccatctgccttccctgcacgatggaggccaatctggctctgcggagacctcaaggcagcacctgtagggaccatgagaatgaactgctgaacaaacagagtgttcctgctcattttgtcgccttgaatgggagcaaactgaacattaaccttaagatgggagtggagtggacaagctgtgccgaggttgtctcccaagaaaaaaccatgttccccaacttgacagatgtcagggaggtggtgacagaccagttcctatgcagtgggacccaggaggatgagagtccctgcaagggagaatctgggggagcagttttccttgagcggagattcaggttttttcaggtgggtctggtgagctggggtctttacaacccctgccttggctctgctgacaaaaactcccgcaaaagggcccctcgtagcaaggtcccgccgccacgagactttcacatcaatctcttccgcatgcagccctggctgaggcagcacctgggggatgtcctgaattttttacccctctagccatggccactgagccctctgctgccctgccagaatctgccgcccctccatcttctacctctgaatggccacccttagaccctgtgatccatcctctctcctagctgagtaaatccgggtctctaggatgccagaggcagcgcacacaagctgggaaatcctcagggctcctaccagcaggactgcctcgctgccccacctcccgctccttggcctgtccccagattccttccctggttgacttgactcatgcttgtttcactttcacatggaatttcccagttatgaaattaataaaaatcaatggtttcc

SEQ ID NO: 101478 - DNA, 2701 bp, Artificial Sequence
  derived and/or modified sequence
agtacacaaagcctgtgggggagatctattgaccctatagatatattagcatcagggagacagggcaaaggtttcacccttcagttcagtccccaatccctgcttattatttccctaacagaagaccatcccccttgccactccctggtttttcttctctggcagcaatgaagcagctgctgacccagctctagttttcgggaagtcagatgaccttttccctcccgcggctctctacctctcgccgcccctagggaggacaccatgggcccactgatggttcttttttgcctgctgttcctgtacccaggtctggcagactcggctccctcctgccctcagaacgtgaatatctcgggtggcaccttcaccctcagccatggctgggctcctgggagccttctcacctactcctgcccccagggcctgtacccatccccagcatcacggctgtgcaagagcagcggacagtggcagaccccaggagccacccggtctctgtctaaggcggtctgcaaacctgtgcgctgtccagcccctgtctcctttgagaatggcatttataccccacggctggggtcctatcccgtgggtggcaatgtgagcttcgagtgtgaggatggcttcatattgcggggctcgcctgtgcgtcagtgtcgccccaacggcatgtgggatggagaaacagctgtgtgtgataatggggctggccactgccccaacccaggcatttcactgggcgcagtgcggacaggcttccgctttggtcatggggacaaggtccgctatcgctgctcctcgaatcttgtgctcacggggtcttcggagcgggagtgccagggcaacggggtctggagtggaacggagcccatctgccgccaaccctactcttatgacttccctgaggacgtggcccctgccctgggcacttccttctcccacatgcttggggccaccaatcccacccagaagacaaaggatcttcagctttgagatcaatgtgagcgttgccattatcacctttgcctcagagcccaaagtcctcatgtctgtcctgaacgacaactcccgggatatgactgaggtgatcagcagcctggaaaatgccaactataaagatcatgaaaatggaactgggactaacacctatgcggccttaaacagtgtctatctcatgatgaacaaccaaatgcgactcctcggcatggaaacgatggcctggcaggaaatccgacatgccatcatccttctgacagatggaaagtccaatatgggtggctctcccaagacagctgttgaccatatcagagagatcctgaacatcaaccagaagaggaatgactatctggacatctatgccatcggggtgggcaagctggatgtggactggagagaactgaatgagctagggtccaagaaggatggtgagaggcatgccttcattctgcaggacacaaaggctctgcaccaggtctttgaacatatgctggatgtctccaagctcacagacaccatctgcggggtggggaacatgtcagcaaacgcctctgaccaggagaggacaccctggcatgtcactattaagcccaagagccaagagacctgccggggggccctcatctccgaccaatgggtcctgacagcagctcattgcttccgcgatggcaacgaccactccctgtggagggtcaatgtgggagaccccaaatcccagtggggcaaagaattccttattgagaaggcggtgatctccccagggtttgatgtctttgccaaaaagaaccagggaatcctggagttctatggtgatgacatagctctgctgaagctggcccagaaagtaaagatgtccacccatgccaggcccatctgccttccctgcacgatggaggccaatctggctctgcggagacctcaaggcagcacctgtagggaccatgagaatgaactgctgaacaaacagagtgttcctgctcattttgtcgccttgaatgggagcaaactgaacattaaccttaagatgggagtggagtggacaagctgtgccgaggttgtctcccaagaaaaaaccatgttccccaacttgacagatgtcagggaggtggtgacagaccagttcctatgcagtgggacccaggaggatgagagtccctgcaagggagaatctgggggagcagttttccttgagcggagattcaggttttttcaggtgggtctggtgagctggggtctttacaacccctgccttggctctgctgacaaaaactcccgcaaaagggcccctcgtagcaaggtcccgccgccacgagactttcacatcaatctcttccgcatgcagccctggctgaggcagcacctgggggatgtcctgaattttttacccctctagccatggccactgagccctctgctgccctgccagaatctgccgcccctccatcttctacctctgaatggccacccttagaccctgtgatccatcctctctcctagctgagtaaatccgggtctctaggatgccagaggcagcgcacacaagctgggaaatcctcagggctcctaccagcaggactgcctcgctgccccacctcccgctccttggcctgtccccagattccttccctggttgacttgactcatgcttgtttcactttcacatggaatttcccagttatgaaattaataaaaatcaatggtttcc

SEQ ID NO: 101479 - DNA, 1134 bp, Artificial Sequence
  derived and/or modified sequence
atgaccgaggtgatcagcagcctggagaacgccaactacaaggaccacgagaacggcaccggcaccaacacctacgccgccctgaacagcgtgtacctgatgatgaacaaccagatgagactgctgggcatggagaccatggcctggcaggagatcagacacgccatcatcctgctgaccgacggcaagagcaacatgggcggcagccccaagaccgccgtggaccacatcagagagatcctgaacatcaaccagaagagaaacgactacctggacatctacgccatcggcgtgggcaagctggacgtggactggagagagctgaacgagctgggcagcaagaaggacggcgagagacacgccttcatcctgcaggacaccaaggccctgcaccaggtgttcgagcacatgctggacgtgagcaagctgaccgacaccatctgcggcgtgggcaacatgagcgccaacgccagcgaccaggagagaaccccctggcacgtgaccatcaagcccaagagccaggagacctgcagaggcgccctgatcagcgaccagtgggtgctgaccgccgcccactgcttcagagacggcaacgaccacagcctgtggagagtgaacgtgggcgaccccaagagccagtggggcaaggagttcctgatcgagaaggccgtgatcagccccggcttcgacgtgttcgccaagaagaaccagggcatcctggagttctacggcgacgacatcgccctgctgaagctggcccagaaggtgaagatgagcacccacgccagacccatctgcctgccctgcaccatggaggccaacctggccctgagaagaccccagggcagcacctgcagagaccacgagaacgagctgctgaacaagcagagcgtgcccgcccacttcgtggccctgaacggcagcaagctgaacatcaacctgaagatgggcgtggagtggaccagctgcgccgaggtggtgagccaggagaagaccatgttccccaacctgaccgacgtgagagaggtggtgaccgaccagttcctgtgcagcggcacccaggaggacgagagcccctgcaagggcggcagcggcgagctgggcagcctgcagcccctgccctggctgtgctag

SEQ ID NO: 101480 - DNA, 978 bp, Artificial Sequence
  derived and/or modified sequence
atgggcaccagaagcgccatcgccgcccccagaatcctgtgcagcagaggcctgagaagcggcagcgccagagccaccggcagcggcgtggagagaagccccagcgccgccaaccccaccctgatgaccagcctgagaacctggcccctgccctgggccctgcccagccccacctgcctgggcccccccatcccccccagaagacagagaatcttcagcttcgagatcaacgtgagcgtggccatcatcaccttcgccagcgagcccaaggtgctgatgagcgtgctgaacgacaacagcagagacatgaccgaggtgatcagcagcctggagaacgccaactacaaggaccacgagaacggcaccggcaccaacacctacgccgccctgaacagcgtgtacctgatgatgaacaaccagatgagactgctgggcatggagaccatggcctggcaggagatcagacacgccatcatcctgctgaccgacggcaagagcaacatgggcggcagccccaagaccgccgtggaccacatcagagagatcctgaacatcaaccagaagagaaacgactacctggacatctacgccatcggcgtgggcaagctggacgtggactggagagagctgaacgagctgggcagcaagaaggacggcgagagacacgccttcatcctgcaggacaccaaggccctgcaccaggtgttcgagcacatgctggacgtgagcaagctgaccgacaccatctgcggcgtgggcaacatgagcgccaacgccagcgaccaggagagaaccccctggcacgtgaccatcaagcccaagagccaggagacctgcagaggcgccctgatcagcgaccagtgggtgctgaccgccgcccactgcttcagagacggcaacgaccacagcctgtggagagtgaacgtgggcgaccccaagagccagtggggcaaggagttcctgatcgagaaggcctag

SEQ ID NO: 101481 - DNA, 1521 bp, Artificial Sequence
  derived and/or modified sequence
atgggcaccagaagcgccatcgccgcccccagaatcctgtgcagcagaggcctgagaagcggcagcgccagagccaccggcagcggcgtggagagaagccccagcgccgccatcttcagcttcgagatcaacgtgagcgtggccatcatcaccttcgccagcgagcccaaggtgctgatgagcgtgctgaacgacaacagcagagacatgaccgaggtgatcagcagcctggagaacgccaactacaaggaccacgagaacggcaccggcaccaacacctacgccgccctgaacagcgtgtacctgatgatgaacaaccagatgagactgctgggcatggagaccatggcctggcaggagatcagacacgccatcatcctgctgaccgacggcaagagcaacatgggcggcagccccaagaccgccgtggaccacatcagagagatcctgaacatcaaccagaagagaaacgactacctggacatctacgccatcggcgtgggcaagctggacgtggactggagagagctgaacgagctgggcagcaagaaggacggcgagagacacgccttcatcctgcaggacaccaaggccctgcaccaggtgttcgagcacatgctggacgtgagcaagctgaccgacaccatctgcggcgtgggcaacatgagcgccaacgccagcgaccaggagagaaccccctggcacgtgaccatcaagcccaagagccaggagacctgcagaggcgccctgatcagcgaccagtgggtgctgaccgccgcccactgcttcagagacggcaacgaccacagcctgtggagagtgaacgtgggcgaccccaagagccagtggggcaaggagttcctgatcgagaaggccgtgatcagccccggcttcgacgtgttcgccaagaagaaccagggcatcctggagttctacggcgacgacatcgccctgctgaagctggcccagaaggtgaagatgagcacccacgccagacccatctgcctgccctgcaccatggaggccaacctggccctgagaagaccccagggcagcacctgcagagaccacgagaacgagctgctgaacaagcagagcgtgcccgcccacttcgtggccctgaacggcagcaagctgaacatcaacctgaagatgggcgtggagtggaccagctgcgccgaggtggtgagccaggagaagaccatgttccccaacctgaccgacgtgagagaggtggtgaccgaccagttcctgtgcagcggcacccaggaggacgagagcccctgcaagggcgagagcggcggcgccgtgttcctggagagaagattcagattcttccaggtgggcctggtgagctggggcctgtacaacccctgcctgggcagcgccgacaagaacagcagaaagagagcccccagaagcaaggtgcccccccccagagacttccacatcaacctgttcagaatgcagccctggctgagacagcacctgggcgacgtgctgaacttcctgcccctgtag

SEQ ID NO: 101482 - DNA, 63 bp, Artificial Sequence
  derived and/or modified sequence
atgaaacagagcaccattgcgctggcgctgctgccgctgctgtttaccccggtgaccaaagcg

SEQ ID NO: 101483 - DNA, 420 bp, Artificial Sequence
  derived and/or modified sequence
atggggcctctgatggtgctgttctgtttgttattcctgtatcccggtcttgcagatagcgcgccgtcttgcccccaaaacgtgaatatttctggcggaacctttaccctttctcacggttgggcaccaggctcattgttaacgtatagctgtcctcaggggctgtacccttcacccgcatcaaggctttgcaaatcatcgggccagtggcagacccccggcgccacaaggagtttgtcaaaggctgtctgtaaacccgtcagatgcccagccccagtttcattcgagaatggaatctacacacctagattaggaagttaccccgtcgggggtaatgtcagcttcgagtgcgaagacggattcatactccgcggtagcccagtgcggcagtgtaggccgaatggaatgtgggatggttag

SEQ ID NO: 101484 - DNA, 420 bp, Artificial Sequence
  derived and/or modified sequence
atgggtcccctgatggtgctcttttgccttttgtttctttaccccgggcttgccgattccgctccctcctgtccacagaacgtaaatatttctggtggcactttcaccttgtctcacgggtgggcacctggatcgctgcttacatacagctgcccacagggactgtacccgtctcctgcctctagattgtgcaaatcctctggtcagtggcagaccccaggagcaaccagatcattgtcgaaagcggtgtgcaagcctgtcagatgtccagcacctgtatcatttgaaaatggcatttacaccccacggttagggtcctatcccgttggaggcaatgtatccttcgaatgcgaggacggctttattttgagggggagcccagtgagacagtgcagaccgaacgggatgtgggacggttag

SEQ ID NO: 101485 - DNA, 378 bp, Artificial Sequence
  derived and/or modified sequence
atgggccctctcatggttctcttctgcctgctgtttttgtatcccggtttagccgattcagccccttcgtgccctcagaacgtgaatatctcaggtgggaccttcactctatctcacggctgggcacctgggtccctacttacgtacagctgtcctcaggggttataccccagtcctgcaagtcgactctgcaagtctagcggtcagtggcagacacctggcgcgaccagatctctttcgaaggccgtctgcaagccagggcattgccctaaccctggtatttcccttggggccgttcgcacaggctttaggttcggccacggagataaagtgcgctaccgctgcagctcaaatctagttttaacgggcagttcttag

SEQ ID NO: 101486 - DNA, 405 bp, Artificial Sequence
  derived and/or modified sequence
tgaggacactgcccaaacccggggatcagtttgggagctgtgcgaaccggatttcgctttggacacggcgacaaggtacgatacaggtgctcttccaatctagtcctgaccggtagttctgagagagagtgtcagggaaatggcgtgtggtcgggaactgagccaatctgccggcagccatatagctatgacttccctgaagacgtggcgccagctctggggacttctttctctcatatgctaggagcaacaaatcccacgcagaaaacgaaagagagtctcggacggaagattcagattcagagatcagggcatctcaatctctaccttttgctggactgcagtcagtcagtgtcagagaacgacttcctgatctttaaggagtccgcctccctgatggtgtag

SEQ ID NO: 101487 - DNA, 477 bp, Artificial Sequence
  derived and/or modified sequence
atgagggccttatgcatcagagagacctgttccagcgagctgggctttagcaggaactggtctagaaggaaagccggacactgccctaacccaggcatctccctcggtgccgttaggactggctttagattcggacatggcgataaagtcaggtacagatgctcgagcaatctggtcttaactggtagcagtgagcgtgaatgccaggggaacggggtgtggagcggcacagagcccatttgtaggcaaccctattcctacgacttcccagaggacgtcgcgcctgccctggggacctcattcagccatatgttgggtgccactaacccgacgcagaagacgaaggagagcttggggaggaaaatccagatccagcggagcggtcacttgaacctatacttgctattggattgtagccaaagcgttagcgaaaatgatttcttaatattcaaggaatccgcctcgcttatggtgtag

SEQ ID NO: 101488 - DNA, 477 bp, Artificial Sequence
  derived and/or modified sequence
atgagagctctgtgtatccgagagacctgctcgagtgagctgggcttctccagaaattggagtcggaggaaagccggccactgccctaatcccggtatctccttgggcgccgtcagaaccggctttcgattcgggcatggagacaaagtgaggtaccggtgttcgtcaaatctggtgctgaccggctcttcagaaagagagtgccagggaaatggagtttggagtgggaccgagcctatctgtagacaaccgtactcctacgatttcccagaagatgtcgcccccgcgctggggacatcattttcccatatgttaggggccactaatcctacccagaagacgaaggagtccttaggccgcaagatacagattcagcgtagtggacacctcaacctctaccttctgttggactgttcccaatccgtctccgagaacgacttcctaatcttcaaggaatctgcaagtctaatggtgtag

SEQ ID NO: 101489 - DNA, 477 bp, Artificial Sequence
  derived and/or modified sequence
atgcgggcgctgtgtattcgggagacctgctcaagtgagctaggcttctcccgcaactggtcacgtaggaaagccggtcactgccctaacccggggatctccctgggggcagttcgcaccggattccgttttgggcatggcgataaagttaggtaccggtgtagctccaatctagtgcttaccggttcttcagagagagaatgtcagggaaatggtgtctggagtgggaccgaacccatctgcaggcaaccctattcttatgattttccagaggatgtggctcctgcacttgggacatccttcagtcatatgctgggcgcaacaaatcctacccagaaaacaaaggagagtctcgggcgaaagatccagatccagaggagcgggcacttgaacctgtatctcctgcttgactgttcacagagcgtgtctgaaaacgatttcttgatcttcaaagagagtgcctcactgatggtatag

SEQ ID NO: 101490 - DNA, 420 bp, Artificial Sequence
  derived and/or modified sequence
atgggacctctcatggtgctgttctgtcttctgttcctgtatcccggtctggccgacagtgccccctcatgccctcaaaatgtcaacatctccgggggtacttttaccctatcacacggatgggcacccggcagcttactcacatacagttgcccccagggactataccccagccccgccagtcgtttgtgtaagagttccggacagtggcaaactccaggggctacacgttccttatccaaggcagtttgcaaacctgtgcgctgtccagcccctgtgagcttcgagaatggcatctatactccccggctgggaagttatcccgtgggtggaaatgtgtccttcgagtgcgaggacgggtttattctgcgtggctcccccgtgcgccagtgtcgccctaatggaatgtgggatggatag

SEQ ID NO: 101491 - DNA, 378 bp, Artificial Sequence
  derived and/or modified sequence
atgggaccactgatggtgctcttttgtctcctcttcctgtatcctggattggctgactctgccccttcctgcccccagaacgtcaacatctcaggggggacttttactctatcccacggctgggctccaggatcactgttaacttattcttgcccccaaggcttgtacccctccccagcgtccagactctgcaagagcagcggacaatggcaaacaccaggagccaccaggtcactgtctaaagcagtgtgcaagcctgggcactgcccaaaccctgggatttccttgggggccgtcaggacaggattcaggttcggacatggtgacaaggtgcgataccgctgctcttcaaatctggtgctgaccggtagctcctag

SEQ ID NO: 101492 - DNA, 420 bp, Artificial Sequence
  derived and/or modified sequence
atggggcctctcatggtcctattctgtctgttgtttctttatccaggactggccgactctgcccctagctgcccgcagaatgttaatatcagcggcgggaccttcacactgtctcacggatgggcccctggaagtctgctaacttatagttgtccacaaggcttgtatccttctccagcgtccagactgtgcaaaagctcgggtcagtggcaaacacctggagcaacccgttctcttagcaaagcagtgtgcaaacctgtgcggtgcccagcccctgtgtctttcgaaaacgggatctatacaccgcgactggggtcctaccccgtgggaggtaacgtaagttttgagtgtgaagatggattcatactgcggggatcaccagtgcgccaatgtaggccaaatggcatgtgggatggttag

SEQ ID NO: 101493 - DNA, 477 bp, Artificial Sequence
  derived and/or modified sequence
atgcgagctctgtgtattagggagacatgttcgagtgaattgggctttagccgcaattggagtagacggaaggcgggtcattgcccaaaccctgggatatctcttggtgccgtgaggacgggtttccggtttggacacggggataaagttcgctaccgctgctcctcaaacttggtccttacggggagctccgagagagaatgtcaggggaacggagtttggtccggcacagagcctatctgccgtcagccatacagttacgattttcctgaggacgtggccccggctcttggtacgagcttctcacacatgcttggggctaccaatccgacccaaaagacaaaagaaagcctgggcagaaagatccagatccaacgaagcggccacttaaacttatacttgctgctggactgctctcagtctgtgagtgaaaatgactttcttatatttaaagagagcgcatccttaatggtttag

SEQ ID NO: 101494 - DNA, 378 bp, Artificial Sequence
  derived and/or modified sequence
atgggccctctcatggtcctcttttgtctgctgttcttgtatcctgggctggcagattcagccccttcctgcccccaaaacgtgaacatcagtggaggaaccttcaccctcagccacgggtgggctccaggtagtttgctgacatactcctgcccccaaggtctgtatccctcgccggctagcagactctgcaagtcctctggacaatggcagaccccaggagccacacgtagtttgtccaaggcggtgtgcaagcctggccactgccccaaccccggcatttccctgggtgcagttaggacaggattccggtttggacacggggacaaggtgagataccgttgcagttccaatctggtcctgactgggtcttcatag

SEQ ID NO: 101495 - DNA, 378 bp, Artificial Sequence
  derived and/or modified sequence
atgggccctttgatggtattattctgtctactgtttctgtatcccggcttggccgactctgccccatcctgcccccagaatgtcaatatctctgggggaaccttcactctcagccacggctgggcccccggaagcctgttgacatactcatgcccccaagggttatacccgtcaccagcctctagactgtgcaagtccagcgggcagtggcaaacgcctggggcaaccaggagcctgagtaaagcggtgtgcaagcctgggcactgccctaaccccggaatcagtctaggcgctgttcgcacaggatttcgctttggtcacggagacaaggtccgatatcggtgctccagtaatcttgtcctcaccggctcctcctag

SEQ ID NO: 101496 - DNA, 420 bp, Artificial Sequence
  derived and/or modified sequence
atgggacctctcatggttctgttttgcttgttgtttctttatcccggactcgccgactccgcgcctagttgcccacagaacgtcaacatctctggaggcacattcaccctgagccacgggtgggcaccaggctctctgctgacttattcttgcccacaggggctgtacccctcaccagcctcaaggctgtgtaaaagttcaggacagtggcagaccccaggcgcgacccgctctctgtcgaaggcagtgtgtaaacccgtccgctgccctgcaccagtcagtttcgagaacggtatctacacccctcgactgggcagctaccccgttggcggcaatgtctccttcgagtgtgaggacggattcattttgcggggcagcccagtcaggcagtgccgaccaaacgggatgtgggacgggtag

SEQ ID NO: 101497 - DNA, 378 bp, Artificial Sequence
  derived and/or modified sequence
atgggccctctgatggttctgttttgcttactctttctgtaccccggactggcagacagcgcgccaagttgtccccaaaacgtaaatatatctggaggtacgttcactctgtcccacgggtgggcaccgggatcattgttgacatattcatgcccccaagggctctatccgtcccctgctagtcgtctctgcaaaagctctggtcaatggcagactcccggcgccacaaggtccctgagcaaggccgtatgcaaacccggccactgccccaatccaggcatctctctcggcgccgtgagaactggattccgattcgggcatggagacaaagtcagatacaggtgttcatctaatcttgtcctgacggggagctcctag

SEQ ID NO: 101498 - DNA, 378 bp, Artificial Sequence
  derived and/or modified sequence
atggggcctctgatggtcctgttctgccttctatttctttaccccggattggccgactccgccccttcctgcccgcagaatgtgaatattagcggaggaacttttacattgtcccacggttgggcacccggctctctactgacttattcttgcccccaaggcctttacccaagtcctgcctccaggctgtgtaagagctcgggacaatggcagactcctggcgccacacggagcctgagcaaggccgtgtgtaagcccgggcactgccccaacccgggaatctccctgggagctgtcagaaccgggtttcgtttcggacacggggataaagtgcgctatcgatgcagtagcaatctagtgctgaccggctcttcctag

SEQ ID NO: 101499 - DNA, 405 bp, Artificial Sequence
  derived and/or modified sequence
tgaggacattgtcccaaccctggtatctccctcggggccgttagaaccgggttccgcttcggacacggtgacaaagtccggtaccgttgtagttctaatctcgtactgaccggtagttcagaacgggagtgtcagggaaacggagtttggagcggtactgaacccatctgccggcaaccttatagctacgactttcccgaggatgtggccccagccctgggaacgagcttttcccatatgttgggtgccactaatccaactcagaaaacaaaggagtctctcggccgcaaaattcagatacagagaagtgggcatttgaacctgtacttgctgctggactgcagtcagagtgtgtctgagaatgattttttaatttttaaagaatccgcctctctcatggtgtag

SEQ ID NO: 101500 - DNA, 420 bp, Artificial Sequence
  derived and/or modified sequence
atgggccccctgatggtgcttttctgcctgctgttcttgtatcctgggctggcagactccgcaccctcctgtccgcaaaacgtgaatatatccgggggtacctttactttgagccatggttgggctcctggttccctgctcacctacagctgccctcagggactctacccttctcctgcctcacgactatgtaagagctcagggcagtggcagacacccggtgccaccagaagcttatccaaagctgtctgtaagccagtgagatgtcctgcccccgtctctttcgaaaacggaatctacacaccgaggctcggctcatatcccgttggcgggaatgtgagctttgagtgcgaggacggtttcatcctgcgtggtagtccagtccgccaatgccggcctaacgggatgtgggacggatag

SEQ ID NO: 101501 - DNA, 420 bp, Artificial Sequence
  derived and/or modified sequence
atgggacccctgatggtactgttctgcctgctctttctgtaccctgggctggccgactccgccccgagctgtccacagaatgtgaatatttcagggggcacgtttaccctctcgcacggatgggctcctggaagcttactgacgtactcgtgcccccagggtctgtacccctcacccgcaagtcgattgtgcaagtctagtggccaatggcagaccccgggggccaccaggtcactgtctaaagccgtctgtaaacccgtgcggtgccctgctccagtttctttcgagaatggaatatatacaccgaggcttgggtcttaccctgtcggagggaatgtttctttcgagtgcgaggacggattcattctgcgaggatctcctgtccgccaatgccgccctaacgggatgtgggatggctag

SEQ ID NO: 101502 - DNA, 420 bp, Artificial Sequence
  derived and/or modified sequence
atgggccccctgatggtgctcttctgcctgctcttcctgtacccaggcctggccgacagcgcccccagctgcccccagaatgtgaacatcagcggcggcaccttcaccctgagccacggctgggcccctggcagcctgctgacctacagctgcccccagggcctgtaccccagccctgccagccggctgtgcaagagcagcggccagtggcagacccctggggccaccaggagcctgagcaaggctgtgtgcaagcctgtgcgctgcccagcccctgtgtcctttgaaaatggcatctacaccccccggctgggcagctaccctgtgggcggcaatgtgtcctttgaatgtgaagatggcttcatcctgcggggcagccctgtgcggcagtgccggcccaacggcatgtgggatggatag

SEQ ID NO: 101503 - DNA, 378 bp, Artificial Sequence
  derived and/or modified sequence
atgggccccctgatggtgctcttctgcctgctcttcctgtacccaggcctggccgacagcgcccccagctgcccccagaatgtgaacatcagcggcggcaccttcaccctgagccacggctgggcccctggcagcctgctgacctacagctgcccccagggcctgtaccccagccctgccagccggctgtgcaagagcagcggccagtggcagacccctggggccaccaggagcctgagcaaggctgtgtgcaagccaggccactgccccaaccctggcatcagcctgggcgctgtgaggacaggcttccgctttggacatggagacaaggtgcgctaccgctgcagcagcaacctggtgctgaccggcagcagctag

SEQ ID NO: 101504 - DNA, 405 bp, Artificial Sequence
  derived and/or modified sequence
tgaggccactgccccaaccctggcatcagcctgggcgctgtgaggacaggcttccgcttcggccacggggacaaggtgcgctaccgctgcagcagcaacctggtgctgaccggcagcagcgagcgggagtgccagggcaatggagtgtggagcggcacagagcccatctgccggcagccctacagctatgacttcccagaagatgtggccccagccctgggcaccagcttcagccacatgctgggcgccaccaaccccacccagaagaccaaggagagcctgggcaggaagatccagatccagaggagcggccacctgaacctgtacctgctgctggactgcagccagagcgtgtctgaaaatgacttcctgatcttcaaggagagcgccagcctgatggtgtag

SEQ ID NO: 101505 - DNA, 477 bp, Artificial Sequence
  derived and/or modified sequence
atgagggccctgtgcatccgggagacctgcagcagcgagctgggcttcagcaggaactggagcaggaggaaggccggccactgccccaaccctggcatcagcctgggcgctgtgaggacaggcttccgcttcggccacggggacaaggtgcgctaccgctgcagcagcaacctggtgctgaccggcagcagcgagcgggagtgccagggcaatggagtgtggagcggcacagagcccatctgccggcagccctacagctatgacttcccagaagatgtggccccagccctgggcaccagcttcagccacatgctgggcgccaccaaccccacccagaagaccaaggagagcctgggcaggaagatccagatccagaggagcggccacctgaacctgtacctgctgctggactgcagccagagcgtgtctgaaaatgacttcctgatcttcaaggagagcgccagcctgatggtgtag

SEQ ID NO: 101506 - DNA, 420 bp, Artificial Sequence
  derived and/or modified sequence
atgggccccctgatggtgctgttctgcctgctgttcctgtaccccggactggcagactcagcccccagttgtccccagaacgttaatatcagcggaggcactttcacactgagccacggatgggctccagggtccctgttgacctattcatgtccccagggactttacccgagccctgctagccggctctgcaaaagctcaggccagtggcaaactcccggcgctacacggtctctttctaaagccgtctgcaaacccgtacgttgtcccgcccccgtctccttcgaaaacgggatttacactccccggctggggtcctatcctgtgggcggcaacgtgtcctttgagtgcgaggacggcttcattttgaggggttcacccgtcagacagtgtcggcccaacggcatgtgggacggctag

SEQ ID NO: 101507 - DNA, 420 bp, Artificial Sequence
  derived and/or modified sequence
atgggccccctgatggtgctgttctgcctgctgttcctgtaccccggtttagccgactcagcaccatcctgcccccagaatgtcaatatttccggcgggaccttcacgcttagtcacggatgggcccctggtagcctcctcacatacagttgcccccaaggactgtacccttcacctgccagtcggctctgcaagtcttccggccagtggcagactccaggcgcgaccaggtctctgtccaaagctgtgtgcaaacccgtgcgatgtccagccccagtgtcttttgaaaatgggatctacacccctaggctgggcagttacccggtcggcggcaacgtctcctttgaatgcgaggatggctttatattacgcgggtctccagtaaggcagtgccgcccaaacggcatgtgggacgggtag

SEQ ID NO: 101508 - DNA, 378 bp, Artificial Sequence
  derived and/or modified sequence
atgggccccctgatggtgctgttctgcctgctgttcctgtaccccggacttgccgattcagcaccctcatgtccccaaaatgtcaatatctctggaggaacctttacactaagccatggttgggcacccggctctctcctaacatattcgtgtccacaaggactgtatccatcccccgcttctcgcctctgtaagagttctggtcaatggcagacaccgggagctacacgaagtctcagtaaggcggtctgcaaaccaggccactgtcctaaccctggcatatcactgggcgctgtgaggactggctttagattcggccacggagacaaggtgcgctacagatgctccagcaacctcgtgctaactggcagtagttag

SEQ ID NO: 101509 - DNA, 405 bp, Artificial Sequence
  derived and/or modified sequence
tgaggccactgccccaaccccggcatcagcctgggcgccgtgcggacaggttttcgtttcggtcacggtgataaagtgaggtacagatgcagcagtaatttagtgctaaccggaagctccgagagagaatgccaaggcaatggtgtctggagcggtaccgagccgatatgtcggcaaccttacagctatgacttccctgaagacgtcgcaccagctctcggcacttcattttcgcacatgctgggggcaaccaacccgacccaaaagactaaggagagcctcggacgcaagattcagatccagcgctccggacatctgaacttatacctcctgttggattgctcacaatcggtctccgaaaacgacttcttgatctttaaagagtccgcttctctgatggtttag

SEQ ID NO: 101510 - DNA, 477 bp, Artificial Sequence
  derived and/or modified sequence
atgcgggccctgtgcatccgggagacctgcagcagcgagctgggcttttcaagaaactggtccagacgcaaggccggacattgccccaaccctgggatctccctaggcgccgtgagaactggttttcgctttggacacggcgataaggtccgttatagatgttcctctaacctggtgctcactgggagcagcgagcgggaatgtcaaggtaatggagtctggagcggtacagaacctatatgcaggcagccctactcttatgatttcccagaggacgtagccccagctctcggcacatcctttagtcacatgctgggtgcaacaaaccctacccagaaaaccaaggagagcctcggaaggaaaatccagatccagcggagtgggcatctgaacctctacctattattagattgttctcagagcgtgagcgaaaacgactttttgattttcaaagaatcggcaagtctcatggtttag

SEQ ID NO: 101511 - DNA, 477 bp, Artificial Sequence
  derived and/or modified sequence
atgcgggccctgtgcatccgggagacctgcagcagcgagctgggcttcagccggaattggtctaggcggaaagccggccattgcccgaatcccggtatctctctgggcgcagttcgcactggattccggtttggccacggagataaggttcggtatcggtgcagctccaaccttgttcttaccggctccagtgagagagaatgccaggggaacggtgtatggtccggaaccgagcccatctgcaggcaaccctattcatatgattttcccgaagacgtggcccctgctctcgggacaagcttttcacacatgttaggcgccaccaacccaactcagaagacgaaggaatctctaggacggaaaatccaaatccagagatcagggcatctaaacctgtatctcctgctagattgtagtcagtctgttagcgagaacgacttcttgatctttaaggaaagcgcctcgttaatggtgtag

SEQ ID NO: 101512 - DNA, 477 bp, Artificial Sequence
  derived and/or modified sequence
atgcgggccctgtgcatccgggagacctgcagcagcgagctgggcttctcccgcaattggtctcgccgcaaggctggtcattgtcctaatcctgggatctctctcggagctgtgcgcaccggcttcagattcggccatggcgacaaagtgcggtatcggtgctcgagtaaccttgtgttgacaggcagctccgaaagggagtgccagggaaatggagtatggagtggtaccgagccaatttgtcggcagccttacagttacgactttccggaggacgttgctcccgccctgggtacgagcttcagccacatgctgggggcaaccaacccaactcagaaaacaaaggagagcctgggtcgaaagattcagattcagaggtctggccatctgaatctgtacttgctgctggattgctcgcaatctgtcagtgagaacgatttccttatcttcaaagagtccgcaagccttatggtgtag

SEQ ID NO: 101513 - DNA, 420 bp, Artificial Sequence
  derived and/or modified sequence
atgggccccctgatggtgctgttctgcctgctgttcctgtaccccggcctagccgattccgcgccctcctgcccccagaatgtcaatatatcaggtggcacttttacgctgtcccacgggtgggcccccgggtctctgcttacctatagctgcccacaaggattgtaccctagccctgcatctcgcctctgtaagagtagcggccagtggcagactcctggcgctacccgctctctgagcaaagccgtttgtaaacctgtgagatgtccagccccagtgtccttcgagaacggtatttacactccaaggttagggtcctaccccgtgggaggcaatgtgtccttcgaatgtgaggacggctttattctccgagggtccccagtgaggcagtgcaggcccaacggaatgtgggatgggtag

SEQ ID NO: 101514 - DNA, 378 bp, Artificial Sequence
  derived and/or modified sequence
atgggccccctgatggtgctgttctgcctgctgttcctgtaccccgggctcgccgattctgctccatcttgtccccagaatgtcaatatctcaggaggtaccttcacactatcccacggatgggccccaggaagcttgctgacatactcttgtcctcagggcctttatccatctccggcgtcgagactgtgtaagtcctcagggcagtggcaaacaccaggcgctacacgtagcctgtccaaagcagtgtgtaaacctgggcattgtcctaatcccggcataagcttgggtgcagtgcgcaccggctttaggttcggccacggcgataaagtgcgatatagatgcagttctaatctggtgcttacaggatccagctag

SEQ ID NO: 101515 - DNA, 420 bp, Artificial Sequence
  derived and/or modified sequence
atgggccccctgatggtgctgttctgcctgctgttcctgtaccccggattggccgacagcgcgccctcatgtccacagaacgtgaatataagcgggggcacttttacactgtcgcacggatgggcccccggcagtcttctcacgtattcttgccctcaggggttatatccatcgcctgcttcccgcctttgtaagagcagcggccagtggcagacaccaggggccacccgctctctatcgaaagcagtttgcaaaccagttaggtgtccggccccagtatcattcgagaatgggatttacacccctagattgggcagttatcccgtgggggggaatgtatcattcgaatgcgaggacggcttcatcctgcggggttcacccgtccggcagtgccggcctaatgggatgtgggacggctag

SEQ ID NO: 101516 - DNA, 477 bp, Artificial Sequence
  derived and/or modified sequence
atgcgggccctgtgcatccgggagacctgcagcagcgagctgggcttcagccggaattggagccgacgtaaggcgggccactgtcctaatccagggatcagcttgggcgcggtgagaacgggattcaggttcggccacggtgacaaggtacgatatcgttgtagttccaacttggttctcaccggcagttcagagagggagtgtcagggaaatggcgtctggtccgggacagaaccgatctgcagacagccttacagttacgacttccccgaagacgtggcccctgccttaggcacatcattctcccacatgcttggggctaccaatccaacccagaaaactaaagagtccctcggacggaaaattcagattcagcgctcggggcacctgaatttatacttgttacttgattgttcgcaatctgtgtccgagaacgatttcctgatctttaaagaatcagcctccttaatggtgtag

SEQ ID NO: 101517 - DNA, 378 bp, Artificial Sequence
  derived and/or modified sequence
atgggccccctgatggtgctgttctgcctgctgttcctgtaccccggtctggctgacagcgcgccaagctgtccccagaatgtcaatatctccggcggaacctttacactctctcatgggtgggcccctggaagcctactgacctatagctgtccccagggcctttacccttctcctgccagcaggctgtgcaaaagtagcggacaatggcagacccctggtgccacgcgaagtctcagcaaggctgtgtgcaagcctggccactgccccaaccctgggatatccctgggggcagtgaggactgggttccgcttcgggcacggggacaaggtgcggtatagatgctcgtctaacttggtgctgactgggtccagctag

SEQ ID NO: 101518 - DNA, 378 bp, Artificial Sequence
  derived and/or modified sequence
atgggccccctgatggtgctgttctgcctgctgttcctgtaccccggcttggcggacagcgcaccatcttgcccacagaatgtgaatatctccggcggtaccttcaccttgagccacgggtgggcccccggcagtcttctcacctacagttgccctcaggggctgtacccctccccagcttctcgactctgcaaatcaagcggccagtggcagactccaggagcgacccggtcattgagcaaggccgtctgtaagcccggccattgtcccaatcctgggatatccttgggggctgtacggactggctttcgtttcggccacggcgataaagtccgttatcgatgtagctctaatctggtgctaacaggttcctcctag

SEQ ID NO: 101519 - DNA, 420 bp, Artificial Sequence
  derived and/or modified sequence
atgggccccctgatggtgctgttctgcctgctgttcctgtaccccggccttgccgacagtgccccatcatgccctcagaacgtaaacatatcaggaggaactttcaccctctcccacggatgggcccccggctctctcttgacttattcctgtcctcagggattatatccctctccagctagccgcttgtgtaaatcatccggtcagtggcagactcccggcgccacaaggagcctgagtaaggccgtatgcaagcctgtccggtgtcctgcccctgtgtctttcgagaatggtatctacactcctcgactggggagctatccggtaggcggcaatgttagtttcgagtgcgaggacgggtttattctccgaggatcacctgtccgccagtgtagacctaacggcatgtgggatggttag

SEQ ID NO: 101520 - DNA, 378 bp, Artificial Sequence
  derived and/or modified sequence
atgggccccctgatggtgctgttctgcctgctgttcctgtaccccggattggccgactctgcacctagctgcccgcagaatgtaaacattagcggaggcaccttcactctctcccacggatgggctcctggttcacttctgacttattcatgcccccaggggctgtacccctcgccagccagcaggctatgtaagtcatccggacaatggcagacccccggtgccacccggagtctgagcaaagcggtatgcaaaccgggacattgcccaaacccgggaataagcttaggtgcagtgaggaccgggtttcggtttggacacggcgacaaggtcagatatcggtgcagttctaatttggtgcttaccggcagcagttag

SEQ ID NO: 101521 - DNA, 378 bp, Artificial Sequence
  derived and/or modified sequence
atgggccccctgatggtgctgttctgcctgctgttcctgtaccccggattggccgacagcgctccctcctgccctcagaatgtgaatatttcgggaggtacattcacgttgtcccacggatgggcccccgggtcacttctaacatacagttgccctcagggcctgtatccctccccagcgtctaggctatgcaagtcctccggtcaatggcagaccccaggggccactcgaagcttgagcaaagctgtctgtaagcctgggcactgtccaaaccctgggattagcttgggcgctgtccggactggtttccgcttcggacatggcgataaggtcagataccgctgttctagcaacctcgtgctcaccggttcgtcttag

SEQ ID NO: 101522 - DNA, 405 bp, Artificial Sequence
  derived and/or modified sequence
tgaggccactgccccaaccccggcatcagcctgggcgccgtgcggaccggattcagattcggacacggagacaaggttcgctatcgatgtagcagcaatctcgtcctgaccggcagctcagaacgcgagtgccagggcaacggggtttggtccggaaccgaacctatttgccggcagccgtactcctatgactttcctgaggacgtggccccggccttgggtacatctttctcacacatgctcggcgccaccaaccctacacaaaaaactaaagagtcactgggtagaaagattcagatccagcgatccgggcatctgaacctgtacctgctgttggactgtagccagtccgtttccgaaaacgatttcttaattttcaaagaatccgcctcattaatggtctag

SEQ ID NO: 101523 - DNA, 420 bp, Artificial Sequence
  derived and/or modified sequence
atgggccccctgatggtgctgttctgcctgctgttcctgtaccccggtttagccgactcagcccccagttgcccgcaaaatgtgaacataagtggcggcacctttaccctctctcatggctgggcacccggtagtttgctcacctactcctgcccacaggggttatatccttcaccagcttcgaggctgtgcaaatcgtctggacaatggcagactcccggagctactcgctctctcagcaaggcagtgtgtaagccagtgcgttgccccgcaccggtgagtttcgaaaacggaatttatacccctcgtctcggaagctaccccgtgggaggcaacgtcagcttcgagtgtgaagacggcttcatcctgagagggagtcccgtgagacagtgcaggccaaatggtatgtgggatggctag

SEQ ID NO: 101524 - DNA, 420 bp, Artificial Sequence
  derived and/or modified sequence
atgggccccctgatggtgctgttctgcctgctgttcctgtaccccggcttggccgactccgctccttcttgccctcagaacgtgaacatcagtggcggcacgtttacactgtcccatggatgggcccctggcagcctccttacatactcttgtccccagggactctacccaagccccgcctcccgcctatgtaagtcctctggacagtggcagacccctggtgccaccagaagtttgtcaaaggctgtgtgcaagccagtgcggtgcccggccccagtctcattcgagaatggcatttacacccctcgactcggctcctaccctgtcggggggaatgtcagttttgagtgtgaggacggtttcatactacgtggaagccccgtgaggcaatgtcgtcctaatgggatgtgggacggatag

SEQ ID NO: 101525 - DNA, 420 bp, Artificial Sequence
  derived and/or modified sequence
atgggtcctttgatggtcctcttctgcctgctattcctctaccccggtcttgcggacagtgccccttcgtgtcctcagaacgtgaatatctcgggcggaacgttcacactgagtcatggatgggccccaggtagtctattaacttattcctgcccccaggggctgtacccaagcccagcttctcgcctgtgtaaatcttctggccagtggcagacccctggagccactcgcagtctgtcaaaggctgtatgcaagcccgtgagatgcccggcaccagtttcctttgagaatggtatatatacacctagactggggagttaccccgtgggaggaaatgtttcctttgagtgtgaggacggcttcatcctgcgcggttcccctgttaggcaatgccggccaaatggtatgtgggatggatag

SEQ ID NO: 101526 - DNA, 420 bp, Artificial Sequence
  derived and/or modified sequence
atggggccacttatggttttgttctgtctgctgttcctttacccgggactggcagattctgcaccaagctgcccacagaatgtcaacatctccggtggcaccttcaccttatctcatggatgggcccctggctctctccttacatactcatgcccccaggggctgtacccttctccggcttctcgtttatgcaagagttccggccaatggcagaccccaggagcgaccagaagcctgagtaaagcggtctgcaaacctgtgagatgcccagcaccagttagttttgaaaacggaatctatacgccgaggctgggctcttacccagtcgggggtaacgtctcttttgaatgtgaagatggatttatcctgcgtggtagcccggtccggcagtgtagacccaatggcatgtgggatggctag

SEQ ID NO: 101527 - DNA, 378 bp, Artificial Sequence
  derived and/or modified sequence
atgggccctctgatggtgcttttctgtctgctcttcctttatcctggtctggcagacagcgccccttcctgtccccagaacgtcaatatctcaggcggaacatttaccctgtcccacggctgggcacctgggtcattgctgacatactcttgtccccaggggctctacccgtctcctgcatctcgtctctgtaagtcatcaggccagtggcaaaccccaggcgctacgagaagtttgtctaaggccgtgtgcaaacccggacactgcccaaatccgggaattagtctgggagcggtgcgtactggcttccgtttcggtcacggcgataaggttaggtatcgctgctcatctaacttggtgttgaccggtagcagctag

SEQ ID NO: 101528 - DNA, 405 bp, Artificial Sequence
  derived and/or modified sequence
tgaggccactgtcccaacccaggcatcagcctcggcgctgtgcggaccggtttcaggtttgggcatggagacaaagtcagatacagatgttcctctaatctggttctaaccggatcgagcgaacgagaatgtcagggcaacggggtatggtccggaaccgagcccatctgtaggcaaccgtattcatacgatttccctgaggacgtggctccagctctcggcacaagtttctcgcacatgctgggggctacaaacccaacccagaagacaaaggaaagtctgggtcgtaagatacagatccaacgctctgggcatctgaatctctacctgctcctggactgttctcagagtgtgagtgagaacgattttctgatcttcaaagagagcgcctcactgatggtgtag

SEQ ID NO: 101529 - DNA, 477 bp, Artificial Sequence
  derived and/or modified sequence
atgcgcgcactgtgtattcgggagacttgtagctcagaactgggctttagtcggaattggtcaaggaggaaggctggccactgccccaaccctgggatctcgctcggagccgtgagaacgggtttccgcttcggccatggggataaagtgcgttaccgttgttcttccaaccttgtgctgaccgggagcagtgagagagaatgccagggtaacggggtgtggagtggtaccgagccaatctgtagacagccatattcctacgattttccggaagacgttgccccagctctcggcactagtttcagtcacatgctgggcgctactaatcccacgcagaagacaaaagagagcctgggaagaaagatacagatccagcgaagcggacaccttaacctgtacctgctcctggattgctcgcagtccgtatcggagaatgatttcctaatttttaaagagagcgccagcctgatggtatag

SEQ ID NO: 101530 - DNA, 477 bp, Artificial Sequence
  derived and/or modified sequence
atgagggcgctgtgtataagagagacgtgcagctccgaattgggcttttctcgtaattggtcaaggagaaaggccggtcattgtccaaaccctgggatttccctgggggctgtccgaaccggcttcagattcggacatggagataaagtgaggtatagatgcagctcaaatcttgtgctgactggttcctctgagagggagtgtcaaggtaacggagtgtggtcaggcacggagccaatatgccggcagccgtatagctacgacttccctgaggacgtggcacctgccttagggacctccttttctcacatgctgggtgccaccaacccaacgcagaaaaccaaggagagccttggacggaagattcagattcagcgatccgggcatctgaatctgtatttgctcttggactgttctcagtctgtgagcgaaaatgactttctgattttcaaggagtccgcctccttaatggtctag

SEQ ID NO: 101531 - DNA, 477 bp, Artificial Sequence
  derived and/or modified sequence
atgagagccctgtgtatccgggagacctgctctagtgaactgggcttcagcagaaactggtcccgcagaaaggctggtcactgccctaatcccggtatctccttgggagcggtccgcacaggtttccgcttcgggcacggcgataaagtcagataccgctgcagctccaacctagtgcttacagggtcctctgagcgggagtgccagggtaacggagtgtggtccggaactgaacccatttgtcggcaaccgtacagttatgatttccctgaggacgtggccccagcgctcggcactagctttagccacatgttaggtgcaacaaacccgactcagaagaccaaagagtccctgggcagaaaaattcagattcagaggagtggccatcttaacctttacctgctgctcgattgttcccaatcagttagcgagaatgactttctcatcttcaaggagagcgctagcctaatggtatag

SEQ ID NO: 101532 - DNA, 420 bp, Artificial Sequence
  derived and/or modified sequence
atgggcccattaatggtattattttgcctcctgtttctgtacccaggtctggcggattcggctccaagctgtccccaaaatgtcaatatttcaggcggaacattcactctatctcacggctgggcgcctggaagtctcttaacctactcatgccctcaggggttgtatccttcgcccgcttcacggctttgtaagagcagtggacagtggcagacccctggtgcaacaagatccctttcaaaagctgtgtgcaagcccgttagatgcccagcacccgtttctttcgaaaatgggatttatacaccgcgtttggggtcatacccagttggaggtaacgtgtcattcgagtgtgaggatggttttattctgaggggaagccctgtgcgtcaatgtcgaccaaatggcatgtgggacgggtag

SEQ ID NO: 101533 - DNA, 378 bp, Artificial Sequence
  derived and/or modified sequence
atgggcccactgatggtactattttgcctccttttcttgtaccctggcctcgccgacagcgccccttcttgtcctcagaatgtgaacatttcagggggtacgtttaccctgagccacggttgggcaccaggatccttgcttacttactcctgtcctcagggtctgtatccttctccagctagccggctctgtaagagctcggggcagtggcagactccgggagcaacccggagtctgtctaaggccgtgtgcaagccaggtcactgtcctaatcccggaatcagtctcggagctgtgagaacaggatttcgatttggacacggcgataaggtccgctaccgttgcagtagcaacctggtgcttactggatcttcctag

SEQ ID NO: 101534 - DNA, 420 bp, Artificial Sequence
  derived and/or modified sequence
atgggaccactgatggtccttttttgcttattgtttctgtaccccggtctggcggactcagccccaagctgtcctcaaaacgtgaatatttccggtggaacctttacactgtctcacgggtgggcccctgggtctctgctgacctattcttgccctcagggattatatcccagcccggcttctcgactctgtaaatccagtggtcagtggcaaacgcctggggctacgcggtctctgagtaaggctgtgtgtaagccagttaggtgtcctgcaccggtgtctttcgaaaacgggatctacacacctcgcctgggcagttaccctgtgggtggtaacgtttcattcgagtgtgaggacggctttatcctgagggggtctcctgtgaggcaatgtcgtccaaatggcatgtgggacggatag

SEQ ID NO: 101535 - DNA, 477 bp, Artificial Sequence
  derived and/or modified sequence
atgcgggctctgtgcattagagagacatgttcttccgaactcggcttcagtcggaactggtctcgtaggaaggctggacactgccctaatccaggcattagcctcggcgcagtcagaaccggattccgcttcggacatggcgacaaagttcggtaccgatgctcatccaacctggtccttacagggagcagcgaacgcgagtgccaaggaaacggagtgtggtctggaactgagcctatctgcaggcagccctattcttacgacttccccgaggatgttgcccctgcgctgggaacctccttttctcatatgttgggcgcaactaaccccacgcaaaaaactaaggaaagtctgggacgcaagatccagattcagagatctggccacctgaacctgtaccttctccttgactgctcacagagtgtaagtgaaaacgatttcttaatattcaaggagagtgcaagtctgatggtgtag

SEQ ID NO: 101536 - DNA, 378 bp, Artificial Sequence
  derived and/or modified sequence
atgggccctcttatggtgctcttctgtctcctctttctttatcctggtctggccgatagtgccccatcttgtccacagaatgtcaatattagcggtgggactttcacactgagccatggctgggctcctgggtccctcctgacctactcctgtccccaagggctgtacccatcgcccgcatctagactgtgcaagagcagcgggcagtggcaaactcctggcgctacgaggagcctcagtaaggccgtgtgcaagcctggacactgtccgaaccccggaatatccctaggggcagtccgcactgggtttcgattcggacatggcgacaaggttcgttatagatgttcgtctaaccttgttcttactggatcatcctag

SEQ ID NO: 101537 - DNA, 378 bp, Artificial Sequence
  derived and/or modified sequence
atgggaccactgatggtcttgttctgccttttattcttgtaccccggtctcgctgatagcgcaccaagctgtccccaaaatgtgaatatcagtggagggaccttcacgttgtcccatgggtgggcgccagggtccctgctgacatacagttgtccacagggcttatatcctagtcccgctagtcggttgtgtaaaagcagtggacagtggcaaacacccggtgcaacgaggagcctctccaaggccgtctgcaagcctggtcattgtccaaaccccggtatttcactcggcgcagtgcgcacaggctttcgattcgggcatggggacaaggtgagataccgatgctcttcaaatctcgtgctaactggttcatcgtag

SEQ ID NO: 101538 - DNA, 420 bp, Artificial Sequence
  derived and/or modified sequence
atgggaccccttatggtactgttttgcctcctgtttctgtatcccggactggccgattctgcccctagttgtcctcagaacgtgaatatcagcggcggaacttttacactgtcacatggatgggcccctggctctcttcttacgtactcctgtcctcagggtctatatccgtcaccagcatcccggctctgtaagtccagcggtcagtggcagacacctggagctaccagatcgctgtctaaggcggtatgtaaaccagtccgctgccctgcgcctgtgagcttcgagaacggaatctacactcctcgtctaggaagctatcccgtgggcggaaatgtcagttttgaatgcgaggatggctttatcctcaggggctcgccagttcggcagtgtaggccaaacggaatgtgggatgggtag

SEQ ID NO: 101539 - DNA, 378 bp, Artificial Sequence
  derived and/or modified sequence
atgggcccactgatggtgcttttctgcttactgttcctgtaccctggactggctgacagcgccccaagctgtccccaaaacgtgaacattagtggtgggaccttcaccctctcacatggttgggcacctggatctctcctcacctattcctgccctcaagggctgtatcccagcccagcgagtagactctgtaaaagcagtggtcagtggcagacccccggtgcaacacgctccctttccaaagcagtctgtaaaccagggcactgtccaaatcccggaattagcctgggcgcagtacgtacgggcttccgattcggacatggcgataaagtacggtatagatgtagtagcaatctcgtgctgactggaagcagctag

SEQ ID NO: 101540 - DNA, 378 bp, Artificial Sequence
  derived and/or modified sequence
atggggccattgatggtactattttgcctgctgttcctatacccgggtctggccgacagcgcccctagttgccctcagaacgtaaatatctcgggaggtactttcaccctgtcacacggatgggcccctggcagcctccttacctacagttgtccgcaaggactatacccttctcccgcaagccgcctctgtaaatcctccggccaatggcagacaccaggcgctactaggtctctttcaaaggccgtgtgtaaacccggacactgccccaaccccggtatctcactgggagcagtgcggacaggctttcggtttggtcacggtgacaaggtccgctacaggtgctcatcaaatctggtgctgactggtagctcctag

SEQ ID NO: 101541 - DNA, 405 bp, Artificial Sequence
  derived and/or modified sequence
taaggccactgccccaaccccggtatctctctgggggctgtcaggacaggttttaggttcgggcatggagataaggtgcggtatcggtgctcttccaatcttgttttaacagggtctagcgagagggagtgtcagggcaacggagtgtggagcggaactgagcctatttgtagacagccctactcttatgattttcccgaagatgtggctcccgcactgggtaccagtttctcacatatgctcggcgcaaccaatcccacccagaaaacaaaggagagcctaggacggaagatccagatacagagatccgggcatttgaacctatatctgttattggattgtagccagtccgtgtcagagaatgattttcttatctttaaagagtcagcaagcctgatggtgtag

SEQ ID NO: 101542 - DNA, 420 bp, Artificial Sequence
  derived and/or modified sequence
atgggcccactgatggtgctgttctgcctcctgtttctgtatcccggattagccgattcggctccctcttgtccccaaaacgttaacatctccgggggaacattcacactgtcgcatggttgggccccaggcagtcttttgacctacagttgcccccaaggcttgtatccgagccctgcttcacgcttgtgcaaaagctccggccaatggcagacacccggagctactcgaagcctctctaaagccgtctgtaaacctgtgcgttgtcctgcacctgtcagctttgagaacggtatttacactccacgactcggctcttacccggtgggcggtaatgtgagttttgaatgtgaagacggcttcatcttgcgaggcagtcccgtaagacagtgcagaccaaacgggatgtgggacggttag

SEQ ID NO: 101543 - DNA, 420 bp, Artificial Sequence
  derived and/or modified sequence
atgggcccactgatggtgctcttctgtctgctgttcctgtacccaggtcttgccgattcggctcccagctgccctcagaatgtgaatattagcggtgggacctttacgcttagccatgggtgggccccaggtagcctgctgacatatagctgtccccaggggttgtatccatcccccgcttcacgcctgtgcaagtctagcgggcagtggcagaccccaggcgctactcgctccctgagtaaagccgtctgcaaaccggttaggtgcccagccccagtgagcttcgaaaacggaatctacaccccccgattgggctcttacccagtcggtggaaatgtgtcattcgaatgtgaagatggcttcatcctcagaggttcacctgttaggcagtgcagaccaaatggcatgtgggatggctag

SEQ ID NO: 101544 - DNA, 420 bp, Artificial Sequence
  derived and/or modified sequence
atgggtcctttgatggtcttgttctgcttactctttctgtaccccggactggcagatagcgccccatcctgtccccaaaacgtgaatattagcggagggacatttacactcagccatggctgggctcccggaagcttgctcacctactcctgcccacaaggtttgtacccttcccctgcaagccggctttgcaagtctagcggacagtggcagacccccggcgccacacggtcactctctaaggcagtatgcaaacccgtgcggtgtcctgcgcccgttagcttcgagaacggaatctatacaccccggttaggctcctaccctgtcggagggaatgtgtccttcgaatgtgaagacggctttatactgaggggttccccagtgagacagtgtagacccaacggtatgtgggacggttag

SEQ ID NO: 101545 - DNA, 420 bp, Artificial Sequence
  derived and/or modified sequence
atggggcccctcatggtgctgttttgcctcctctttttatacccaggtctggccgattcagcaccaagttgtccacagaatgtcaacatatctggtggcaccttcactctgagtcatggctgggctcctggctcgctgcttacctactcttgtccccaaggactttatccctcccccgcttcacgactgtgtaaatcttctgggcaatggcaaacacctggtgcgacccgctctttgtctaaagccgtgtgcaagccagttcggtgcccagctccagtgtcatttgaaaatggaatctatacacctagacttggatcctatcctgtgggtggcaacgtctctttcgaatgcgaggatggatttatattgagggggtctccggtgcggcagtgcagaccgaatggtatgtgggatggttag

SEQ ID NO: 101546 - DNA, 561 bp, Artificial Sequence
  derived and/or modified sequence
gtattttgctgttggttctgtggatgacaggtgacaaaacaggcaatgaagcagctgctgacccagctctagttttcgggaagtcagatgaccttttccctcccgcggctctctacctctcgccgcccctagggaggacaccatgggcccactgatggttcttttttgcctgctgttcctgtacccaggtctggcagactcggctccctcctgccctcagaacgtgaatatctcgggtggcaccttcaccctcagccatggctgggctcctgggagccttctcacctactcctgcccccagggcctgtacccatccccagcatcacggctgtgcaagagcagcggacagtggcagaccccaggagccacccggtctctgtctaaggcggtctgcaaacctgtgcgctgtccagcccctgtctcctttgagaatggcatttataccccacggctggggtcctatcccgtgggtggcaatgtgagcttcgagtgtgaggatggcttcatattgcggggctcgcctgtgcgtcagtgtcgccccaacggcatgtgggatggaga

SEQ ID NO: 101547 - DNA, 605 bp, Artificial Sequence
  derived and/or modified sequence
atagatatattagcatcagggagacagggcaaaggtttcacccttcagttcagtccccaatccctgcttattatttccctaacagaagaccatcccccttgccactccctggtttttcttctctggcagcaatgaagcagctgctgacccagctctagttttcgggaagtcagatgaccttttccctcccgcggctctctacctctcgccgcccctagggaggacaccatgggcccactgatggttcttttttgcctgctgttcctgtacccaggtctggcagactcggctccctcctgccctcagaacgtgaatatctcgggtggcaccttcaccctcagccatggctgggctcctgggagccttctcacctactcctgcccccagggcctgtacccatccccagcatcacggctgtgcaagagcagcggacagtggcagaccccaggagccacccggtctctgtctaaggcggtctgcaaacctggccactgccccaacccaggcatttcactgggcgcagtgcggacaggcttccgctttggtcatggggacaaggtccgctatcgctgctcctcgaatcttgtgctcacggggtcttcgga

SEQ ID NO: 101548 - DNA, 403 bp, Artificial Sequence
  derived and/or modified sequence
ctggccactgccccaacccaggcatttcactgggcgcagtgcggacaggcttccgctttggtcatggggacaaggtccgctatcgctgctcctcgaatcttgtgctcacggggtcttcggagcgggagtgccagggcaacggggtctggagtggaacggagcccatctgccgccaaccctactcttatgacttccctgaggacgtggcccctgccctgggcacttccttctcccacatgcttggggccaccaatcccacccagaagacaaaggaaagcctgggccgtaaaatccaaatccagcgctctggtcatctgaacctctacctgctcctggactgttcgcagagtgtgtcggaaaatgactttctcatcttcaaggagagcgcctccctcatggtgga

SEQ ID NO: 101549 - DNA, 539 bp, Artificial Sequence
  derived and/or modified sequence
acgatgtccctaacagcgaattccaaggcgcccgtgtagcaggagaggagcaagtcggccacgatgcgtgcactgtgcatcagggagacctgcagctccgagctggggttcagcaggaactggtcccgcaggaaggctggccactgccccaacccaggcatttcactgggcgcagtgcggacaggcttccgctttggtcatggggacaaggtccgctatcgctgctcctcgaatcttgtgctcacggggtcttcggagcgggagtgccagggcaacggggtctggagtggaacggagcccatctgccgccaaccctactcttatgacttccctgaggacgtggcccctgccctgggcacttccttctcccacatgcttggggccaccaatcccacccagaagacaaaggaaagcctgggccgtaaaatccaaatccagcgctctggtcatctgaacctctacctgctcctggactgttcgcagagtgtgtcggaaaatgactttctcatcttcaaggagagcgcctccctcatggtgga

SEQ ID NO: 101550 - DNA, 420 bp, Artificial Sequence
  derived and/or modified sequence
atgggccccctgatggtgctgttctgcctgctgttcctgtaccccggcctggccgacagcgcccccagctgcccccagaacgtgaacatcagcggcggcaccttcaccctgagccacggctgggcccccggcagcctgctgacctacagctgcccccagggcctgtaccccagccccgccagcagactgtgcaagagcagcggccagtggcagacccccggcgccaccagaagcctgagcaaggccgtgtgcaagcccgtgagatgccccgcccccgtgagcttcgagaacggcatctacacccccagactgggcagctaccccgtgggcggcaacgtgagcttcgagtgcgaggacggcttcatcctgagaggcagccccgtgagacagtgcagacccaacggcatgtgggacggctag

SEQ ID NO: 101551 - DNA, 378 bp, Artificial Sequence
  derived and/or modified sequence
atgggccccctgatggtgctgttctgcctgctgttcctgtaccccggcctggccgacagcgcccccagctgcccccagaacgtgaacatcagcggcggcaccttcaccctgagccacggctgggcccccggcagcctgctgacctacagctgcccccagggcctgtaccccagccccgccagcagactgtgcaagagcagcggccagtggcagacccccggcgccaccagaagcctgagcaaggccgtgtgcaagcccggccactgccccaaccccggcatcagcctgggcgccgtgagaaccggcttcagattcggccacggcgacaaggtgagatacagatgcagcagcaacctggtgctgaccggcagcagctag

SEQ ID NO: 101552 - DNA, 405 bp, Artificial Sequence
  derived and/or modified sequence
tgaggccactgccccaaccccggcatcagcctgggcgccgtgagaaccggcttcagattcggccacggcgacaaggtgagatacagatgcagcagcaacctggtgctgaccggcagcagcgagagagagtgccagggcaacggcgtgtggagcggcaccgagcccatctgcagacagccctacagctacgacttccccgaggacgtggcccccgccctgggcaccagcttcagccacatgctgggcgccaccaaccccacccagaagaccaaggagagcctgggcagaaagatccagatccagagaagcggccacctgaacctgtacctgctgctggactgcagccagagcgtgagcgagaacgacttcctgatcttcaaggagagcgccagcctgatggtgtag

SEQ ID NO: 101553 - DNA, 477 bp, Artificial Sequence
  derived and/or modified sequence
atgagagccctgtgcatcagagagacctgcagcagcgagctgggcttcagcagaaactggagcagaagaaaggccggccactgccccaaccccggcatcagcctgggcgccgtgagaaccggcttcagattcggccacggcgacaaggtgagatacagatgcagcagcaacctggtgctgaccggcagcagcgagagagagtgccagggcaacggcgtgtggagcggcaccgagcccatctgcagacagccctacagctacgacttccccgaggacgtggcccccgccctgggcaccagcttcagccacatgctgggcgccaccaaccccacccagaagaccaaggagagcctgggcagaaagatccagatccagagaagcggccacctgaacctgtacctgctgctggactgcagccagagcgtgagcgagaacgacttcctgatcttcaaggagagcgccagcctgatggtgtag

SEQ ID NO: 101554 - protein, 581 aa, Artificial Sequence
  derived and/or modified sequence
MQKPPLLLRRPLPPKFTKLSLHEKKTHTAKTGKIESLHVAFTEDETTSIKMDRTRFPDVLRNQSLTPINIQNIFLDHCVQERVTAISSPQKSTKHVREQIPDTATGSIFFPHCNSASTRIFGKQTNKMESSRKFKTMKDVYTEKRLENILILSSKFSKPKSTPGSVIAQKLEKMHPKHQPLPESPGYTYQHISRDLSATVPSPPPMTVSMKPEGQWPEHFKSTATLTLRVTEFPGFVSLPTPVLPRKPHRQSVIETLVTENGNIESVPKQIPPRPPEGLTKTEKIESEIHVVRGEGFKTVAATRYETITAMTNLAIVNCQVYGRNALNLKGFFILNCPDLTPLAFQLIYLNLSFNDLHYFPTEILCLKNLQILKLRNNPIKEIPSEIQQLEFLRIFTIAFNLITVLPIGLFSLSYLEELDVSYNELTFIPNEIQKLRSLEKLTVDGNELSFFPHGILKLNLTKIQFENNFTHPCFWRDNYLNNPQQLTQIISLFIVQNKLHKFYDKIPVEVQKLLKWWGAQFLTELAPLSIYSSRKAITEGYIAVELPKFEESKNITEGLLTQKRYEEVMVKCINATTVTS

SEQ ID NO: 101555 - DNA, 1746 bp, Artificial Sequence
  derived and/or modified sequence
atgcagaagccccccctgctgctgagaagacccctgccccccaagttcaccaagctgagcctgcacgagaagaagacccacaccgccaagaccggcaagatcgagagcctgcacgtggccttcaccgaggacgagaccaccagcatcaagatggacagaaccagattccccgacgtgctgagaaaccagagcctgacccccatcaacatccagaacatcttcctggaccactgcgtgcaggagagagtgaccgccatcagcagcccccagaagagcaccaagcacgtgagagagcagatccccgacaccgccaccggcagcatcttcttcccccactgcaacagcgccagcaccagaatcttcggcaagcagaccaacaagatggagagcagcagaaagttcaagaccatgaaggacgtgtacaccgagaagagactggagaacatcctgatcctgagcagcaagttcagcaagcccaagagcacccccggcagcgtgatcgcccagaagctggagaagatgcaccccaagcaccagcccctgcccgagagccccggctacacctaccagcacatcagcagagacctgagcgccaccgtgcccagccccccccccatgaccgtgagcatgaagcccgagggccagtggcccgagcacttcaagagcaccgccaccctgaccctgagagtgaccgagttccccggcttcgtgagcctgcccacccccgtgctgcccagaaagccccacagacagagcgtgatcgagaccctggtgaccgagaacggcaacatcgagagcgtgcccaagcagatcccccccagaccccccgagggcctgaccaagaccgagaagatcgagagcgagatccacgtggtgagaggcgagggcttcaagaccgtggccgccaccagatacgagaccatcaccgccatgaccaacctggccatcgtgaactgccaggtgtacggcagaaacgccctgaacctgaagggcttcttcatcctgaactgccccgacctgacccccctggccttccagctgatctacctgaacctgagcttcaacgacctgcactacttccccaccgagatcctgtgcctgaagaacctgcagatcctgaagctgagaaacaaccccatcaaggagatccccagcgagatccagcagctggagttcctgagaatcttcaccatcgccttcaacctgatcaccgtgctgcccatcggcctgttcagcctgagctacctggaggagctggacgtgagctacaacgagctgaccttcatccccaacgagatccagaagctgagaagcctggagaagctgaccgtggacggcaacgagctgagcttcttcccccacggcatcctgaagctgaacctgaccaagatccagttcgagaacaacttcacccacccctgcttctggagagacaactacctgaacaacccccagcagctgacccagatcatcagcctgttcatcgtgcagaacaagctgcacaagttctacgacaagatccccgtggaggtgcagaagctgctgaagtggtggggcgcccagttcctgaccgagctggcccccctgagcatctacagcagcagaaaggccatcaccgagggctacatcgccgtggagctgcccaagttcgaggagagcaagaacatcaccgagggcctgctgacccagaagagatacgaggaggtgatggtgaagtgcatcaacgccaccaccgtgaccagctag

SEQ ID NO: 101556 - DNA, 1746 bp, Artificial Sequence
  derived and/or modified sequence
atgcagaaaccgcccttgctgctgcgccgccctcttcccccaaagtttacaaagctgagcctgcacgagaagaagacacatactgccaagaccggaaagattgagtcactccacgtggcatttactgaggatgagacaacatcaatcaaaatggacaggactagattccctgacgtccttcgcaatcagtcactaacccccattaatatccaaaacatcttccttgaccactgtgtgcaggaacgtgttacagcgataagttctccacagaaaagcacaaagcacgtgcgagagcagattcccgataccgccacaggctcaatcttctttccgcactgcaattcagcaagcacccgcatcttcggcaaacaaactaataagatggagagtagccggaagttcaagacgatgaaggatgtgtacacagaaaaacggctcgaaaatatcctgatcctaagctccaaattctcaaagcctaagtccacaccaggctctgtcatagcccagaaactggaaaagatgcaccccaagcaccagcctttgcctgaaagccctggatacacataccagcacatatcacgcgacttatccgctactgtaccaagccctccccccatgacagtgtccatgaagcctgagggtcaatggcctgagcacttcaaaagcactgccactctgacactccgcgtgaccgagtttccggggtttgttagtctccccactccagtgctacccaggaagccccaccgacagagtgtgatagagacactagtaaccgaaaacggcaatattgaatctgtgccaaagcagatccctccgcgtcctccggaaggcctgactaagaccgagaagatcgagtccgagattcacgtcgtccggggagagggatttaagacggtggccgcaacacgttacgagacaatcaccgcaatgactaaccttgctatcgtgaattgccaagtttacggacgcaacgccctcaacctgaagggattctttattcttaactgccctgatctgacaccccttgcctttcagttaatatacctgaacctttcgttcaatgatctgcactacttccccaccgaaattctgtgtctgaagaaccttcaaatactcaaactgaggaataatcctatcaaggagatcccctccgagatccagcagcttgagtttctcagaatcttcacgattgccttcaacctgattaccgtgttgcctataggcctgttctcattgtcttatttagaggagctggatgtgtcatacaacgagctcacctttattccaaatgaaatacagaagttaagatcactcgaaaagctcactgtcgatggaaatgaactgtcctttttcccccacggaattctgaagctcaatctgacaaagatccagttcgagaacaattttacccacccttgcttctggcgagataattacctcaataacccccagcagctgactcagattataagcctgtttatagtgcagaataagttacataaattctatgataagattccagtcgaagtccaaaagttactgaagtggtggggggctcagttcctaacggaacttgcccctctttccatctacagttcccggaaagctataactgaaggatacatcgccgtggagctgcccaagtttgaggagagcaagaacatcacagaaggacttctgacccagaagagatacgaagaggtcatggtcaagtgcataaacgccactaccgtaacttcctag

SEQ ID NO: 101557 - DNA, 1746 bp, Artificial Sequence
  derived and/or modified sequence
atgcagaagccacccctgctgctgcggcggcccctgccccccaagttcaccaagctgagcctgcacgagaagaagacccacacagccaagacaggcaagattgagagcctgcacgtggccttcacagaagatgagaccaccagcatcaagatggacaggacccgcttcccagatgtgctgaggaaccagagcctgacccccatcaacatccagaacatcttcctggaccactgtgtgcaggagcgggtgacagccatcagcagcccccagaagagcaccaagcacgtgcgggagcagatcccagacacagccaccggcagcatcttcttcccccactgcaacagcgccagcacccgcatctttgggaagcagaccaacaagatggagagcagcaggaagttcaagaccatgaaggatgtgtacacagagaagaggctggagaacatcctgatcctgagcagcaagttcagcaagcccaagagcaccccaggctctgtgattgcccagaagctggagaagatgcaccccaagcaccagcccctgcctgagagccctggctacacctaccagcacatcagccgggacctgagcgccaccgtgcccagccccccacccatgacagtgtccatgaagccagagggccagtggccagagcacttcaagagcacagccaccctgaccctgcgggtgacagagttccctggctttgtgtccctgcccacccctgtgctgcccaggaagccccaccggcagagcgtcatcgagaccctggtgacagaaaatggaaacatcgagagcgtgcccaagcagatcccccccaggcctcctgagggcctgaccaagacagagaagattgaaagtgagatccacgtggtgcggggggagggcttcaagacagtggccgccaccaggtatgagaccatcacagccatgaccaacctggccatcgtgaactgccaggtgtatggaagaaatgccctgaacctgaagggcttcttcatcctgaactgcccagacctgacccccctggccttccagctgatctacctgaacctgtccttcaatgacctgcactacttccccacagagatcctgtgcctgaagaacctgcagatcctgaagctgaggaacaaccccatcaaggagatccccagcgagatccagcagctggagttcctgcgcatcttcaccatcgccttcaacctgatcaccgtgctgcccatcggcctcttcagcctgagctacctggaggagctggatgtgtcctacaatgagctgaccttcatccccaatgagatccagaagctgcggagcctggagaagctgactgtggatggaaatgagctgtccttcttcccccacggcatcctgaagctgaacctgaccaagatccagtttgagaacaacttcacccacccctgcttctggagggacaactacctgaacaacccccagcagctgacccagatcatcagcctcttcatcgtgcagaacaagctgcacaagttctatgacaagatccctgtggaggtgcagaagctgctgaagtggtggggcgcccagttcctgacagagctggcccccctgagcatctacagcagcaggaaggccatcacagagggctacatcgctgtggagctgcccaagtttgaggagagcaagaacatcacagagggcctgctgacccagaagagatatgaggaggtgatggtgaagtgcatcaatgccaccaccgtgaccagctag

SEQ ID NO: 101558 - DNA, 2091 bp, Artificial Sequence
  derived and/or modified sequence
ggaccccggttgctagggtgtgtctccttggcctcctagagggtggggatccgtggtgcttcttcgggaacagcctcctgcaggaagaccctcgctggacctttacctcgctgcctagattccgaggaaaaggagataggagacgaaaagccagttggtttggaaagcggccgattatcctaaagggtagtgtgggagtccagcacttccatgcccctctttgggtactacggaagggagatttccagcatcgtgtggaacatatgaccagggagtacaccttgagcgcttgtgtgcagttatcttttggcggattatgaaaaacagcacttattattcattaaaatgcaaaagcccccactgcttcttcgaagacccttacctccaaaattcactaagctgtctttacatgagaaaaaaacccatacagctaaaactggtaaaattgagtcactacatgtagcattcactgaagatgaaaccacttccattaaaatggatagaactcgttttcctgatgttttaagaaatcaatcactaacacctatcaatatccaaaatatctttcttgatcactgtgtacaagaaagagtgactgcaatttcatcaccccagaaatctactaagcatgtccgtgagcagattccagatactgctactggttccatattttttccacattgtaattcagcttctactcgaatttttgggaaacaaacaaacaaaatggaaagttcaagaaagtttaaaactatgaaagatgtttatactgaaaaaaggctagaaaacattttaattctttcttccaagttttccaaacctaaaagtactcctggctcagttatcgctcaaaaacttgagaaaatgcaccctaagcatcaacctttaccagagagtccaggctatacttatcagcacatctcgagagacttaagtgcaacagtgccaagccctccacctatgactgtatctatgaaaccagaaggacagtggcctgaacattttaaatcaactgctacattgacactaagagttactgaatttccaggttttgtttccttgccaacaccagttttaccaagaaaacctcacaggcagtctgtgatagaaactcttgtaacagaaaatggaaatatagaaagtgtcccaaagcaaatcccaccaagaccacctgaaggtctcaccaaaactgaaaaaatagaatcagagatacacgttgtacgtggtgaaggttttaagactgttgcagcaacacgatatgaaacaataacagccatgaccaacctggccatagtaaactgtcaagtatatgggagaaatgcacttaatctgaagggcttttttatcctaaattgtccagacttaacacctttggctttccagttgatatatcttaatttatcatttaatgatcttcattactttcccacagaaatattatgtcttaaaaatttacaaatactgaaattgagaaataatcctatcaaagaaattccttctgaaattcaacaacttgagttccttagaattttcaccattgcttttaatttaattactgttcttccaattgggttattttccttgtcttatcttgaagaacttgatgtttcctataatgaacttacttttattccaaatgaaattcagaaactcagatcacttgaaaaactgactgttgatgggaatgaactgagttttttcccccatggaattttgaagcttaacctgacaaaaattcagtttgagaataatttcactcatccttgtttttggagagataattatttgaataatccacaacaacttactcaaattatttctttgttcattgtccaaaataaactacataaattttatgataagatcccagtagaagttcagaagttactaaaatggtggggggcacagtttctaacagaacttgcacctctctccatctattcttcaagaaaagccatcactgaaggctacattgcagttgagttacccaaatttgaagaaagtaaaaacataacagaagggttactgacacaaaaacggtatgaagaagtcatggtgaaatgcattaatgccacaacagtgacgtcatga

SEQ ID NO: 101559 - DNA, 1746 bp, Artificial Sequence
  derived and/or modified sequence
atgcagaagccccccctgctgctgcggcggcccctgccccccaagtttacaaagttaagcctgcacgaaaaaaagacccacactgccaagaccggcaaaattgagtctctgcatgtggcattcacagaggatgaaacaacaagcatcaagatggacagaacccgcttccctgatgttcttagaaatcagtctcttacaccaataaacattcagaatatcttcctggaccactgcgtacaggagagggtaacagctatcagctccccacagaagagtacaaagcacgtacgggagcagatcccagacacggcaacaggtagcatcttctttcctcactgtaacagtgccagtaccaggatatttgggaaacagacaaataaaatggaaagtagcaggaaattcaaaactatgaaggatgtctacactgagaaaaggctcgagaacatactgatactttcgtccaaattctccaaaccgaaatccacccccgggagcgtgattgctcaaaagctcgaaaagatgcatcctaagcaccagcctctgcccgaaagtccggggtatacttatcagcacattagtcgcgacttgagtgccacagtccccagtcccccccccatgactgtgtctatgaagccagaaggacagtggccggagcacttcaagagtacagctactctgacattgcgagttacagagttcccgggctttgtgagcctgcctacacccgtcctgccccgaaagccccatcgccagtccgttattgagacactcgttacagagaacgggaatatcgagtccgttccgaagcagatcccaccacgcccaccagagggccttactaagaccgaaaagatcgagagcgagatccatgttgtccgtggtgagggtttcaaaaccgtggctgccacccgatacgaaaccattacagcaatgacaaacttggcgatcgtaaactgccaggtgtacgggagaaacgcgctcaatttaaagggctttttcatcctcaactgccctgacctcacccccctcgcctttcagcttatttacctcaatctatcctttaatgacctccattactttcctactgagatcctgtgcttgaagaatctccagatcttgaagcttcgcaataatcctatcaaggagattccatctgagatccaacagctcgagtttctgcgaatattcactatagcttttaaccttataaccgtgctccccatcgggctctttagcctgtcttacctagaggagttagatgtgtcctataatgagctcacatttatccccaatgagatccagaaactcagatccctcgaaaagcttacagtggacggcaatgagctgagctttttcccacatgggatcttgaagctcaacttaactaagatccagttcgagaacaactttacacacccttgcttttggagagataattacctcaataacccgcagcagctaacccagatcattagcctcttcatagtgcagaacaaactgcacaaattctatgacaagatccccgtagaggtgcagaagctgctaaaatggtggggtgcccagttcttgaccgagctggcccctcttagcatttactcctctagaaaagccatcaccgagggctacatcgctgtcgaactcccaaagttcgaagagtcgaagaatataacagagggtctgcttacacagaaacgttacgaggaagtgatggtgaaatgcataaacgctactacagtgacatcatag

SEQ ID NO: 101560 - DNA, 1746 bp, Artificial Sequence
  derived and/or modified sequence
atgcagaagccacccctcttgctacgcagaccgttgccgcctaaattcacgaaactgtccctgcatgagaagaaaactcacacagccaagaccgggaagattgaatcactgcatgttgcctttaccgaagacgagaccacgtctataaagatggacagaactaggttccccgacgttctgaggaatcagagcctcaccccaattaacatccagaacatatttttggatcactgcgtccaagaacgtgtgaccgctattagcagtcctcagaagagtaccaaacacgtacgcgaacagataccagacacggccaccggcagcatcttttttccccactgcaattccgcctctaccaggattttcgggaaacaaactaataaaatggagtcttctcggaagttcaagacaatgaaggatgtttacaccgagaagagactcgagaatatcctaatactttcctccaaattctccaaacccaagtccaccccaggcagcgtgatcgcacagaagctggagaagatgcacccaaaacatcagccccttcctgagtctccaggctatacctaccagcatatatccagagatctatcagccacggtgccaagtccaccgcctatgaccgtctcaatgaagcccgaaggccagtggccagagcacttcaagtcaacagccacattgacgctccgggtgaccgagtttcctgggttcgtctccttacccaccccagttctaccacgaaagccacaccgacaatctgtgattgaaacacttgtgaccgaaaacgggaatatcgaatcagtcccaaaacagataccccctagacctcccgagggcctgacaaagactgaaaaaattgagagcgagatccacgtggtgaggggtgaagggtttaaaactgtggccgctacacggtacgagactatcactgccatgacaaacctggccattgtcaactgtcaggtttacggacgcaacgcgctgaacttaaaaggatttttcatcttgaattgccctgacttgactcctttggccttccagcttatttacttaaacctgtcctttaacgacctgcattactttcccacagagatcctttgtcttaaaaatttgcagatcctcaagctgcgcaataacccaatcaaggagatacccagcgagattcagcaactggagtttctgcgaatttttactatcgcttttaatctcattactgtactgccaatcggcctgttctctctgtcctacttagaagaactcgatgtatcatataatgagctcacattcattcctaacgagatacagaagctccggtcactagaaaaactaacagttgacgggaatgagctgtcattcttcccccacggtatccttaaactcaacctgactaaaatccagtttgagaataacttcactcacccttgtttctggagggacaattaccttaataacccacaacagttaactcaaatcatcagtcttttcatcgtccagaacaagctgcacaagttttacgataagatccctgtcgaggtgcagaaactgctgaagtggtggggagcccagtttctcacagagctggctccactgagcatctattcgtcaagaaaggccattactgagggttacatcgccgttgaactcccaaaattcgaggaatccaagaacatcactgaggggctcttgacacaaaagagatacgaggaagtcatggtgaaatgtatcaacgccactaccgtcacaagctag

SEQ ID NO: 101561 - protein, 220 aa, Artificial Sequence
  derived and/or modified sequence
MPLTGVGPGSCRRQIIRALCLLLLLLHAGSAKNIWKRALPARLAEKSRAEEAGAPGGPRQPRADRCPPPPRTLPPGACQAARCQADSECPRHRRCCYNGCAYACLEAVPPPPVLDWLVQPKPRWLGGNGWLLDGPEEVLQAEACSTTEDGAEPLLCPSGYECHILSPGDVAEGIPNRGQCVKQRRQADGRILRHKLYKEYPEGDSKNVAEPGRGQQKHFQ

SEQ ID NO: 101562 - DNA, 663 bp, Artificial Sequence
  derived and/or modified sequence
atgcccctgaccggcgtgggccccggcagctgcagaagacagatcatcagagccctgtgcctgctgctgctgctgctgcacgccggcagcgccaagaacatctggaagagagccctgcccgccagactggccgagaagagcagagccgaggaggccggcgcccccggcggccccagacagcccagagccgacagatgcccccccccccccagaaccctgccccccggcgcctgccaggccgccagatgccaggccgacagcgagtgccccagacacagaagatgctgctacaacggctgcgcctacgcctgcctggaggccgtgccccccccccccgtgctggactggctggtgcagcccaagcccagatggctgggcggcaacggctggctgctggacggccccgaggaggtgctgcaggccgaggcctgcagcaccaccgaggacggcgccgagcccctgctgtgccccagcggctacgagtgccacatcctgagccccggcgacgtggccgagggcatccccaacagaggccagtgcgtgaagcagagaagacaggccgacggcagaatcctgagacacaagctgtacaaggagtaccccgagggcgacagcaagaacgtggccgagcccggcagaggccagcagaagcacttccagtag

SEQ ID NO: 101563 - DNA, 663 bp, Artificial Sequence
  derived and/or modified sequence
atgcccctgacaggcgttggccccggctcttgtcgacgccaaattatacgcgcgctgtgcctcttgctgctgctgttgcacgctggttctgccaaaaacatctggaaaagggcgctgccagcccgtctggccgaaaaaagccgtgcagaggaggccggagccccaggcggccctcggcagccccgcgcagaccggtgtccccccccaccgagaacactgccccccggggcatgtcaggccgctaggtgtcaggcagactccgagtgtccccgccaccgaaggtgctgctataacggatgcgcctatgcatgcctcgaggctgttccaccaccccctgtgttggactggttagttcagcccaagccaaggtggctaggaggcaacgggtggctgctcgatggtcccgaagaagtactccaggctgaggcctgcagtaccactgaggacggtgccgagcctttactgtgtcccagtggatacgagtgtcacattctaagccccggagacgtggctgagggcattccaaaccggggccagtgtgtgaagcagcggcgccaggcagacgggaggatcctcagacataagttgtacaaggagtaccccgagggagacagtaaaaatgtcgcagagcccggtcgcggccagcagaaacacttccaatag

SEQ ID NO: 101564 - DNA, 663 bp, Artificial Sequence
  derived and/or modified sequence
atgcccctgactggagtgggccctggcagctgccggcggcagatcatccgggccctgtgcctgctgctgctgctgctgcacgccggcagcgccaagaacatctggaagagggccctgcctgcccggctggccgagaagagcagagctgaggaggccggggcccctgggggcccccggcagcccagggctgaccgctgccccccaccacccaggaccctgcccccaggggcctgccaggccgcccgctgccaggccgacagcgagtgccccaggcaccggcgctgctgctacaacggctgtgcctatgcctgcctggaggccgtgcccccacctcctgtgctggactggctggtgcagcccaagccccgctggctgggcggcaatggctggctgctggatggccctgaggaggtgctgcaggccgaggcctgcagcaccacagaagatggagctgagcccctgctgtgccccagcggctatgagtgccacatcctgagccctggagatgtggccgagggcatccccaacagaggccagtgtgtgaagcagaggcggcaggctgatggccgcatcctgcggcacaagctgtacaaggagtacccagagggggacagcaagaatgtggccgagcccggccggggccagcagaagcacttccagtag

SEQ ID NO: 101565 - DNA, 663 bp, Artificial Sequence
  derived and/or modified sequence
atgcccctgaccggcgtgggccccggcagctgccggcggcagatcattagagcgttgtgcctgcttctgctcctgctgcacgccggcagcgcaaagaatatatggaagcgggcattgcctgccaggttagcagagaaatccagagccgaagaggccggcgctccagggggacctcgtcagccccgtgcagacaggtgcccacctcctccacgcaccttaccccccggggcttgccaggcagctagatgtcaagccgattctgagtgtccgaggcaccgccggtgctgttataatggttgcgcatatgcatgcctggaggcagttccccccccacccgtattggactggcttgttcagcctaaaccccgatggctagggggaaacgggtggctgttggacggccccgaggaggtgttacaggcagaggcctgcagtactacagaagatggcgctgagcctctgctttgcccatctgggtatgaatgccacatcctgagcccaggagacgtcgctgagggcatcccaaacagaggccagtgtgtcaagcagcgcagacaggcggatggaaggattttaaggcataagctttataaggaatatccggagggggacagtaaaaatgtagccgagccaggccgcggccagcagaaacacttccagtag

SEQ ID NO: 101566 - DNA, 663 bp, Artificial Sequence
  derived and/or modified sequence
atgcccctgactggcgtcggccctggcagctgcagaagacagatcattcgagccctgtgcctattactgcttcttttacatgcgggatcagcaaaaaacatctggaagcgcgcacttcccgctcgcttagctgagaaaagccgggctgaagaagccggagcgccagggggaccccgacaacccagagccgatcgctgtcctccaccccctaggacgctccctcccggtgcgtgtcaggctgcccgatgtcaggcagacagcgaatgccccaggcacaggagatgttgctacaacggttgtgcatatgcttgtctggaggctgttcccccaccaccagttctggactggttggtacagccgaagccaaggtggcttggcggaaatggatggttgcttgacggcccagaggaggtgttgcaggcggaggcctgttccacaactgaggatggcgctgagcccctcctctgcccttcgggctacgagtgtcacattctctcccctggcgatgtggccgaaggcattcccaataggggccagtgtgtcaaacagcggagacaagcagatgggaggatattacgacacaaactgtacaaggaataccctgagggcgatagcaaaaatgttgccgaacctggcagaggacagcagaagcactttcagtag

SEQ ID NO: 101567 - DNA, 1534 bp, Artificial Sequence
  derived and/or modified sequence
gacaggccactcccggccacgtctccaagcaagccggtgccccctcctcctgctgccaccgcccactgagctgcctgggctgcagacgccctggttggagcgtctggggccagatgttatagggcaagctaaaaataaccgggcaggccagccaccatcgaggaaggggcatgtgctggacgcggacacatgatccgagggaccctgctgggtggaactaagaaagtccagcagactgtgcacgctcctgtccccactcacaggcccacgcagcgaggggggcccctcttctgtgtgcgtctggaaggtcgctgcccagggaggaaatgcctttaaccggcgtggggccgggcagctgcaggaggcagatcatccgggctctgtgcctcttgctacttctcctccacgccggctctgccaagaatatctggaaacgggcattgcctgcgaggctggccgagaaatcccgtgccgaggaggcgggcgcgcccggcggcccccggcagccccgagcagaccgctgcccgccgcctccgcggacgctgccccccggcgcctgccaggccgcgcgctgtcaggcggactccgagtgcccgcggcaccggcgctgctgctacaacggatgcgcctacgcctgcctagaagctgtgccgcccccgccagtcttagactggctggtgcagccgaaacctcgatggcttggtggcaatggctggctcctggatggccctgaggaggtgttacaagcagaggcgtgcagcaccacggaggatggggccgaacccctgctctgtccctcgggctatgagtgccacatcctgagcccaggtgacgtggccgaaggtatccccaaccgtgggcagtgcgtcaagcagcgccggcaagcagatgggcgaatcctacgacacaaactttacaaagaatatccagaaggtgactcaaagaatgtggcagaacctggaaggggacaacagaagcactttcagtaaagcaacggcaagcagctaggttgcaagaacattcctctactttctgctaagccttggaaacagttgggaaaagtagtttgaccctcacagttcacattcagctcagcagagcaagaccccagagatgcttagagacaggacacctggccatcaaacccagtttggcccagcctggttgggtgactttgtgggagccacttaacagctctgggtccctgttttaccatcctgggagcaaggccctgcagctccacgagacctttaccccgggaagaagccgccacccatgaaagcatttctgaagcccctttctaagacaaggctcagcatcttgatatttttgacagattcctcccaagtctggctctgggaggtatgtacccatctcaaatgttcccaagataaattcatccttcaggaaatggaaatgaacttgcttactaatgtgtgattcctagttgtagccaccggatgtgctgaggcctaaatgttagcaggtgggaggaggccacagaacaataaaaacaaccaaataagatgccgag

SEQ ID NO: 101568 - protein, 308 aa, Artificial Sequence
  derived and/or modified sequence
MRPEGSLTYRVPERLRQGFCGVGRAAQALVCASAKEGTAFRMEAVQEGAAGVESEQAALGEEAVLLLDDIMAEVEVVAEEEGLVERREEAQRAQQAVPGPGPMTPESALEELLAVQVELEPVNAQARKAFSRQREKMERRRKPHLDRRGAVIQSVPGFWANVIANHPQMSALITDEDEDMLSYMVSLEVEEEKHPVHLCKIMLFFRSNPYFQNKVITKEYLVNITEYRASHSTPIEWYPDYEVEAYRRRHHNSSLNFFNWFSDHNFAGSNKIAEILCKDLWRNPLQYYKRMKPPEEGTETSGDSQLLS

SEQ ID NO: 101569 - DNA, 927 bp, Artificial Sequence
  derived and/or modified sequence
atgagacccgagggcagcctgacctacagagtgcccgagagactgagacagggcttctgcggcgtgggcagagccgcccaggccctggtgtgcgccagcgccaaggagggcaccgccttcagaatggaggccgtgcaggagggcgccgccggcgtggagagcgagcaggccgccctgggcgaggaggccgtgctgctgctggacgacatcatggccgaggtggaggtggtggccgaggaggagggcctggtggagagaagagaggaggcccagagagcccagcaggccgtgcccggccccggccccatgacccccgagagcgccctggaggagctgctggccgtgcaggtggagctggagcccgtgaacgcccaggccagaaaggccttcagcagacagagagagaagatggagagaagaagaaagccccacctggacagaagaggcgccgtgatccagagcgtgcccggcttctgggccaacgtgatcgccaaccacccccagatgagcgccctgatcaccgacgaggacgaggacatgctgagctacatggtgagcctggaggtggaggaggagaagcaccccgtgcacctgtgcaagatcatgctgttcttcagaagcaacccctacttccagaacaaggtgatcaccaaggagtacctggtgaacatcaccgagtacagagccagccacagcacccccatcgagtggtaccccgactacgaggtggaggcctacagaagaagacaccacaacagcagcctgaacttcttcaactggttcagcgaccacaacttcgccggcagcaacaagatcgccgagatcctgtgcaaggacctgtggagaaaccccctgcagtactacaagagaatgaagccccccgaggagggcaccgagaccagcggcgacagccagctgctgagctag

SEQ ID NO: 101570 - DNA, 927 bp, Artificial Sequence
  derived and/or modified sequence
atgcgacctgaggggtcactcacttacagggtccccgaaagactgagacagggcttttgtggtgtcgggcgtgcagctcaagctctggtctgcgccagtgcaaaggagggaactgcatttcgcatggaggctgtccaggagggggcggccggcgtggagagcgaacaggcagcacttggagaggaggcagtactcttgctggatgacatcatggccgaggtggaagtggtcgccgaggaagagggactcgtcgagagaagggaagaggcgcagagagcccaacaggcagtgcccggcccaggacccatgaccccagagtcagcattggaggagctgttggctgttcaagtcgagcttgagcccgtcaatgcacaagccaggaaagctttttctcgccaaagagaaaaaatggaacgccgccggaagccgcacctggacaggagaggcgctgtcattcagagtgtgcctggcttctgggcaaatgtgatagccaaccacccacaaatgagcgcactcataaccgatgaggatgaggatatgctctcttatatggtcagtctggaggttgaggaagagaagcacccggttcacctctgcaagatcatgctgtttttccgctccaacccttacttccaaaataaggtcatcaccaaggaatacctcgtgaatatcactgaatatcgtgcctcccattcaactcctattgagtggtatccagactatgaggtcgaggcctaccgccgacggcatcataacagctccctgaacttcttcaactggttctccgaccacaacttcgctggctcaaacaaaattgctgagattctatgtaaggatctgtggaggaatcctctacagtattacaaaagaatgaagccacctgaggaggggacagagacgagtggcgactctcagctgttaagctag

SEQ ID NO: 101571 - DNA, 927 bp, Artificial Sequence
  derived and/or modified sequence
atgcgccccgaaggttctctcacttacagagttcccgagcgcctgcgccagggattttgtggtgtgggacgcgccgcccaggcactggtctgcgcctcggctaaggaggggaccgcctttagaatggaggctgtgcaggaaggcgcggcaggagtggagtccgaacaggctgcgttaggtgaagaagccgtcttactcctggatgatataatggctgaagtggaggtggtggccgaggaggagggtctcgttgaacggagggaggaggcacagagagcccagcaagctgtgccaggacctggccctatgactccagagtccgccttggaagaactgctcgcagtccaggtggagctggagcccgtaaatgcacaagccagaaaggcattctcccgccagcgggagaagatggaacgccgtagaaaacctcacttagacaggcggggggcggttatccagagcgtgccagggttttgggcaaatgtgattgcgaaccacccacagatgtcagcccttatcaccgacgaagacgaggatatgcttagctacatggtgagcttagaagttgaagaggaaaaacatcctgtccacctctgcaagatcatgctctttttccggtcaaacccctattttcagaataaggttattaccaaggagtatctggtcaacatcactgagtatcgagccagccacagcacccctatcgagtggtatccagactacgaggttgaagcttacaggagacgccatcacaactcatccctgaacttctttaattggttctccgatcataattttgctggcagcaataaaattgctgagatcctgtgcaaagacttgtggcgcaatccccttcagtactacaagagaatgaagccacctgaggaggggacagaaacaagcggggacagtcagctcctgagctag

SEQ ID NO: 101572 - DNA, 927 bp, Artificial Sequence
  derived and/or modified sequence
atgagacccgaggggtcccttacctatcgcgtgcccgaacggcttcggcagggcttttgcggagtgggcagggcggctcaggcactggtgtgtgcctcagcaaaagagggcactgcttttcggatggaggcagtacaggaaggcgctgctggagtcgaatcagagcaggccgctctaggggaagaggctgtgctgttgcttgacgatattatggcagaagtagaagtggtggctgaagaggagggcctcgtagaaaggagagaggaggctcagcgggcccagcaagccgttccaggtcccgggcctatgaccccggagtcagccctcgaggagctgctagcagtgcaggtggaacttgagcctgttaacgcacaggcacgaaaagcattttcacgacaaagagaaaagatggagcgtcggagaaagcctcatctggatcgtaggggtgcggtgatccaatcagttcctgggttttgggccaacgttatagcgaatcacccacagatgtccgcactcatcacagacgaggatgaggacatgctgtcgtacatggtgagcttagaggtggaagaggagaaacacccagtccatctctgtaagataatgctcttcttccggagcaatccgtacttccaaaataaggtgataaccaaagagtacctggtgaacattaccgaatatagagcctcccactcaacacccatagagtggtatcctgattatgaggtcgaagcatacaggagacgtcatcataacagctccctgaatttctttaattggttctccgaccataactttgcggggtccaataagatcgctgagattctgtgtaaggacctctggcggaaccctctccagtattataagcggatgaaaccaccagaggagggaaccgagacaagtggcgatagtcagctgttaagctag

SEQ ID NO: 101573 - DNA, 927 bp, Artificial Sequence
  derived and/or modified sequence
atgaggcctgagggcagcctgacctacagagtgcctgagcggctgcggcagggcttctgtggggtgggccgggccgcccaggccctggtgtgtgccagcgccaaggagggcacagccttcaggatggaggccgtgcaggagggcgccgccggcgtggagagcgagcaggccgccctgggggaggaggccgtgctgctgctggatgacatcatggccgaggtggaggtggtggccgaggaggagggcctggtggagcggcgggaggaggcccagagggcccagcaggccgtgcccggccctggccccatgaccccagagagcgccctggaggagctgctggccgtgcaggtggagctggagcctgtgaatgcccaggccaggaaggccttcagccggcagcgggagaagatggagaggaggaggaagccccacctggacagaagaggagctgtgatccagagcgtgcccggcttctgggccaacgtgattgccaaccacccccagatgtctgccctgatcacagatgaagatgaggacatgctgagctacatggtgtccctggaggtggaggaggagaagcaccctgtgcacctgtgcaagatcatgctgttcttccgcagcaacccctacttccagaacaaggtgatcaccaaggagtacctggtgaacatcacagagtaccgggccagccacagcacccccatcgagtggtacccagactatgaggtggaggcctacagaagaagacaccacaacagcagcctgaacttcttcaactggttcagtgaccacaactttgctggcagcaacaagattgctgagatcctgtgcaaggacctgtggaggaaccccctgcagtactacaagaggatgaagcccccagaggagggcacagagaccagcggggacagccagctgctgtcctag

SEQ ID NO: 101574 - DNA, 927 bp, Artificial Sequence
  derived and/or modified sequence
atgcggcccgagggcagcctgacctaccgggtgcccgagcggctgagacagggattctgcggtgtgggtcgtgccgcgcaagcgctagtctgtgcctctgctaaggagggaactgcattcaggatggaagctgttcaggaaggtgctgccggggtggagagcgagcaggcagcgctgggagaagaggccgtgcttctgctcgatgacatcatggccgaggtcgaagtagtggcagaagaagaaggcttagtcgagcgccgtgaagaagcccagagggctcaacaggctgttcctggccctggtcctatgacccctgaaagcgccctggaagagttgcttgccgttcaagttgaactggagcctgtgaacgcccaggcccgcaaggcatttagcaggcagagagagaaaatggagagacgaaggaaaccccacctggatcgcagaggcgcagtcattcaatcagtgccgggattttgggccaacgtcatagctaatcaccctcagatgagcgcacttattactgacgaggatgaggacatgttaagctacatggtgtcgttagaggtcgaagaagaaaaacaccccgttcacctctgtaagatcatgttattctttcgctccaatccttatttccaaaataaggtgatcacaaaggagtatctggtaaatatcaccgaataccgggcctcccatagtacacccattgagtggtacccagattacgaagtcgaggcatacagacgtcgtcaccataactccagcttaaacttttttaattggttctctgaccataatttcgcagggagtaataagatcgccgagatcttatgcaaagacctgtggcggaatcctctacaatactacaagcgaatgaagccacctgaagaagggacggagacatctggcgatagtcagctgctgagctag

SEQ ID NO: 101575 - DNA, 927 bp, Artificial Sequence
  derived and/or modified sequence
atgcggcccgagggcagcctgacctaccgggtgcccgagcggctgcgacaggggttttgcggagtcggtcgggctgctcaggcacttgtgtgtgcatcagcgaaagagggcaccgccttccgcatggaagctgtgcaggaaggggccgcaggagttgaatctgaacaggccgctcttggggaagaggccgtgcttctgctggacgacatcatggctgaggtcgaggtcgtggcggaagaggaagggctggtggagagaagggaggaggcccagcgggcccagcaagcagtcccaggtcccggccctatgacccctgagtcggcactggaggaacttttggccgtgcaggttgagctcgagccagtcaacgcccaggcgaggaaggcattctctagacagcgggagaagatggagagaagaagaaagccacatctagaccggcggggcgcagttatccagtccgtgcctggcttttgggccaacgtcattgctaatcacccacagatgtccgcgctgataacagatgaagatgaggacatgctgtcctacatggtgtctttagaagtggaggaagaaaaacatcccgtgcatctctgcaagattatgctgttcttcagaagcaatccctactttcaaaataaggtcatcaccaaggaatatttggtcaacataactgaatatcgagccagccactcaacccccattgaatggtacccggactacgaagttgaagcctatcggcggcgccaccacaattcgtccctgaacttctttaattggttcagcgatcataatttcgcgggctctaacaagatcgcagaaattctgtgcaaggatctctggaggaacccgctgcagtactataagcgaatgaagcctcccgaagagggcactgaaactagcggcgattcccagctactttcttag

SEQ ID NO: 101576 - DNA, 927 bp, Artificial Sequence
  derived and/or modified sequence
atgcggcccgagggcagcctgacctaccgggtgcccgagcggctgcgccaagggttctgtggggtcgggagggccgcacaggccctcgtttgcgcaagcgctaaggagggcactgccttcagaatggaggctgtgcaggagggcgccgcaggagtggaaagtgaacaggcagccctgggtgaggaggcagtgctcttgcttgatgatatcatggctgaggtcgaggtggttgcagaggaagagggactagtcgagcgccgggaggaagcgcagcgtgcgcaacaggccgtccccggccccgggccgatgacccccgagtctgccctggaagagctcctggcagtgcaggtcgagcttgagcctgtgaatgctcaagcccggaaagccttcagccgccagagagaaaaaatggaacggaggcggaagccgcacctggatagaagaggtgcggttattcaatcggtacccggcttctgggctaatgtcatcgccaatcatccgcagatgagtgcattgataactgacgaagatgaagacatgctgtcatatatggtgagccttgaagtcgaagaagaaaagcatcccgttcacctctgtaaaatcatgctcttcttcagatctaatccctactttcagaacaaggtaatcaccaaggagtatctcgtaaacatcacagagtacagagcaagtcatagcacaccgattgagtggtacccagattacgaggtagaagcctatcgcagacggcaccacaacagttctctgaactttttcaattggtttagtgaccacaattttgctggctctaacaaaatcgccgagattttatgcaaggacctgtggaggaaccccctccagtactataagcggatgaaaccccctgaggagggaacagaaacttctggagactcccagctgctttcttag

SEQ ID NO: 101577 - DNA, 927 bp, Artificial Sequence
  derived and/or modified sequence
atgcgtcccgaagggtccctcacataccgcgtgcctgaaagactgcgccagggcttctgcggcgtgggaagggctgcccaggcccttgtttgcgccagcgccaaggaaggcaccgcatttagaatggaagcagtacaagaaggcgcagcaggcgtcgaatctgaacaggccgcactcggagaggaagccgttctgctgctagacgacattatggccgaggttgaagtcgtggccgaagaggagggactggttgaacgcagggaagaggctcagagggcacagcaggccgtaccaggccctggacccatgacccccgagagcgctctcgaggaactgctagccgtgcaagttgagcttgagccagttaacgcccaggcccgtaaggcatttagcagacagcgggaaaaaatggagcgaaggagaaagcctcacctggatcggaggggtgcagttattcaaagcgtgcctgggttttgggccaatgtgatcgctaatcacccgcagatgagcgctctgattactgatgaggatgaggacatgctgtcatatatggtaagcctcgaggtggaagaggagaaacaccccgtgcatctgtgtaaaattatgttgttcttccgttctaacccctacttccagaacaaagtcatcacgaaggagtacttggttaacatcaccgagtaccgtgcctcccactccaccccgattgaatggtacccagactacgaagttgaagcctaccgcaggcgccaccacaatagttccctgaactttttcaattggttttctgatcataacttcgccggttctaataaaattgccgagatcctgtgcaaagatttgtggagaaatcccttgcaatactacaagcgaatgaaacccccagaggaagggactgagacatccggcgatagccagctgctgtcttag

SEQ ID NO: 101578 - DNA, 927 bp, Artificial Sequence
  derived and/or modified sequence
atgcgccctgaggggagcttgacgtaccgcgtacccgagagactccgacagggattttgtggggttgggagggcagcacaggctctggtatgcgctagtgcaaaagaggggaccgcctttaggatggaagctgttcaggagggggcagcaggcgtggagtccgagcaggcggcattgggtgaagaagcagtgctgctgctggatgacataatggccgaagtcgaggtggttgccgaagaggaaggattagttgagagaagggaggaggcccagcgggctcagcaggctgtgcctggtcctggacctatgactccggagtctgctctagaggaactcctagctgtccaggttgaactggaaccagtgaacgcgcaggctcggaaagccttttctcgtcagcgagagaaaatggaaagaagaaggaaaccacatttggaccgtagaggggcagttatacagtctgttcccggtttctgggccaacgttatcgcgaaccatcctcaaatgagcgcactgatcaccgacgaggacgaagatatgctctcatacatggtgagtctagaggtggaggaggagaaacacccggtacacctgtgcaagataatgcttttttttcgctctaacccgtacttccagaataaggtgatcacaaaggagtacttagtgaatatcaccgaataccgggcttctcactccactcctattgaatggtaccctgactatgaggtggaggcttacaggcgacggcatcacaacagcagtttgaacttttttaactggttctcggaccacaactttgcgggatctaataagatcgcagaaatcctctgtaaagatctgtggcggaatcctctccaatattacaagcggatgaagccgcctgaagaaggaacagagacttccggcgacagtcagctgttgagttag

SEQ ID NO: 101579 - DNA, 927 bp, Artificial Sequence
  derived and/or modified sequence
atgcgccctgaaggtagtctcacttaccgcgtgcccgagcgcttaagacaggggttttgtggtgtagggagggccgcacaggcattggtgtgcgcgagtgccaaagaagggactgcatttcgcatggaagccgtacaggaaggcgctgctggcgttgaaagcgaacaagctgcgctgggtgaggaggctgtgttattgctggacgatattatggctgaggttgaggtcgtcgccgaggaagaaggcttggtcgaaagacgggaagaggcccagagagctcagcaagccgtgcctggtcctgggcctatgactcccgagtcagccctggaggaacttcttgcagtgcaagttgaactggagccagtgaacgcccaggccagaaaagcgttttcccggcaaagagagaagatggagaggcggcgaaaacctcacctggacaggagaggcgcagtgatccagtcagtgcccggattttgggcaaatgtaatcgcaaatcatccgcagatgagtgccctgatcacggatgaggatgaagacatgctgtcttatatggtgagtctggaggtggaggaggagaagcatcctgtgcatctctgcaagatcatgcttttcttccggtccaacccatactttcagaacaaagtgattaccaaggaatacttggtgaacattacggaatatcgcgctagccactccacacctatagagtggtatcccgattatgaagtagaggcctatagacgccgacaccataacagttctcttaatttcttcaattggtttagtgatcacaatttcgcagggtcgaacaagatcgccgaaatcctatgcaaagacctgtggcgaaacccactccagtactacaaaagaatgaagcccccagaagaggggactgagacctcaggagactcgcagctgctgtcgtag

SEQ ID NO: 101580 - DNA, 1161 bp, Artificial Sequence
  derived and/or modified sequence
ggcccttcgcgcgcagtcccttagggggcgcctggaagcccggcgcatgcgccctgagggctcgctgacctaccgggtgccagagaggctgcggcagggtttctgtggcgtgggtcgggcagcacaggccttggtgtgtgcgagtgccaaggagggcaccgccttcaggatggaggctgtacaggagggggcggccggggtggagagtgagcaggcggctttgggggaggaggcggtgctgctgttggatgacataatggcggaggtggaggtggtggcggaggaggagggcctcgtggagcggcgggaggaggcccagcgggcacagcaggctgtgcctggccctgggcccatgaccccagagtctgcactggaggagctgctggccgttcaggtggagctggagccggttaatgcccaagccaggaaggccttttctcggcagcgggaaaagatggagcggaggcgcaagccccacctagaccgcagaggcgccgtcatccagagcgtccctggcttctgggccaatgttattgcaaaccacccccagatgtcagccctgatcactgacgaagatgaagacatgctgagctacatggtcagcctggaggtggaagaagagaagcatcctgttcatctctgcaagatcatgttgttctttcggagtaacccctacttccagaataaagtgattaccaaggaatatctggtgaacatcacagaatacagggcttctcattccactccaattgagtggtatccggattatgaagtggaggcctatcgccgcagacaccacaacagcagccttaacttcttcaactggttctctgaccacaacttcgcaggatctaacaagattgctgagatcctatgtaaggacctgtggcgcaatcccctgcaatactacaagaggatgaagccacctgaagagggaacagagacgtcaggggactcccagttgttgagttgaatatgatggagcatcagattttacctaatacagcagaactcctaaaaagttacagccatatgcaggacggcagtactcagcatggtcttatgcacaggaactaaaggaaaaacagatcgagtcacaaaaattcaggaagagggggtaaatgtggattgtatggaatgaaaaataaacattctcaagga

SEQ ID NO: 101581 - DNA, 853 bp, Artificial Sequence
  derived and/or modified sequence
atgcgccctgagggctcgctgacctaccgggtgccagagaggctgcggcagggtttctgtggcgtgggtcgggcagcacaggccttggtggagctggagccggttaatgcccaagccaggaaggccttttctcggcagcgggaaaagatggagcggaggcgcaagccccacctagaccgcagaggcgccgtcatccagagcgtccctggcttctgggccaatgttattgcaaaccacccccagatgtcagccctgatcactgacgaagatgaagacatgctgagctacatggtcagcctggaggtggaagaagagaagcatcctgttcatctctgcaagatcatgttgttctttcggagtaacccctacttccagaataaagtgattaccaaggaatatctggtgaacatcacagaatacagggcttctcattccactccaattgagtggtatccggattatgaagtggaggcctatcgccgcagacaccacaacagcagccttaacttcttcaactggttctctgaccacaacttcgcaggatctaacaagattgctgagatcctatgtaaggacctgtggcgcaatcccctgcaatactacaagaggatgaagccacctgaagagggaacagagacgtcaggggactcccagttgttgagttgaatatgatggagcatcagattttacctaatacagcagaactcctaaaaagttacagccatatgcaggacggcagtactcagcatggtcttatgcacaggaactaaaggaaaaacagatcgagtcacaaaaattcaggaagagggggtaaatgtggattgtatggaatgaaaaataaacattctcaagg

SEQ ID NO: 101582 - DNA, 1160 bp, Artificial Sequence
  derived and/or modified sequence
ggcccttcgcgcgcagtcccttagggggcgcctggaagcccggcgcatgcgccctgagggctcgctgacctaccgggtgccagagaggctgcggcagggtttctgtggcgtgggtcgggcagcacaggccttggtgtgtgcgagtgccaaggagggcaccgccttcaggatggaggctgtacaggagggggcggccggggtggagagtgagcaggcggctttgggggaggaggcggtgctgctgttggatgacataatggcggaggtggaggtggtggcggaggaggagggcctcgtggagcggcgggaggaggcccagcgggcacagcaggctgtgcctggccctgggcccatgaccccagagtctgcactggaggagctgctggccgttcaggtggagctggagccggttaatgcccaagccaggaaggccttttctcggcagcgggaaaagatggagcggaggcgcaagccccacctagaccgcagaggcgccgtcatccagagcgtccctggcttctgggccaatgttattgcaaaccacccccagatgtcagccctgatcactgacgaagatgaagacatgctgagctacatggtcagcctggaggtggaagaagagaagcatcctgttcatctctgcaagatcatgttgttctttcggagtaacccctacttccagaataaagtgattaccaaggaatatctggtgaacatcacagaatacagggcttctcattccactccaattgagtggtatccggattatgaagtggaggcctatcgccgcagacaccacaacagcagccttaacttcttcaactggttctctgaccacaacttcgcaggatctaacaagattgctgagatcctatgtaaggacctgtggcgcaatcccctgcaatactacaagaggatgaagccacctgaagagggaacagagacgtcaggggactcccagttgttgagttgaatatgatggagcatcagattttacctaatacagcagaactcctaaaaagttacagccatatgcaggacggcagtactcagcatggtcttatgcacaggaactaaaggaaaaagagatcgagtcacaaaaattcaggaagagggggtaaatgtggattgtatggaatgaaaaataaacattctcaagg

SEQ ID NO: 101583 - DNA, 1161 bp, Artificial Sequence
  derived and/or modified sequence
ggcccttcgcgcgcagtcccttagggggcgcctggaagcccggcgcatgcgccctgagggctcgctgacctaccgggtgccagagaggctgcggcagggtttctgtggcgtgggtcgggcagcacaggccttggtgtgtgcgagtgccaaggagggcaccgccttcaggatggaggctgtacaggagggggcggccggggtggagagtgagcaggcggctttgggggaggaggcggtgctgctgttggatgacataatggcggaggtggaggtggtggcggaggaggagggcctcgtggagcggcgggaggaggcccagcgggcacagcaggctgtgcctggccctgggcccatgaccccagagtctgcactggaggagctgctggccgttcaggtggagctggagccggttaatgcccaagccaggaaggccttttctcggcagcgggaaaagatggagcggaggcgcaagccccacctagaccgcagaggcgccgtcatccagagcgtccctggcttctgggccaatgttattgcaaaccacccccagatgtcagccctgatcactgacgaagatgaagacatgctgagctacatggtcagcctggaggtggaagaagagaagcatcctgttcatctctgcaagatcatgttgttctttcggagtaacccctacttccagaataaagtgattaccaaggaatatctggtgaacatcacagaatacagggcttctcattccactccaattgagtggtatccggattatgaagtggaggcgtatcgccgcagacaccacaacagcagccttaacttcttcaactggttctctgaccacaacttcgcaggatctaacaagattgctgagatcctatgtaaggacctgtggcgcaatcccctgcaatactacaagaggatgaagccacctgaagagggaacagagacgtcaggggactcccagttgttgagttgaatatgatggagcatcagattttacctaatacagcagaactcctaaaaagttacagccatatgcaggacggcagtactcagcatggtcttatgcacaggaactaaaggaaaaagagatcgagtcacaaaaattcaggaagagggggtaaatgtggattgtatggaatgaaaaataaacattctcaagga

SEQ ID NO: 101584 - protein, 956 aa, Artificial Sequence
  derived and/or modified sequence
MPRVSAPLVLLPAWLVMVACSPHSLRIAAILDDPMECSRGERLSITLAKNRINRAPERLGKAKVEVDIFELLRDSEYETAETMCQILPKGVVAVLGPSSSPASSSIISNICGEKEVPHFKVAPEEFVKFQFQRFTTLNLHPSNTDISVAVAGILNFFNCTTACLICAKAECLLNLEKLLRQFLISKDTLSVRMLDDTRDPTPLLKEIRDDKTATIIIHANASMSHTILLKAAELGMVSAYYTYIFTNLEFSLQRMDSLVDDRVNILGFSIFNQSHAFFQEFAQSLNQSWQENCDHVPFTGPALSSALLFDAVYAVVTAVQELNRSQEIGVKPLSCGSAQIWQHGTSLMNYLRMVELEGLTGHIEFNSKGQRSNYALKILQFTRNGFRQIGQWHVAEGLSMDSHLYASNISDTLFNTTLVVTTILENPYLMLKGNHQEMEGNDRYEGFCVDMLKELAEILRFNYKIRLVGDGVYGVPEANGTWTGMVGELIARKADLAVAGLTITAEREKVIDFSKPFMTLGISILYRVHMGRKPGYFSFLDPFSPGVWLFMLLAYLAVSCVLFLVARLTPYEWYSPHPCAQGRCNLLVNQYSLGNSLWFPVGGFMQQGSTIAPRALSTRCVSGVWWAFTLIIISSYTANLAAFLTVQRMDVPIESVDDLADQTAIEYGTIHGGSSMTFFQNSRYQTYQRMWNYMYSKQPSVFVKSTEEGIARVLNSNYAFLLESTMNEYYRQRNCNLTQIGGLLDTKGYGIGMPVGSVFRDEFDLAILQLQENNRLEILKRKWWEGGKCPKEEDHRAKGLGMENIGGIFVVLICGLIVAIFMAMLEFLWTLRHSEATEVSVCQEMVTELRSIILCQDSIHPRRRRAAVPPPRPPIPEERRPRGTATLSNGKLCGAGEPDQLAQRLAQEAALVARGCTHIRVCPECRRFQGLRARPSPARSEESLEWEKTTNSSEPE

SEQ ID NO: 101585 - DNA, 2871 bp, Artificial Sequence
  derived and/or modified sequence
atgccccgggtgtccgcaccattggtgctgcttcctgcttggctggtcatggtcgcgtgttccccacattctctcaggatcgccgccattttagacgatcctatggaatgtagccgtggggagcgactgtcaatcaccttagcaaagaaccggattaaccgggctcccgagcgcctaggtaaagcgaaggtggaggtcgatatattcgaactgctgagagactccgagtacgagactgccgagaccatgtgtcaaattctgcccaaaggagtggtggctgttttgggcccatccagcagtccggcgtcctcttcaatcattagcaatatttgtggtgagaaggaggtgccccacttcaaggtggcccccgaggagtttgttaagttccaattccagaggtttacaactctaaatctgcacccctctaataccgatatttctgttgccgtggccggaattttgaatttcttcaactgcacaaccgcatgcctgatctgtgccaaggccgaatgtctcctgaatttggagaaactcctgcgtcagtttctgatcagtaaggatacattgtctgttagaatgctcgacgatactcgcgatcccacgccactgctgaaagaaattagggacgacaagactgccaccatcattatccatgcaaatgcgtccatgtcccacaccatcctcttgaaagccgctgagcttggcatggtgtccgcatactacacatatatctttacaaacttggaattctctcttcagcgcatggactccttggtcgatgaccgggtgaacattttggggttttccattttcaaccaaagtcatgccttttttcaggagtttgcccagtcgctcaaccaaagctggcaagaaaattgtgaccacgtgccatttacaggacccgctctgagctctgcattgctgtttgacgcggtgtatgccgtagtgacggcggtccaggagcttaacaggagccaagagattggggtgaaaccactatcatgcggatcagctcagatatggcagcacggcaccagcctcatgaattatttacggatggtagaactggagggcctgactggtcatatcgagttcaattctaagggacaacgttccaattatgctctcaagattcttcaattcactagaaacggctttagacaaatcgggcagtggcacgtggccgaagggctgtctatggactcccacctgtatgcaagcaacatctcagatactctgtttaacacaacccttgtggtgaccacaattctggaaaacccatatctcatgctcaaaggcaaccatcaggaaatggagggtaatgaccggtatgaaggcttctgcgtggatatgctgaaagagttggcggagatccttcgatttaattacaagatcagattggtcggcgatggagtgtatggtgtgcccgaggctaatggcacatggacagggatggtgggggagttgatcgcccggaaggcggatctggctgttgccggtcttaccatcaccgcagagcgggagaaagtgatagacttctctaagcctttcatgacacttggaatctccatcctgtatcgggtccatatgggtcgcaagccagggtactttagtttcctggatccctttagcccaggagtgtggttatttatgctcctcgcctacttggctgttagttgtgtcctattcctcgttgcgaggctgactccctacgaatggtattcccctcatccctgcgcgcagggccgatgcaatctgcttgtgaaccagtattccctgggcaactctttatggttccctgtagggggcttcatgcagcagggaagcactattgcaccacgtgccctgtccacacgatgcgtgtccggagtctggtgggcgtttactctgattattattagctcctacacagctaaccttgcggcgtttctgacagttcaaagaatggatgtacctattgagagcgtagatgatctggccgatcagaccgccattgaatatggaactatccacggtggatccagcatgaccttttttcagaattcacgctatcagacgtaccaaaggatgtggaactatatgtactccaaacagccttctgtgttcgttaagagcactgaagagggcatcgcacgagtgctcaattccaattatgcatttctcctcgagagcaccatgaacgaatactatcggcaaaggaattgtaacttgactcagattgggggcctactcgacactaaagggtatgggatcggcatgcctgttgggtctgttttccgcgacgaatttgacctggcaattttacagctccaggagaacaaccggctggagattttgaaaagaaagtggtgggaaggcgggaaatgtccaaaagaggaggaccatagagcgaaggggctgggtatggaaaacatcggcgggattttcgttgtactaatctgtggactgatagtcgccatttttatggccatgcttgagttcctgtggaccttgaggcactcagaggccacagaagtgtcagtctgtcaggagatggtcacagagctgagaagtattatattatgccaggattccatccatccgagaaggagacgggcggcagttccaccccccaggcctccgataccagaggagcgccggcctcgcggcaccgcaactctctcaaatggaaaactctgtggcgcaggagagccagaccagttggcccagcgtcttgcacaggaggctgcgctggtggccagagggtgcacccatatacgagtttgtcccgagtgtagaaggtttcagggccttcgtgcccggccaagcccagccagatccgaggagagcttggaatgggagaagacaacaaactctagtgagcccgaatag

SEQ ID NO: 101586 - DNA, 2871 bp, Artificial Sequence
  derived and/or modified sequence
atgccgagagtgtctgcaccgctggtactgctcccagcgtggttggtgatggtggcgtgttcgccccactcattgcgcattgccgccattctggatgacccgatggagtgctcaaggggggagcggctgtccataacacttgccaaaaataggatcaatagggcgcctgagagattgggaaaagctaaagtggaggtggatatcttcgaactgctgcgggactcagagtacgaaacagcagagactatgtgtcagattctgccaaagggagtagtggccgtgcttggcccttcatcttcaccagcctccagcagtatcatcagtaatatttgcggggaaaaagaggtcccacattttaaggttgcacccgaggagtttgtgaaattccagtttcagcgcttcacgaccttgaacctgcatcccagtaatacggatattagtgtcgccgtggctggcattctcaactttttcaactgtaccaccgcttgcctgatctgcgctaaggctgagtgtctcctcaaccttgagaaactcctgagacagttcctaattagcaaagacactcttagcgtgcgtatgctggacgacacccgcgaccccactccccttctcaaggagatccgtgatgataagaccgctactatcatcatccatgcaaacgccagtatgagccacaccatcctgttgaaggccgccgagctagggatggtttccgcgtattacacctacatctttaccaacctggaattctctctccagcggatggattcacttgtcgacgaccgagtgaatatccttggcttctccattttcaatcaatcacacgcgtttttccaggagtttgcccagagcctgaatcagagttggcaagaaaattgtgaccacgtcccatttaccggtccagccttgagtagcgcgctgctgtttgacgccgtgtatgcagtggtgaccgctgtacaagagctgaatcgaagccaggagatcggcgtcaaaccactgagctgtgggtccgcccaaatctggcaacacggtacttctttgatgaattatctcagaatggtggagttggagggattgaccggacacatcgagtttaatagtaaggggcagagaagcaattacgccctgaaaatcctacagttcacacggaatgggttccgccagatcgggcaatggcacgtcgcggagggccttagtatggattcccatctgtacgcatccaacatttcagacacattattcaataccactcttgttgttaccacaatcctcgaaaacccttacctcatgttaaaaggtaaccaccaggaaatggaagggaacgacaggtacgagggtttctgcgtcgatatgctgaaagaactcgcagaaatcctccgctttaactataagatcagactggttggcgatggtgtctacggtgtgcccgaagctaacggcacttggaccggtatggttggagaactgattgcgcgaaaagcagatctcgccgtggcagggctgacaataactgcagagcgggagaaagtgattgatttttccaagccttttatgacactgggcatctcaatcctttatcgtgtccatatggggcggaagcccggctatttcagttttctcgaccctttcagtcctggagtctggctatttatgcttttggcttacctggctgtgagctgcgtgctcttcctcgttgctcgcctgactccctacgaatggtattcccctcacccgtgtgcccagggccgatgtaacctgctagttaaccaatacagtcttggaaatagtctgtggttcccggtgggtggttttatgcagcagggctctacaatcgcccctagggcactgagcacacgctgcgtgtccggcgtgtggtgggcctttaccctgataatcatttcctcttataccgccaatctggctgccttcctgaccgtgcaacgtatggacgtgccgatagagtctgttgacgatctggccgaccaaactgccattgagtacggcaccatccacggcgggagcagcatgaccttctttcagaattctcggtaccagacataccagaggatgtggaattacatgtactcaaaacagccctccgtctttgtgaagtccacagaggaaggcatcgccagagttctaaactcaaattatgcgtttttgctagaaagcacaatgaacgaatattataggcagcggaattgcaacctgactcaaatcggtggcttacttgacaccaaaggttacggaatcggcatgcctgtgggcagcgtgttccgcgacgagttcgatttggccattctgcagttacaggagaacaacagattggagattttgaagagaaaatggtgggagggagggaaatgtcctaaggaggaagaccacagggcgaaggggctcgggatggagaatattggtgggatctttgtggtgctgatttgtggcttaatcgtcgccatattcatggctatgctggagtttctttggactttgagacacagcgaagcaaccgaggtgagcgtgtgtcaggaaatggtcaccgaactgcgttcaattattctgtgccaggattctatccatccgagacgccgacgcgctgccgtccctccacctcgcccgccgattcccgaggagcgacgtcctagaggaaccgccaccttgagtaacggcaagctatgcggagcaggggaacccgaccagttagcccagcgactcgctcaggaggctgccctggtggcacggggctgtactcatatcagggtgtgtcccgagtgtagacgctttcaaggactccgtgcacgacccagcccagctcgatctgaagaaagcctggagtgggagaagacaaccaattcctctgaacccgaatag

SEQ ID NO: 101587 - DNA, 4214 bp, Artificial Sequence
  derived and/or modified sequence
cctttcccgattccccgacgtttcgggaggagtggggtcggagcgcagggctgggaagggtcttaggacccaggaaggagacgggtgcctcccagagaggaccccatcccctccgaggtccgggcggctcccggcctctccctggggtgccgtagcccccctcgacccgccttcccgcagccgcagtcgttcgggcctggaggtggccgggcatcggtgccgacgccgcgagggcagcgcccgcggcgggaatactaatgcaccctaaagggcacggccgccgccgcagcagagttatgtcatgcccaggccagcagggggctccatgaggattcatagaagatgccccgcgtctcggcgcctttggtgctgcttcctgcgtggctcgtgatggtcgcctgcagcccgcactccttgaggatcgctgctatcttggacgaccccatggagtgcagcagaggggagcggctctccatcaccctggccaagaaccgcatcaaccgcgctcctgagaggctgggcaaggccaaggtcgaagtggacatctttgagcttctcagagacagcgagtacgagactgcagaaaccatgtgtcagatcctccccaagggggtggtcgctgtcctcggaccatcgtccagcccagcctccagctccatcatcagcaacatctgtggagagaaggaggtccctcacttcaaagtggccccagaggagttcgtcaagttccagttccagagattcacaaccctgaacctccaccccagcaacactgacatcagcgtggctgtagctgggatcctgaacttcttcaactgcaccaccgcctgcctcatctgtgccaaagcagaatgccttttaaacctagagaagctgctccggcaattccttatctccaaggacacgctgtccgtccgcatgctggatgacacccgggaccccaccccgctcctcaaggagatccgggacgacaagaccgccaccatcatcatccacgccaacgcctccatgtcccacaccatcctcctgaaggcagccgaacttgggatggtgtcagcctattacacatacatcttcactaatctggagttctcactccagagaatggacagccttgtggatgatcgtgtcaacatcctgggattttccattttcaaccaatcccatgctttcttccaagagtttgcccagagcctcaaccagtcctggcaggagaactgtgaccatgtgcccttcactgggcctgcgctctcctcggccctgctgtttgatgctgtctatgctgtggtgactgcggtgcaggaactgaaccggagccaagagatcggcgtgaagcccttgtcctgcggctcggcccagatctggcagcacggcaccagcctcatgaactacctgcgcatggtagaattggaaggtcttaccggccacattgaattcaacagcaaaggccagaggtccaactacgctttgaaaatcttacagttcacaaggaatggttttcggcagatcggccagtggcacgtggcagagggcctcagcatggacagccacctctatgcctccaacatctcggacactctcttcaacaccaccctggtcgtcaccaccatcctggagaacccatatttaatgctgaaggggaaccaccaggagatggaaggcaatgaccgctacgagggcttctgtgtggacatgctcaaggagctggcagagatcctccgattcaactacaagatccgcctggttggggatggcgtgtacggcgttcccgaggccaacggcacctggacgggaatggtcggggagctgatcgctaggaaagcagatctggctgtggcaggcctcaccattacagctgaacgggagaaggtgattgatttctctaagccattcatgactctgggaattagcattctttaccgcgttcatatgggacgcaaacccggctatttctccttcctggacccattttctccgggcgtctggctcttcatgcttctagcctatctggccgtcagctgtgtcctcttcctggtggctcggttgacgccctacgagtggtacagcccacacccatgtgcccagggccggtgcaacctcctggtgaaccagtactccctgggcaacagcctctggtttccggtcggggggttcatgcagcaaggctccaccatcgcccctcgcgccttatccacccgctgtgtcagtggcgtctggtgggcattcacgctgatcatcatctcatcctacacggccaacctggcagccttcctgaccgtgcagcgcatggatgtgcccattgagtcagtggatgacctggctgaccagaccgccattgaatatggcacaattcacggaggctccagcatgaccttcttccaaaattcccgctaccagacctaccaacgcatgtggaattacatgtattccaagcagcccagcgtgttcgtgaagagcacagaggagggaatcgccagggtgttgaattccaactacgccttcctcctggaatccaccatgaacgagtactatcggcagcgaaactgcaacctcactcagattgggggcctgctggacaccaagggctatgggattggcatgccagtcggctcggttttccgggacgagtttgatctggccattctccagctgcaggagaacaaccgcctggagatcctgaagcgcaaatggtgggaaggagggaagtgccccaaggaggaagatcacagagctaaaggcctgggaatggagaatattggtggaatctttgtggttcttatttgtggcttaatcgtggccatttttatggctatgttggagtttttatggactctcagacactcagaagcaactgaggtgtccgtctgccaggagatggtgaccgagctgcgcagcattatcctgtgtcaggacagtatccacccccgccggcggcgcgccgcagtcccgccgccccggccccccatccccgaggagcgccgaccgcggggcacggcgacgctcagcaacgggaagctgtgcggggcaggggagcccgaccagctcgcgcagagactggcgcaggaggccgccctggtggcccgcggctgcacgcacatccgcgtctgccccgagtgccgccgcttccagggcctgcgggcacggccgtcgcccgcccgcagcgaggagagcctggagtgggagaaaaccaccaacagcagcgagcccgagtagtcccggaggccacaggacgcgcagaggccgggcggggcgggaggggaggggcggggcgggcgctgctgtcagccgccagccggaacttgtacagcgtcgacacctctccagatttcggatccagtcacttttcaaaaagatcaaggagcctgacgccccagccagagaccgcgcccggtcagggagcagggtccacccggaaacgttgcacccaaagggcaaaggacggccctccctcctgggcacaaggacccatcttctcccagtgggtctttccctctcgccaaaataacaagagtatagggtggggggtccctacccagaccagtccaatgaattggtggaatcatcagttgaatttccccctagtcaggggccaatgtaccctccgtctagttcttacagaaaaaaaaaaaattaaacagggaagtttttcttttctggatttgtatatttttgttaatgttcttttcccttttctttcctcctctccttttcttctttgtcatcttctcagtcctgttaatttgttttgtgttttttggagggggaggctgggttagggaatggaagcctaaataatccctatttcttctttttcctgaattttggaatattgcgttaccagtgcatccgatttcaggtgcttaactctctgtatggtgactgaggggcctgcaggagcacaggagaaggagtcttgggaagaatcagatggagagtctcaaaagtccattgcagtaaactttgagatgccaaaaagcaattaactcatcctatactcagaccttgaaacgcctggaatgtcaagggttaatctgtcttttctttccctttctctttctgactgtcactattactgggtttgatttgatctttttgtgaatgtagtctctgaagacagacaggggaggagaacagaatgcacaaagtatcctaggactttgtttaaggagcggaaagagcagatagaattttcccataccatggccttggcttcc

SEQ ID NO: 101588 - DNA, 5290 bp, Artificial Sequence
  derived and/or modified sequence
agctgcgggcggatcgggctggagccgccacggctgctgcggaagaggaaaaacggccaacagcagccccgcggccggcccggcagcgcccggcccccggctcagcccccggagtgcggagccgaccagcagatactttctgagtgcctactatgtgccagcctgtgctaggcactgaggacacaggtggaaaagcccgaattgctccctgctctcctggcgctcatcaccccggagagttatgtcatgcccaggccagcagggggctccatgaggattcatagaagatgccccgcgtctcggcgcctttggtgctgcttcctgcgtggctcgtgatggtcgcctgcagcccgcactccttgaggatcgctgctatcttggacgaccccatggagtgcagcagaggggagcggctctccatcaccctggccaagaaccgcatcaaccgcgctcctgagaggctgggcaaggccaaggtcgaagtggacatctttgagcttctcagagacagcgagtacgagactgcagaaaccatgtgtcagatcctccccaagggggtggtcgctgtcctcggaccatcgtccagcccagcctccagctccatcatcagcaacatctgtggagagaaggaggtccctcacttcaaagtggccccagaggagttcgtcaagttccagttccagagattcacaaccctgaacctccaccccagcaacactgacatcagcgtggctgtagctgggatcctgaacttcttcaactgcaccaccgcctgcctcatctgtgccaaagcagaatgccttttaaacctagagaagctgctccggcaattccttatctccaaggacacgctgtccgtccgcatgctggatgacacccgggaccccaccccgctcctcaaggagatccgggacgacaagaccgccaccatcatcatccacgccaacgcctccatgtcccacaccatcctcctgaaggcagccgaacttgggatggtgtcagcctattacacatacatcttcactaatctggagttctcactccagagaatggacagccttgtggatgatcgtgtcaacatcctgggattttccattttcaaccaatcccatgctttcttccaagagtttgcccagagcctcaaccagtcctggcaggagaactgtgaccatgtgcccttcactgggcctgcgctctcctcggccctgctgtttgatgctgtctatgctgtggtgactgcggtgcaggaactgaaccggagccaagagatcggcgtgaagcccttgtcctgcggctcggcccagatctggcagcacggcaccagcctcatgaactacctgcgcatggtagaattggaaggtcttaccggccacattgaattcaacagcaaaggccagaggtccaactacgctttgaaaatcttacagttcacaaggaatggttttcggcagatcggccagtggcacgtggcagagggcctcagcatggacagccacctctatgcctccaacatctcggacactctcttcaacaccaccctggtcgtcaccaccatcctggagaacccatatttaatgctgaaggggaaccaccaggagatggaaggcaatgaccgctacgagggcttctgtgtggacatgctcaaggagctggcagagatcctccgattcaactacaagatccgcctggttggggatggcgtgtacggcgttcccgaggccaacggcacctggacgggaatggtcggggagctgatcgctaggaaagcagatctggctgtggcaggcctcaccattacagctgaacgggagaaggtgattgatttctctaagccattcatgactctgggaattagcattctttaccgcgttcatatgggacgcaaacccggctatttctccttcctggacccattttctccgggcgtctggctcttcatgcttctagcctatctggccgtcagctgtgtcctcttcctggtggctcggttgacgccctacgagtggtacagcccacacccatgtgcccagggccggtgcaacctcctggtgaaccagtactccctgggcaacagcctctggtttccggtcggggggttcatgcagcaaggctccaccatcgcccctcgcgccttatccacccgctgtgtcagtggcgtctggtgggcattcacgctgatcatcatctcatcctacacggccaacctggcagccttcctgaccgtgcagcgcatggatgtgcccattgagtcagtggatgacctggctgaccagaccgccattgaatatggcacaattcacggaggctccagcatgaccttcttccaaaattcccgctaccagacctaccaacgcatgtggaattacatgtattccaagcagcccagcgtgttcgtgaagagcacagaggagggaatcgccagggtgttgaattccaactacgccttcctcctggaatccaccatgaacgagtactatcggcagcgaaactgcaacctcactcagattgggggcctgctggacaccaagggctatgggattggcatgccagtcggctcggttttccgggacgagtttgatctggccattctccagctgcaggagaacaaccgcctggagatcctgaagcgcaaatggtgggaaggagggaagtgccccaaggaggaagatcacagagctaaaggcctgggaatggagaatattggtggaatctttgtggttcttatttgtggcttaatcgtggccatttttatggctatgttggagtttttatggactctcagacactcagaagcaactgaggtgtccgtctgccaggagatggtgaccgagctgcgcagcattatcctgtgtcaggacagtatccacccccgccggcggcgcgccgcagtcccgccgccccggccccccatccccgaggagcgccgaccgcggggcacggcgacgctcagcaacgggaagctgtgcggggcaggggagcccgaccagctcgcgcagagactggcgcaggaggccgccctggtggcccgcggctgcacgcacatccgcgtctgccccgagtgccgccgcttccagggcctgcgggcacggccgtcgcccgcccgcagcgaggagagcctggagtgggagaaaaccaccaacagcagcgagcccgagtagtcccggaggccacaggacgcgcagaggccgggcggggcgggaggggaggggcggggcgggcgctgctgtcagccgccagccggaacttgtacagcgtcgacacctctccagatttcggatccagtcacttttcaaaaagatcaaggagcctgacgccccagccagagaccgcgcccggtcagggagcagggtccacccggaaacgttgcacccaaagggcaaaggacggccctccctcctgggcacaaggacccatcttctcccagtgggtctttccctctcgccaaaataacaagagtatagggtggggggtccctacccagaccagtccaatgaattggtggaatcatcagttgaatttccccctagtcaggggccaatgtaccctccgtctagttcttacagaaaaaaaaaaaattaaacagggaagtttttcttttctggatttgtatatttttgttaatgttcttttcccttttctttcctcctctccttttcttctttgtcatcttctcagtcctgttaatttgttttgtgttttttggagggggaggctgggttagggaatggaagcctaaataatccctatttcttctttttcctgaattttggaatattgcgttaccagtgcatccgatttcaggtgcttaactctctgtatggtgactgaggggcctgcaggagcacaggagaaggagtcttgggaagaatcagatggagagtctcaaaagtccattgcagtaaactttgagatgccaaaaagcaattaactcatcctatactcagaccttgaaacgcctggaatgtcaagggttaatctgtcttttctttccctttctctttctgactgtcactattactgggtttgatttgatctttttgtgaatgtagtctctgaagacagacaggggaggagaacagaatgcacaaagtatcctaggactttgtttaaggagcggaaagagcagatagaattttcccataccatggccttggcttccggtggaacgtgccgttcacagaggcggaaggactgggccaccccgttggtatggtgcatactttgtcaactgcatctcttttcaaccaaactcaaatgagtggctgcctatgaagccagacccccaagactatcatggattgggtggtttcttgctacttagacgtgagacctgggtgcaagtgtatgtgtgtgtatgtgtgcgcgcgtgtgcgtgtgtgtatttattcaacagaaagaccttaagtattcaagaatttgctaggttcctgggagagaggtggagtctcctagtcaatacacgggcctgggaaccaggaactcttgagtcgtaacctcagcttgagcagtagccctcccaccttgtatgactttaggtaaagcatttaacttctcttccatctaccaaataggagttactgatgctgtccaggttaccaggtgactgctagtgactgctctccatgtgagaagtttgcagagtccagagcacacatctgatgggaggggcgaggctttctacagctgcttgacctttgcttggcttcactaattgggagtttcacgcagagttctcattggctgatggaaaacaaattctatgcaatttctgattgtaaacttagaaaattcagagagaaacaaacagccgctaccaaccacctccacctccaccaccgctgccaccaccttgaatggaattgtcctcacttttgttgctgttgcaaatgtactaaaataaagacatctttggaagatgacgagcttaattcatgtttttgccatttgggttggtcggcatcctctttatgccaggacaatcagttagggctgccgtcctgggggccaaatggtaccctgattattcctgtgagggatactcgttttgtcctcacctgacctcactcatgaatttgaatcctttatcttttttctctttaaccatcaaatgacaacaagctgtgcaagacacttgtgtctttttttaaaccttgccttgatcctcgtggagaaacgtggatttggtgggaagggcacccgaaggccagctgacaacaaaccccaatggtgccactctgctccaacctgcagctccatcctatgcttctcacagacaacgtggttcctactg

SEQ ID NO: 101589 - DNA, 2871 bp, Artificial Sequence
  derived and/or modified sequence
atgccccgggtgtctgcccccctggtgctgctgcctgcctggctggtgatggtggcctgcagcccccacagcctgagaattgctgccatcctggatgaccccatggagtgcagcagaggagagcggctgagcatcaccctggccaagaaccgcatcaacagagcccctgagcggctgggcaaggccaaggtggaggtggacatctttgagctgctgcgggacagtgaatatgaaacagctgagaccatgtgccagatcctgcccaagggcgtggtggccgtgctgggccccagcagcagccctgccagcagcagcatcatcagcaacatctgtggggagaaggaggtgccccacttcaaggtggcccctgaggagtttgtgaagttccagttccagcgcttcaccaccctgaacctgcaccccagcaacacagacatctctgtggccgtggccggcatcctgaacttcttcaactgcaccacagcctgcctgatctgtgccaaggccgagtgcctgctgaacctggagaagctgctgcggcagttcctgatcagcaaggacaccctgtctgtgaggatgctggatgacacccgggaccccacccccctgctgaaggagatcagagatgacaagacagccaccatcatcatccacgccaatgcctccatgagccacaccatcctgctgaaggctgctgagctgggcatggtgtctgcctactacacctacatcttcaccaacctggagttcagcctgcagaggatggacagcctggtggatgacagagtgaacatcctgggcttcagcatcttcaaccagagccacgccttcttccaggagtttgcccagagcctgaaccagagctggcaggagaactgtgaccacgtgcccttcaccggccctgccctgagcagcgccctgctgtttgatgctgtgtatgctgtggtgacagctgtgcaggagctgaacagaagccaggagattggagtgaagcccctgagctgtggcagcgcccagatctggcagcacggcaccagcctgatgaactacctgaggatggtggagctggagggcctgaccggccacatcgagttcaacagcaagggccagaggagcaactatgccctgaagatcctgcagttcaccagaaatggcttccggcagatcggccagtggcacgtggccgagggcctgtccatggacagccacctgtatgccagcaacatcagtgacaccctcttcaacaccaccctggtggtgaccaccatcctggagaacccctacctgatgctgaagggcaaccaccaggagatggagggcaatgacagatatgagggcttctgtgtggacatgctgaaggagctggccgagatcctgcgcttcaactacaagatccggctggtgggagatggagtgtatggagtgcctgaggccaacggcacctggacaggcatggtgggggagctgattgccaggaaggctgacctggccgtggccggcctgaccatcacagctgagcgggagaaggtgattgacttcagcaagcccttcatgaccctgggcatcagcatcctgtacagagtgcacatgggcaggaagccaggctacttctccttcctggaccccttcagccctggggtgtggctgttcatgctgctggcctacctggccgtgtcctgtgtgctcttcctggtggcccggctgaccccctatgagtggtacagcccccacccctgtgcccagggccgctgcaacctgctggtgaaccagtacagcctgggcaacagcctgtggttccctgtgggcggcttcatgcagcagggcagcaccatcgccccccgggccctgagcacccgctgtgtgtctggagtgtggtgggccttcaccctcatcatcatcagcagctacacagccaacctggccgccttcctgactgtgcagaggatggatgtgcccattgaatctgtggatgacctggccgaccagacagccattgaatatggcaccatccatggaggcagctccatgaccttcttccagaacagccgctaccagacctaccagaggatgtggaactacatgtacagcaagcagcccagcgtgtttgtgaagagcacagaggagggcatcgcccgggtgctgaacagcaactatgccttcctgctggagagcaccatgaatgagtactaccggcagaggaactgcaacctgacccagatcggcggcctgctggacaccaagggctatggaattggcatgcctgtgggctctgtgttcagagatgaatttgacctggccatcctgcagctgcaggagaacaaccggctggagatcctgaagaggaagtggtgggagggcggcaagtgccccaaggaggaggaccaccgggccaagggcctgggcatggagaacattggaggcatctttgtggtgctgatctgtggcctgattgtggccatcttcatggccatgctggagttcctgtggaccctgcggcacagcgaggccacagaggtgtctgtgtgccaggagatggtgacagagctgcggagcatcatcctgtgccaggacagcatccaccccaggagaagaagagctgctgtgcccccacccaggcctcccatccctgaggagcggcggccccggggcacagccaccctgagcaatggcaagctgtgtggggccggggagccagaccagctggcccagaggctggcccaggaggccgccctggtggcccggggctgcacccacatccgggtgtgcccagagtgccgccgcttccagggcctgcgggcccggcccagccctgcccggtctgaggagagcctggagtgggagaagaccaccaacagcagcgagcctgagtag

SEQ ID NO: 101590 - DNA, 2871 bp, Artificial Sequence
  derived and/or modified sequence
atgccccgggtgagcgcccccctggtgctgctgcccgcctggctggtaatggtggcctgctcacctcattccctaaggatagcggctatcctggacgacccaatggaatgctcccggggtgagcgtctgagcatcactctcgccaaaaatcgcattaacagggccccagaaaggctcggaaaagctaaagtggaggtggatatcttcgaactgctgcgggatagtgagtatgagacagccgagactatgtgccaaatactgccaaagggcgttgtagcggtgctcggccccagctctagtccagcttcttcgagcatcatcagcaacatttgcggcgaaaaagaagtccctcatttcaaggtggcacctgaggaatttgtaaagtttcaattccagcgttttactacactgaaccttcacccttcaaacaccgacatatcagtggccgttgcggggatcctcaattttttcaattgtactactgcttgcctgatctgcgccaaggccgagtgtctgcttaatctggaaaagctacttcgccaattcctgatcagcaaggacaccttatctgtgaggatgctcgatgacacacgggatcccactccgctgctcaaggaaatccgagacgacaagaccgcaactattattatccacgctaacgccagtatgtctcatactatcctcctgaaagcagcagagctcggaatggtgtccgcttactacacgtacatcttcacaaacctggagttcagtcttcagcggatggactccctggtggatgatcgcgtcaacatccttggtttctctattttcaatcagagccatgctttcttccaggaattcgcacagtcactgaatcagtcctggcaggagaactgtgaccatgtgccctttactggacctgctctgagcagtgcactgttatttgatgctgtgtacgctgtagtgacggccgttcaggagctgaataggtcacaggagatcggagtgaaaccactaagctgtgggtctgcacagatctggcaacacggaacctcgttaatgaattatcttcggatggttgaactggaaggcctgacagggcacatagagttcaattcaaaggggcagaggtcaaattacgccctgaaaattctacagtttacccgcaatggttttaggcagattggccagtggcatgtggccgaaggcctctctatggacagtcatctttacgcgtctaatatctccgacactctgttcaacaccaccctggtggtgacaaccattcttgaaaacccatatctcatgttgaaagggaatcaccaggagatggagggaaatgacaggtacgagggattttgcgtggatatgctgaaagaacttgcggagatcttacggtttaattacaaaattagactggttggggacggtgtgtatggcgtgccagaggctaatgggacctggactggaatggtcggggagctgattgctagaaaggccgacttagcagtggcagggctgacgatcaccgctgaaagagagaaagttattgacttttctaagcctttcatgacactgggcatcagcatcctgtacagagtgcacatggggagaaagcccggctacttcagtttcctggaccccttctcaccgggggtatggctgttcatgctcctggcctacttagccgtatcctgcgttttgttcttggtcgcccgtctgacaccgtatgagtggtatagcccccacccctgtgcacaaggtcgctgtaatctgctcgttaaccagtactctctgggaaactcgctgtggtttcctgtgggcggctttatgcagcagggaagtactatcgccccgagagccctttcgacgcgatgtgtgtccggagtttggtgggccttcacgctgataatcatcagctcatacactgccaatctcgcagcttttcttacagtacagcgaatggacgtgcctattgagtcagtggatgatttagctgaccagacagccatcgagtacggtactattcatgggggttccagcatgaccttctttcagaactcccggtatcagacttatcagagaatgtggaactacatgtattccaaacaaccttccgtcttcgtaaagtctactgaagaggggatagcgagagtccttaattcaaattacgccttcctgctcgaatctaccatgaacgaatactacagacagaggaattgtaacctgacacagatcggaggtctgctcgataccaaagggtacggcattggcatgcccgttgggtccgtttttcgcgacgagttcgacctcgccatactccagttgcaggaaaataatcgtctggaaattctgaagagaaagtggtgggagggggggaagtgcccaaaggaagaggatcatcgcgctaagggcctgggcatggagaatatcgggggcattttcgttgtgctgatttgcggactgatcgtagctatttttatggccatgcttgagtttctgtggaccctacggcatagcgaggcaacagaagtgtccgtttgtcaggaaatggtgaccgagctccggagtatcatactgtgtcaggattcaatccatccgagacgcaggagagccgccgtgccaccgccccgcccacccatacccgaggaacggaggccccgagggaccgccactctgtccaatggaaaactgtgtggggcaggagaacccgaccaactcgcccagaggctcgcccaggaagcggctctggtagctcgaggctgcactcatattagagtgtgcccagagtgccgccgctttcaggggttaagagcacggccgtcccccgctcgatccgaggagtctcttgaatgggagaagacaacaaactcatcggagcctgagtag

SEQ ID NO: 101591 - DNA, 2871 bp, Artificial Sequence
  derived and/or modified sequence
atgccccgggtgagcgcccccctggtgctgctgcccgcctggctggtgatggtagcttgctctccgcactcgctgaggatcgccgcaatactcgatgatcctatggaatgctcgcgaggcgaaagactgagcattaccctagcaaaaaaccgtattaatcgggcccctgaacgactgggaaaggcaaaggtggaagttgatatttttgagctgcttcgcgactccgaatatgagactgccgagactatgtgccaaattcttcccaagggagtggtggcggtccttggcccttcttccagtccagcctcctcaagcataattagcaacatttgtggcgagaaggaagtgccccacttcaaagtggcgccggaggaatttgtgaagttccagtttcagaggttcacaactctgaatttgcatccaagcaatactgatatctccgtggctgtggcaggcattctgaacttctttaattgcacgaccgcgtgcttaatctgtgctaaagctgagtgcctgctgaacctggaaaaactgctaaggcaattcctgattagcaaggataccctgagcgtgcgaatgcttgatgacacgcgcgacccaacccctctgctaaaagagattagagacgacaaaaccgcaactattataattcatgctaatgctagcatgtcccataccattctgttgaaagccgccgaactgggaatggtcagcgcttattatacgtacatctttaccaacctcgagttttctctgcagagaatggacagtctcgtggacgaccgagtgaacatccttggattcagcatcttcaatcagagccacgcttttttccaagagtttgcccagagtctgaaccagtcatggcaggagaactgtgaccacgttccatttacaggaccagcactcagctccgccttgctgtttgatgcggtatatgctgtggttaccgcagttcaggagctcaatcggtcccaggaaattggggtgaaacccctctcatgtgggtctgcacagatatggcagcatggtacttctcttatgaattatcttagaatggtagaactggaggggctgaccggacacatcgagtttaacagtaaagggcagcgtagcaactacgccctcaaaatattgcagtttacccgtaacggcttccgccagataggtcagtggcatgtggcagagggcctgagcatggactctcatctctacgcctcgaacatttcagatactctcttcaacaccacactggtggttaccaccatactagagaatccctatctgatgttgaagggcaatcatcaggagatggaagggaacgaccgatatgagggattttgcgtggacatgctgaaggaactagccgagatccttcgatttaattacaagatcaggctggtcggcgacggcgtttacggagtacccgaggcaaatggcacatggacgggcatggtcggagagctaatcgcccgcaaagccgatcttgctgtggcaggtctgaccatcactgctgaaagggagaaagtgatcgatttctccaagccctttatgacactcgggattagtattttgtatcgcgttcacatgggacgcaagccagggtactttagttttctggatccatttagtcctggagtctggctgtttatgttactagcatatctggccgtgtcatgtgtactgttcctcgtggcaaggctgaccccatacgagtggtattccccccatccctgcgcccagggaaggtgtaatctcctggttaaccagtatagcctcggcaacagcctgtggtttccggtgggaggatttatgcagcaaggctcaacaattgcccctcgcgctctgagcacgagatgtgtgtccggagtgtggtgggcctttacactgattattatctcatcttatactgcgaacctcgccgcattcttgactgttcagagaatggacgtcccgatagagtccgtggacgatttagccgatcagaccgccatcgagtatggaacaattcatggtggtagttccatgacttttttccagaactcgcgttatcagacataccagcggatgtggaactacatgtattcgaagcagccttctgtgttcgtgaagagcaccgaggaaggaatcgctcgcgtgctcaattctaactacgcattcctgctcgagtcaactatgaatgagtactaccgtcagagaaattgcaacctaacacaaatcggcggtttactggatactaagggatacggaataggaatgccagtaggctctgtgttcagagacgaattcgatctcgcaatactacagctccaagaaaataatcgtctggagatcttgaagagaaagtggtgggaagggggcaagtgtcccaaagaggaagatcaccgtgccaaagggctgggcatggagaacatcgggggtatcttcgttgtactcatatgtgggctcattgtggcaatttttatggctatgctcgagttcctctggacactgaggcactcggaggctacagaagtgagtgtgtgccaagagatggtaactgagctaagatccataatcctatgccaggatagtattcacccaagacggaggcgcgcagctgtgccacccccccgaccgccaatcccagaagagcggaggccacgcggtaccgctaccctgagtaacggcaagctctgcggtgccggcgagccggatcagctggcacaaaggctggcgcaggaggctgcacttgtggctagagggtgcacacacatcagggtgtgtcccgagtgtcgcaggtttcagggactgagggcccgtccctctcccgctcggtcagaggagagcctcgagtgggagaagacgacaaactctagcgaaccagaatag

SEQ ID NO: 101592 - DNA, 2871 bp, Artificial Sequence
  derived and/or modified sequence
atgccacgggtttccgcacctctcgtcttattgcccgcatggctggtgatggtggcatgttctccacactccctccggatcgcagctatactggatgatccaatggaatgtagtcgcggtgagagactttcaattaccctagccaagaatcgtatcaatagggcccctgagcgtttaggaaaagccaaggtggaggtggacatattcgagcttcttcgggattccgagtatgagacagcagaaaccatgtgtcagattttaccaaaaggcgtggtggccgtgctggggccttccagctcacctgccagctcatccattatcagcaatatctgtggcgagaaagaagtgccgcacttcaaggtggctcctgaagagtttgtgaagttccaattccaaaggtttacgactctcaacctgcaccccagcaatactgacatcagtgtggcagtggcgggtattctaaacttcttcaactgcaccacggcatgcctgatatgtgcaaaagcagagtgcctgctcaacctggagaaactgctgaggcaatttcttatcagcaaggacacgctcagcgtcaggatgttagatgacacccgtgacccaactcccctgttaaaagaaattagggatgacaaaaccgccactatcatcatccatgcgaacgcgagcatgtcacatactattctgctcaaagcagctgagctggggatggtgtctgcctattatacgtacatattcacgaatcttgaattctctctccaacgtatggatagcctcgtcgacgatcgagtgaatatcctcggattctccatatttaaccagagccatgcttttttccaggagttcgcccaatccctgaatcagtcgtggcaggagaattgcgaccacgtgccatttacgggcccagcactgagtagcgcactgcttttcgatgcggtttatgccgttgtcacagccgttcaggaacttaacaggtcacaagaaattggtgtgaaaccactgagctgcgggtctgcccaaatttggcagcatggcacttctcttatgaattacttaaggatggtcgaactggagggcctaacgggacacattgaattcaattctaaaggacagaggtccaattacgcactgaagatcttgcagttcacacgcaatggcttccgacaaattggtcagtggcatgttgctgagggtctcagtatggattcccatctgtacgcaagcaacatctccgatactctgttcaacactacattggtcgttactacaattctggagaacccttatctcatgctgaaagggaaccatcaggagatggagggaaacgatcgttacgaggggttttgcgtggacatgctcaaggagctggctgaaattctgaggtttaattacaagatacggctcgtcggagacggcgtgtacggtgtgcccgaagcaaatggtacctggaccgggatggtaggagaattgatcgcgcgtaaagccgacttagctgtagccggactcacgatcaccgccgagcgagagaaagtgattgactttagtaagccatttatgaccctgggaataagcatactttaccgggttcacatggggagaaagccaggatatttcagctttttggaccctttctctccaggggtctggctgttcatgctcctggcctatctggctgtgtcttgtgttctgtttttagtcgctagactgactccttacgaatggtattcccctcacccgtgcgcccaggggcgatgtaacctgcttgtgaaccaatatagtcttggtaattcattgtggttccctgttggagggtttatgcagcaaggttctaccatcgcccctagagccctgagtactcgctgcgtgagcggtgtctggtgggccttcaccctgattatcatttcttcatatacagcaaatctggcggcattcctgaccgttcagagaatggatgtgccaatcgagtccgtggacgacctggcggaccagaccgctatcgagtacggaacaatccacggcggatcctccatgaccttctttcagaattccagataccagacttaccagagaatgtggaattatatgtactcaaagcaaccgtcagtcttcgtgaagagtactgaggaggggatcgcaagagtgctgaactccaactacgcctttttgctcgaatcgacgatgaatgagtactataggcaacgaaactgtaacctgacccagattggaggtctgctggacacaaagggttacggtatcggtatgccggtcggttcagtgtttagggacgagtttgaccttgcaatcctccagctccaagagaacaaccgtctggagatactgaaacgcaagtggtgggagggaggcaagtgccccaaggaggaggaccacagagctaagggcttaggcatggaaaacattggtggaatctttgtcgtcttgatatgtgggctcatcgtcgctatctttatggctatgctcgaattcctctggactctgaggcattctgaagctaccgaagtgagcgtatgccaagaaatggtgacagaactacgtagcattattctgtgtcaggatagcatccatccacggagaaggcgcgctgccgtgccacctcctcgacctccgatacccgaggagaggaggccacggggaaccgcgaccctgtctaatgggaagctgtgcggagctggggagccggatcagctggctcagagactcgcacaagaggccgcattggtagcaagaggctgcacacatattagagtttgcccagagtgtcgacgattccaggggctccgcgcacggccttcccccgcacggagtgaggaatcattggaatgggagaagacaacaaattcatccgagcccgagtag

SEQ ID NO: 101593 - DNA, 2871 bp, Artificial Sequence
  derived and/or modified sequence
atgccgagagtgtcggctcctctagtattgctgcctgcatggctcgttatggtcgcgtgcagcccgcactcactgcggatcgcagctattctggatgaccccatggagtgttctagaggagagcgcctgtccattaccctggccaaaaaccgcataaatagggcaccagagcggcttggaaaggctaaggtggaagtcgacatttttgaactactgcgagacagtgagtatgaaacagcagagacgatgtgccagatcctgcctaaaggtgtggtggccgtgctgggcccatcatcttcaccggcaagcagctcgattatttccaatatttgcggagaaaaggaagttcctcatttcaaggtggcgccagaggaattcgtgaagttccagttccagcgcttcactacattaaaccttcatccttcaaacaccgacatcagcgtcgccgtagccggaatcctgaacttcttcaactgcacaactgcctgtctaatctgcgccaaagctgagtgtttgcttaatctcgaaaaactgctgcgacaatttctgatttctaaggataccctctcggttcggatgctagacgacaccagggaccctacgccactgctgaaagagattagagacgacaaaaccgcgaccataattattcacgccaatgcatcaatgagccacaccatcctgttgaaggcggctgagctgggcatggtgagcgcatactatacgtacatcttcactaatctagagttctctttacagcggatggactctctggtcgatgatagggtaaacatcctaggattcagtatctttaaccaatcccacgctttttttcaagagttcgcacagagcctgaatcagtcatggcaagagaactgtgaccatgtcccatttaccggtcctgcgttaagctccgccttgttgttcgacgccgtgtacgcagttgtgacagctgttcaagaactgaacaggtctcaagaaatcggcgtcaaacctctgtcttgcggctcggctcagatctggcagcacggtaccagtctgatgaattacctgcgaatggtggaacttgaggggctgactggacatatcgagtttaattccaagggacagcgttcaaattacgccttaaagatactgcagttcacaaggaatgggtttagacagataggccagtggcacgtcgctgaggggctgtccatggactcacacctttatgctagcaacatcagcgacaccctgttcaatacaacgctagtcgttaccaccattttggagaacccatatctgatgctcaaaggtaaccaccaggagatggagggtaacgacaggtatgagggattttgtgttgacatgctgaaagaactggctgaaatcctccgcttcaactataagataagactggtgggagatggcgtatatggcgtccctgaggccaatggcacatggaccggtatggtgggggaactgatcgccagaaaggccgatttggccgtggccggacttacaatcacagctgagcgtgagaaggtgatcgattttagtaagccttttatgacgctcgggatctcaatcctgtatcgtgtgcacatggggcgtaagccaggttatttttcattcttggaccccttttcacctggtgtgtggctgtttatgctgctggcatatcttgctgtcagctgtgtgctctttttggtggccagactgacaccatacgagtggtatagcccacacccctgtgcccaagggaggtgtaaccttcttgttaatcagtatagcttaggcaattcactgtggtttcccgtgggcggtttcatgcaacagggaagcactatagccccaagggccctgtcaacaaggtgtgtatccggcgtatggtgggccttcacactgatcataatttcatcctacaccgccaacctggccgcatttttgaccgtgcagcgcatggacgtgcctatcgagtcagtggatgatctcgccgatcagacagcaattgagtacgggacaattcacggtgggtcatccatgaccttcttccagaattcaaggtaccagacctaccaaaggatgtggaattacatgtattctaagcagccatctgtttttgttaagagtacagaagaagggatcgccagggtgttgaattccaactatgccttccttttggaatccactatgaacgagtattatcgtcaacgcaactgcaatctgacacagattgggggactgttggatactaagggctatggaatcggtatgcctgtgggaagtgtgtttcgtgacgaattcgatctagcgatattgcagctgcaggaaaacaaccgcctggagattctgaagcgtaaatggtgggagggcggaaaatgtccgaaggaagaggatcaccgggctaagggcctcggcatggagaacattggcggaattttcgttgttctcatttgtgggctgatcgtggcaatttttatggccatgttagagttcctgtggactttgagacattcagaggctacagaggtatccgtttgtcaggagatggtaactgagttacgtagcatcattttatgtcaggattcaatccaccctaggaggaggagggcagccgtgccaccgccacgaccacccattccagaggagcgtaggcccaggggcactgccacactcagcaacggtaaactttgcggcgctggagagcccgaccagcttgcccagagactcgcacaggaagcagccctggtggcacgagggtgcacccacatacgcgtgtgtcctgaatgcagacggtttcagggcctgcgcgcaagaccatcgcctgcgaggagtgaggaatccctcgagtgggaaaagacaacaaattcctccgaacccgaatag

SEQ ID NO: 101594 - DNA, 2871 bp, Artificial Sequence
  derived and/or modified sequence
atgcccagagtgagcgcccccctggtgctgctgcccgcctggctggtgatggtggcctgcagcccccacagcctgagaatcgccgccatcctggacgaccccatggagtgcagcagaggcgagagactgagcatcaccctggccaagaacagaatcaacagagcccccgagagactgggcaaggccaaggtggaggtggacatcttcgagctgctgagagacagcgagtacgagaccgccgagaccatgtgccagatcctgcccaagggcgtggtggccgtgctgggccccagcagcagccccgccagcagcagcatcatcagcaacatctgcggcgagaaggaggtgccccacttcaaggtggcccccgaggagttcgtgaagttccagttccagagattcaccaccctgaacctgcaccccagcaacaccgacatcagcgtggccgtggccggcatcctgaacttcttcaactgcaccaccgcctgcctgatctgcgccaaggccgagtgcctgctgaacctggagaagctgctgagacagttcctgatcagcaaggacaccctgagcgtgagaatgctggacgacaccagagaccccacccccctgctgaaggagatcagagacgacaagaccgccaccatcatcatccacgccaacgccagcatgagccacaccatcctgctgaaggccgccgagctgggcatggtgagcgcctactacacctacatcttcaccaacctggagttcagcctgcagagaatggacagcctggtggacgacagagtgaacatcctgggcttcagcatcttcaaccagagccacgccttcttccaggagttcgcccagagcctgaaccagagctggcaggagaactgcgaccacgtgcccttcaccggccccgccctgagcagcgccctgctgttcgacgccgtgtacgccgtggtgaccgccgtgcaggagctgaacagaagccaggagatcggcgtgaagcccctgagctgcggcagcgcccagatctggcagcacggcaccagcctgatgaactacctgagaatggtggagctggagggcctgaccggccacatcgagttcaacagcaagggccagagaagcaactacgccctgaagatcctgcagttcaccagaaacggcttcagacagatcggccagtggcacgtggccgagggcctgagcatggacagccacctgtacgccagcaacatcagcgacaccctgttcaacaccaccctggtggtgaccaccatcctggagaacccctacctgatgctgaagggcaaccaccaggagatggagggcaacgacagatacgagggcttctgcgtggacatgctgaaggagctggccgagatcctgagattcaactacaagatcagactggtgggcgacggcgtgtacggcgtgcccgaggccaacggcacctggaccggcatggtgggcgagctgatcgccagaaaggccgacctggccgtggccggcctgaccatcaccgccgagagagagaaggtgatcgacttcagcaagcccttcatgaccctgggcatcagcatcctgtacagagtgcacatgggcagaaagcccggctacttcagcttcctggaccccttcagccccggcgtgtggctgttcatgctgctggcctacctggccgtgagctgcgtgctgttcctggtggccagactgaccccctacgagtggtacagcccccacccctgcgcccagggcagatgcaacctgctggtgaaccagtacagcctgggcaacagcctgtggttccccgtgggcggcttcatgcagcagggcagcaccatcgcccccagagccctgagcaccagatgcgtgagcggcgtgtggtgggccttcaccctgatcatcatcagcagctacaccgccaacctggccgccttcctgaccgtgcagagaatggacgtgcccatcgagagcgtggacgacctggccgaccagaccgccatcgagtacggcaccatccacggcggcagcagcatgaccttcttccagaacagcagataccagacctaccagagaatgtggaactacatgtacagcaagcagcccagcgtgttcgtgaagagcaccgaggagggcatcgccagagtgctgaacagcaactacgccttcctgctggagagcaccatgaacgagtactacagacagagaaactgcaacctgacccagatcggcggcctgctggacaccaagggctacggcatcggcatgcccgtgggcagcgtgttcagagacgagttcgacctggccatcctgcagctgcaggagaacaacagactggagatcctgaagagaaagtggtgggagggcggcaagtgccccaaggaggaggaccacagagccaagggcctgggcatggagaacatcggcggcatcttcgtggtgctgatctgcggcctgatcgtggccatcttcatggccatgctggagttcctgtggaccctgagacacagcgaggccaccgaggtgagcgtgtgccaggagatggtgaccgagctgagaagcatcatcctgtgccaggacagcatccaccccagaagaagaagagccgccgtgcccccccccagaccccccatccccgaggagagaagacccagaggcaccgccaccctgagcaacggcaagctgtgcggcgccggcgagcccgaccagctggcccagagactggcccaggaggccgccctggtggccagaggctgcacccacatcagagtgtgccccgagtgcagaagattccagggcctgagagccagacccagccccgccagaagcgaggagagcctggagtgggagaagaccaccaacagcagcgagcccgagtag

SEQ ID NO: 101595 - DNA, 1029 bp, Artificial Sequence
  derived and/or modified sequence
atgagcaactggaaactctccaaggcgttaagcctggaaatgatccagctcaaagagaaggttgcacggttctcgtccagtagtccgtttcagaacctcgaaatcattgcaaccttgggtgtgggcgggtttgggagggttgaactggtgaaggtgaaaaacgagaatgtagcatttgccatgaaatgcataagaaagaagcatatcgtcgatactaagcaacaggagcatgtctactctgagaagagaatcttagaagagctgtgctccccttttatagtcaaactctaccgcaccttcaaggacaacaaatacgtttatatgttactggaggcctgtctcggaggcgagctgtggagcatcttgagggacaggggcagctttgacgaacctaccagcaaattctgtgtggcgtgtgtcactgaggccttcgattacctccaccgcttgggcatcatctatcgagacctcaaaccagaaaacctgattctggatgcggaagggtacctcaaattggtggactttgggtttgccaagaaaataggatccggccaaaaaacgtggactttttgcgggactcctgagtacgtggcacctgaagtgattcttaataagggtcatgacttttcagtggacttctggtctttgggcatccttgtgtatgaattactgactggcaatccacccttcagcggcgtcgatcagatgatgacttacaacctcatcctgaaaggaatagaaaaaatggacttccccagaaagattaccagaaggccagaggacctgatccgacgcctgtgtcggcagaatcccaccgagcgcctgggcaacctgaagaacggaattaacgacatcaaaaaacaccgctggttgaacggttttaattgggagggcctcaaggctcgatccttgccatcccctctgcagcgagagctgaaagggcccatcgatcactcatactttgataagtacccacctgagaaggggatgcccccagatgagttaagcggctgggacaaagacttttag

SEQ ID NO: 101596 - DNA, 1029 bp, Artificial Sequence
  derived and/or modified sequence
atgagcaactggaagctgagcaaggccctgagcctggagatgatccagctgaaggagaaggtggcccgcttcagcagcagcagccccttccagaacctggagatcatcgccaccctgggcgtgggcggcttcggccgggtggagctggtgaaggtgaagaatgaaaatgtggcctttgccatgaagtgcatcaggaagaagcacatcgtggacaccaagcagcaggagcacgtgtacagcgagaagaggatcctggaggagctgtgcagccccttcatcgtgaagctgtaccgcaccttcaaggacaacaagtatgtgtacatgctgctggaggcctgcctgggcggggagctgtggagcatcctgcgggaccggggcagctttgatgagcccaccagcaagttctgtgtggcctgtgtgacagaggcctttgactacctgcaccggctgggcatcatctacagagacctgaagccagagaacctgatcctggatgctgagggctacctgaagctggtggactttggatttgccaagaagattggcagcggccagaagacctggaccttctgtggcaccccagaatatgtggcccctgaggtgatcctgaacaagggccatgacttctctgtggacttctggagcctgggcatcctggtgtatgagctgctgactggaaacccccccttctctggagtggaccagatgatgacctacaacctgatcctgaagggcatcgagaagatggacttccccaggaagatcaccaggaggcctgaggacctgatccggcggctgtgccggcagaaccccacagagcggctgggcaacctgaagaatggcatcaatgacatcaagaagcaccgctggctgaatggcttcaactgggagggcctgaaggcccggagcctgcccagccccctgcagcgggagctgaagggccccatcgaccacagctactttgacaagtacccacctgagaagggcatgcccccagatgagctgagcggctgggacaaggacttctag

SEQ ID NO: 101597 - DNA, 1029 bp, Artificial Sequence
  derived and/or modified sequence
atgagcaactggaagctgagcaaggccctgagcctggagatgatccaactgaaagaaaaggtagcccggttctcttcgagcagtccttttcagaacctggagatcattgccaccctgggcgtggggggatttggccgtgtggaactcgtgaaggtgaaaaacgaaaacgtggccttcgcaatgaagtgcatacgcaagaagcacatcgttgatacgaaacaacaggaacacgtgtacagtgaaaagaggattctcgaagagctttgttcaccattcatcgtgaagctgtaccgcacatttaaggacaataaatacgtctacatgctcttagaggcatgcctaggtggggaactgtggtcaatccttagggaccgtggaagtttcgatgaacccaccagcaaattttgtgtggcatgcgtgacggaagcatttgattacctccatagactcggcatcatctacagggatttaaagccagaaaatctgatcttagatgcggaaggatatctcaaacttgttgactttggcttcgccaaaaaaatcgggtctgggcagaagacttggacgttttgcggaaccccagagtacgttgcgccagaggtgatattaaacaaaggacatgatttttcggtggatttttggagcctgggcatcttagtatatgagctcctcactggtaaccccccatttagtggagtcgaccagatgatgacctacaatcttatccttaagggaatcgaaaaaatggattttcctcgcaagattacccggaggccggaggatctgatcaggcgcctgtgcaggcagaatcccacggagagactgggcaatctgaagaacggaatcaacgatatcaaaaagcacaggtggctgaacggcttcaactgggaggggctgaaggcgaggtccctacccagtccccttcagcgcgagctgaagggaccaatcgaccatagctactttgacaagtatccacctgaaaaggggatgcctcctgatgaactatccgggtgggataaggatttttag

SEQ ID NO: 101598 - DNA, 1029 bp, Artificial Sequence
  derived and/or modified sequence
atgtctaattggaaattgtcgaaagccttgtccctcgagatgatccaactgaaggaaaaggtggctaggtttagtagttccagtcccttccagaacctcgagattatcgccaccctgggagtgggtggcttcgggagggtggaacttgtaaaggtgaaaaatgagaatgttgctttcgctatgaaatgcatccgcaagaagcatatcgttgatacgaagcagcaagaacacgtgtattccgaaaagagaatcctggaagaattatgttccccgttcattgtgaagctctacagaaccttcaaagacaacaagtacgtgtacatgttgctcgaagcttgtctgggaggcgaactctggtccatactgcgagataggggatcttttgatgagccgacttctaagttttgtgtcgcttgtgtcactgaagcctttgactatttgcatcggctgggaattatttaccgcgacctgaagcccgagaatctcatactggacgccgagggctacctcaagcttgtagactttggtttcgccaagaaaattggatcgggccaaaagacatggaccttctgtggaaccccagaatacgtcgctccggaggttattttaaataagggtcatgatttttctgttgacttttggtcgctgggtatccttgtgtatgagctgctgacaggcaatccgccattctctggcgttgatcaaatgatgacatataacttgattctgaaagggatcgaaaagatggatttccccagaaaaattaccaggagaccagaggatctgattagaaggctgtgccgccagaacccgactgagagactcgggaacttgaagaacggcatcaacgatattaagaaacaccgctggctgaacgggtttaactgggagggactcaaagcacggagcctgcctagtccccttcagagagagctgaaggggccaatcgaccactcttacttcgacaaatacccacccgagaagggcatgcctcccgatgagctttcaggatgggataaggacttctag

SEQ ID NO: 101599 - DNA, 1029 bp, Artificial Sequence
  derived and/or modified sequence
atgagcaactggaagctgagcaaggccctgagcctggagatgatccagctgaaggagaaggtggccagattcagcagcagcagccccttccagaacctggagatcatcgccaccctgggcgtgggcggcttcggcagagtggagctggtgaaggtgaagaacgagaacgtggccttcgccatgaagtgcatcagaaagaagcacatcgtggacaccaagcagcaggagcacgtgtacagcgagaagagaatcctggaggagctgtgcagccccttcatcgtgaagctgtacagaaccttcaaggacaacaagtacgtgtacatgctgctggaggcctgcctgggcggcgagctgtggagcatcctgagagacagaggcagcttcgacgagcccaccagcaagttctgcgtggcctgcgtgaccgaggccttcgactacctgcacagactgggcatcatctacagagacctgaagcccgagaacctgatcctggacgccgagggctacctgaagctggtggacttcggcttcgccaagaagatcggcagcggccagaagacctggaccttctgcggcacccccgagtacgtggcccccgaggtgatcctgaacaagggccacgacttcagcgtggacttctggagcctgggcatcctggtgtacgagctgctgaccggcaacccccccttcagcggcgtggaccagatgatgacctacaacctgatcctgaagggcatcgagaagatggacttccccagaaagatcaccagaagacccgaggacctgatcagaagactgtgcagacagaaccccaccgagagactgggcaacctgaagaacggcatcaacgacatcaagaagcacagatggctgaacggcttcaactgggagggcctgaaggccagaagcctgcccagccccctgcagagagagctgaagggccccatcgaccacagctacttcgacaagtacccccccgagaagggcatgccccccgacgagctgagcggctgggacaaggacttctag

SEQ ID NO: 101600 - protein, 733 aa, Artificial Sequence
  derived and/or modified sequence
MGNGSVKPKHSKHPDGHSGNLTTDALRNKVTELERELRRKDAEIQEREYHLKELREQLSKQTVAIAELTEELQNKCIQLNKLQDVVHMQGGSPLQASPDKVPLEVHRKTSGLVSLHSRRGAKAGVSAEPTTRTYDLNKPPEFSFEKARVRKDSSEKKLITDALNKNQFLKRLDPQQIKDMVECMYGRNYQQGSYIIKQGEPGNHIFVLAEGRLEVFQGEKLLSSIPMWTTFGELAILYNCTRTASVKAITNVKTWALDREVFQNIMRRTAQARDEQYRNFLRSVSLLKNLPEDKLTKIIDCLEVEYYDKGDYIIREGEEGSTFFILAKGKVKVTQSTEGHDQPQLIKTLQKGEYFGEKALISDDVRSANIIAEENDVACLVIDRETFNQTVGTFEELQKYLEGYVANLNRDDEKRHAKRSMSNWKLSKALSLEMIQLKEKVKVKNENVAFAMKCIRKKHIVDTKQQEHVYSEKRILEELCSPFIVKLYRTFKDNKYVYMLLEACLGGELWSILRDRGSFDEPTSKFCVACVTEAFDYLHRLGIIYRDLKPENLILDAEGYLKLVDFGFAKKIGSGQKTWTFCGTPEYVAPEVILNKGHDFSVDFWSLGILVYELLTGNPPFSGVDQMMTYNLILKGIEKMDFPRKITRRPEDLIRRLCRQNPTERLGNLKNGINDIKKHRWLNGFNWEGLKARSLPSPLQRELKGPIDHSYFDKYPPEKGMPPDELSGWDKDF

SEQ ID NO: 101601 - DNA, 2202 bp, Artificial Sequence
  derived and/or modified sequence
atgggcaatggctccgtgaagcctaaacattccaaacaccccgatggacactctggcaatttaactaccgacgctctccgtaataaggtgactgagctggaacgggaactgcgtaggaaagatgcagaaatacaggagcgcgaataccatctcaaagagttacgggaacaattgagtaaacagaccgttgctattgctgaattaaccgaagagctgcagaacaaatgcattcagttgaataagctccaggacgtggtgcacatgcagggtggtagtccgctccaggcttcgcccgacaaggtaccactcgaagtgcacaggaaaacatcaggcctggtgagccttcattctcgcagaggcgcgaaagcaggcgtgagtgccgaaccaacaaccaggacctatgatctgaacaagccaccagaattttccttcgagaaagcccgcgtccggaaggattcatctgaaaagaagttgattaccgacgctctgaataagaatcagttccttaagcgccttgacccccagcagattaaggacatggtcgagtgcatgtacgggaggaactatcaacaagggagctacattatcaagcagggcgaaccaggcaaccatatcttcgtcctggccgaggggagactggaagtgttccagggcgagaaattgctctcgagcatccctatgtggacaacatttggcgaactcgcgattttgtataattgtacccgcaccgcttctgtgaaagcgatcaccaatgtaaagacatgggcactcgatagggaggttttccagaacatcatgcgaaggacagcacaagctcgggacgagcagtatagaaactttctgcgatccgtatccctactcaaaaacctgccagaggataaattaactaagattatcgactgtttggaggtcgaatactatgacaaaggagactatattataagagaaggcgaggaagggagtaccttcttcattttggccaagggaaaagtgaaggttacacagtctactgaaggccacgatcagccacagctgatcaaaaccctccagaagggtgagtactttggcgaaaaggctcttatctctgatgacgtgaggtctgctaacattatcgccgaggagaatgatgtcgcttgcttggtgatcgacagagaaacgtttaatcagaccgttggcacatttgaggaattgcagaaatatctggagggctacgtggctaatctgaacagggatgatgagaagcgccacgcaaagagaagtatgtcaaactggaagctctctaaagccttgtcgttagagatgatccaacttaaagaaaaggtgaaagtgaagaatgaaaacgtggcctttgcgatgaagtgcattcgaaagaagcacatcgttgacaccaagcagcaggagcacgtctatagcgaaaagagaatcctggaggaactttgctcacccttcatagtgaagttgtatagaacgtttaaagacaataagtatgtttacatgctcctggaggcatgtttagggggcgagttatggtcgattcttagggatagaggcagcttcgacgagccgaccagtaagttttgtgtggcttgcgtcaccgaagccttcgactacctccataggctcggaatcatatatagagacctcaaacctgagaatctgatcctcgatgcggagggttacctgaagctagtggattttggctttgccaaaaagattggcagcgggcagaagacatggactttctgtggcacaccagagtacgttgcccctgaggtgatccttaacaaagggcacgatttttccgtcgatttctggtcgctgggaattttagtgtatgagctcctgacagggaacccccccttcagtggcgttgaccagatgatgacatacaaccttatcttgaagggtatcgagaaaatggatttcccccggaaaatcacacgacggccggaggacttaattaggcggctatgtcgccagaacccaaccgaaaggctgggcaacctgaagaatggaatcaacgacatcaagaagcacagatggctgaatggtttcaattgggaaggactgaaagcccgttctctgcctagccctctgcagagagagctgaaagggcctattgaccacagctattttgataagtacccacccgaaaaagggatgcccccggacgagctgagtggttgggacaaggatttctag

SEQ ID NO: 101602 - DNA, 2202 bp, Artificial Sequence
  derived and/or modified sequence
atgggaaatggatctgtgaagcccaagcacagcaagcacccagatggccacagcggcaacctgaccacagatgccctgaggaacaaggtgacagagctggagcgggagctgcggaggaaggatgctgagatccaggagcgggagtaccacctgaaggagctgcgggagcagctgagcaagcagacagtggccatcgccgagctgacagaggagctgcagaacaagtgcatccagctgaacaagctgcaggatgtggtgcacatgcagggcggcagccccctgcaggccagcccagacaaggtgcccctggaggtgcacaggaagaccagcggcctggtgtccctgcacagccggcggggggccaaggccggcgtgtctgctgagcccaccaccaggacctatgacctgaacaagcccccagagttctcctttgagaaggcccgggtgaggaaggacagcagcgagaagaagctgatcacagatgccctgaacaagaaccagttcctgaagaggctggacccccagcagatcaaggacatggtggagtgcatgtatggaagaaactaccagcagggcagctacatcatcaagcagggcgagcccggcaaccacatctttgtgctggccgagggccgcctggaggtgttccagggcgagaagctgctgagcagcatccccatgtggaccacctttggagagctggccatcctgtacaactgcaccaggacagcctctgtgaaggccatcaccaacgtgaagacctgggccctggaccgggaggtgttccagaacatcatgagaagaacagcccaggccagagatgagcagtacagaaacttcctgcggtctgtgtccctgctgaagaacctgcctgaggacaagctgaccaagatcatcgactgcctggaggtggagtactatgacaagggggactacatcatccgggagggggaggagggcagcaccttcttcatcctggccaagggcaaggtgaaggtgacccagagcacagagggccatgaccagccccagctgatcaagaccctgcagaagggggagtactttggagagaaggccctgatcagtgatgatgtgcgcagcgccaacatcatcgccgaggagaatgatgtggcctgcctggtgattgaccgggagaccttcaaccagacagtgggcacctttgaggagctgcagaagtacctggagggctacgtggccaacctgaacagagatgatgagaagagacatgccaagaggtccatgagcaactggaagctgagcaaggccctgagcctggagatgatccagctgaaggagaaggtgaaggtgaagaatgaaaatgtggcctttgccatgaagtgcatcaggaagaagcacatcgtggacaccaagcagcaggagcacgtgtacagcgagaagaggatcctggaggagctgtgcagccccttcatcgtgaagctgtaccgcaccttcaaggacaacaagtatgtgtacatgctgctggaggcctgcctgggcggggagctgtggagcatcctgcgggaccggggcagctttgatgagcccaccagcaagttctgtgtggcctgtgtgacagaggcctttgactacctgcaccggctgggcatcatctacagagacctgaagccagaaaatctcatcctggatgctgagggctacctgaagctggtggactttggatttgccaagaagattggcagcggccagaagacctggaccttctgtggcaccccagaatatgtggcccctgaggtgatcctgaacaagggccatgacttctctgtggacttctggagcctgggcatcctggtgtatgagctgctgaccggcaacccccccttcagcggcgtggaccagatgatgacctacaacctgatcctgaagggcatcgagaagatggacttccccaggaagatcacccggcggccagaagatctcatccggcggctgtgccggcagaaccccacagagcggctgggcaacctgaagaatggcatcaatgacatcaagaagcaccgctggctgaatggcttcaactgggagggcctgaaggcccggagcctgcccagccccctgcagcgggagctgaagggccccatcgaccacagctactttgacaagtacccacctgagaagggcatgcccccagatgagctgagcggctgggacaaggacttctag

SEQ ID NO: 101603 - DNA, 2202 bp, Artificial Sequence
  derived and/or modified sequence
atgggcaacggcagcgtgaagcccaagcacagcaagcaccccgacgggcatagtgggaacctcactactgacgcactcaggaacaaggtcaccgagctggagagggagttgcgccggaaagatgccgaaattcaggaaagggaatatcatttgaaggagcttcgggagcagctctcaaaacagactgtcgcaatcgcggaactcaccgaagagcttcagaacaaatgcattcaattaaataaacttcaagatgtggtgcatatgcagggcggaagtccgctccaggcttcaccggacaaggtgcctctggaagtgcatcgaaaaacctctggattggtcagcttgcactcgaggcggggcgccaaggccggcgtgagcgcggagccaaccacccgcacatatgacttgaataaaccccccgaatttagcttcgagaaagccagggtgagaaaggactccagcgagaagaaactgataaccgacgcactgaataagaatcagtttctgaagaggctggacccccaacagatcaaagatatggtggaatgcatgtacgggcgcaactaccagcagggctcctacataatcaagcaaggcgaacccggaaatcatatttttgtactagccgaaggccgcctggaagttttccagggcgagaaactgttatcaagcattcccatgtggaccacctttggtgagctcgctatcctgtataactgtaccaggacagcatccgtgaaagcgatcaccaatgtgaagacttgggccttggaccgggaggtgttccaaaacatcatgcgcaggacggcccaggctcgcgacgagcagtaccgaaatttccttcgtagtgtctctttacttaaaaacttgccggaggataaacttacaaagatcatcgattgtctggaggtcgaatattatgacaagggcgattacatcatcagggaaggagaagagggcagcacattctttattttggcaaaggggaaagtgaaggtgactcaatctaccgagggacacgaccagccccagctgataaagactctccaaaagggagagtattttggcgaaaaggccctcatcagtgacgacgttcggagtgccaatattatcgccgaagaaaacgatgtcgcctgtctggtgatcgatcgggagacctttaatcaaactgttggaacttttgaagagctgcagaaatacctcgagggctacgttgcaaatctcaatagagacgacgaaaaacgtcacgccaaacgttccatgtctaattggaagttatccaaggccctgtcccttgagatgatccagctcaaagaaaaagtgaaagtgaagaacgaaaacgttgcatttgcaatgaaatgcatccgaaagaagcatatcgtcgacaccaagcagcaggaacatgtttactcagagaagaggatcctcgaggagctatgttcaccttttattgttaaactctatcgtacgtttaaagacaacaaatatgtctacatgcttctggaggcctgcttgggaggtgagttgtggtctatcttgagagacaggggtagtttcgatgagccgacatccaaattctgcgtggcctgtgtgaccgaggccttcgactatctgcatagactcggtatcatatacagggacctcaaacctgagaatctgatcctggacgctgaaggatacttgaaactagtggattttggattcgccaaaaagattggtagcgggcagaaaacatggaccttctgtggaacccccgaatatgtagcgcctgaagtgatcctcaacaaaggccatgacttcagcgtcgacttttggtctttggggatactggtgtatgaattactaacaggcaacccacctttctccggagtcgatcagatgatgacctacaacctcattctgaaaggcattgagaagatggatttccctcgcaaaatcaccagaaggccggaagacctaatccgccggctctgtcgccaaaacccgaccgaacggctcggtaacctgaaaaatggaatcaatgacatcaaaaagcataggtggttgaacggctttaactgggaaggtttaaaagcgagatcactcccaagccccctgcagagggaattgaagggccctatcgaccattcctacttcgataaatacccccctgaaaagggcatgcccccagacgaattgagcgggtgggataaagacttctag

SEQ ID NO: 101604 - DNA, 2202 bp, Artificial Sequence
  derived and/or modified sequence
atgggcaacggatcagtgaaacccaagcactccaagcatcccgatgggcattctggaaacctcactactgatgctctaagaaataaggtgaccgagctggagagggagctacgcaggaaagatgcggagatccaggaacgagagtatcacctgaaggagctaagggagcaactgagtaagcagacagtggccatagcggaattaacggaagagttacaaaacaagtgtatccagctgaacaagctccaagatgttgtacacatgcaaggcggatctccacttcaggccagccccgacaaggttccactcgaggtgcaccggaagacatccggcctggtatccctgcacagcaggcggggagcgaaagctggggtgtccgccgagccgactaccagaacttatgacctaaacaaacccccagaattttcttttgaaaaggcccgagtaagaaaggactccagtgagaaaaagctaattacggatgcactaaacaagaaccagttcctgaaacgtcttgacccccaacagataaaggatatggtggagtgtatgtacggaagaaattatcagcagggttcttacatcattaaacagggagagcctggcaatcacatattcgttcttgcggaggggaggttggaggttttccagggcgagaagctgctgtccagcattccgatgtggactacctttggagagcttgctattctttataactgtacaaggacagcatctgtgaaagccatcaccaacgtgaagacctgggccttagacagagaggtgttccagaacatcatgcgacgcaccgctcaggctagggatgaacagtataggaatttcctccgcagcgtaagcctgctcaaaaacctgcccgaagacaaactgaccaagattatcgattgtttggaagtcgaatattatgataaaggagattatataatccgtgaaggtgaagaaggcagtactttctttatccttgccaaagggaaagtaaaggtcacgcagtccacagagggacatgatcagcctcagttaatcaagacactgcaaaagggcgagtacttcggggaaaaggctttaatctcagatgacgtgagatctgctaacatcatagccgaggagaacgatgtggcttgtttagtgattgaccgcgagacttttaaccagacagtcggcacattcgaggagcttcagaagtacctggaaggctacgtggccaaccttaaccgtgacgacgagaaacgacatgccaaaagatccatgagcaactggaagctctcaaaagctctgtcactggaaatgatccagctgaaggagaaagtgaaggttaagaacgagaacgtggcctttgcgatgaaatgcattcggaaaaagcacattgtagataccaagcagcaggagcatgtgtacagcgaaaagagaatcctcgaggaactgtgttctccctttattgtcaagttgtaccggacttttaaggacaataaatatgtctacatgctgctggaagcttgtttaggtggggaactgtggagcatcctgagagatagagggtccttcgacgagcctacatccaagttttgcgtcgcttgtgtgaccgaagcctttgactatctgcataggttggggattatctaccgggatttgaaaccagagaatctaatactagacgcagaaggatacctgaaactcgtggattttggttttgcaaagaagatcggttctggacagaaaacgtggactttctgcggcaccccggagtacgtggctcccgaggtaattctcaataagggccatgatttcagtgttgacttctggagcttgggaatcctggtttacgagttgctgaccggtaatcctcctttctccggcgtggatcagatgatgacctacaatctgattctcaaagggatagaaaaaatggacttcccacggaaaattacacgcagaccagaagacctgattcgaaggctgtgccgacagaatcctactgaaaggctaggaaatcttaaaaacggcattaacgacatcaagaaacaccgctggctgaacggctttaattgggagggtctgaaggctcgttctctcccttcacccctccagcgcgagcttaagggccctatagaccattcgtactttgacaagtaccctccagagaaaggcatgccacccgatgagctttctggatgggacaaggacttctag

SEQ ID NO: 101605 - DNA, 2623 bp, Artificial Sequence
  derived and/or modified sequence
gagctgacctgcgctgggctccggcgccgcaggcggctggggagggcggcgtgggagaggacgctgagacgcaggggcggccgcgccgaggtgacaagctgcgcacctggaaagttacccggctgtctggtccctgagcaaaatgggaaatggttcagtgaaacctaaacattctaagcacccagatggacactctgggaacctcaccactgatgctctgcggaacaaggtgacagagctggagagagagttgaggaggaaggatgctgagatccaggagcgggagtaccatttgaaggagctgcgggagcagctgtcgaagcagactgtggccattgctgaactcacagaggagctccagaacaagtgcatccagctgaacaagctgcaggatgtggtgcatatgcagggaggaagcccgcttcaggcctctccagataaagtgcctcttgaggtccaccggaagacctctggattggtctctctccatagcaggaggggagcaaaggctggcgtgtctgctgagccaacaacccggacctatgacctgaacaaaccccctgaattttcctttgagaaagcaagagtcagaaaagactccagtgagaagaagctcattacagatgcccttaataaaaatcagtttctgaaaagactggatcctcagcagatcaaagacatggtggaatgcatgtatgggagaaactatcagcaagggagttacattattaagcaaggagaaccaggaaaccatatctttgtgctggcagagggtcgactagaggtgttccaaggggagaaattgctgtcctccatccctatgtggaccacatttggggagcttgccattttatacaattgtacaaggactgcctctgtgaaagctattaccaatgttaaaacatgggcactagatcgagaggtattccagaatataatgaggaggacagcccaagctagagatgaacaatacagaaacttcctcagaagtgtatccttgctgaagaatttacctgaagataaattaaccaagatcattgactgcttggaagtggaatactatgacaaaggagattacatcattagagagggcgaggaaggaagtacctttttcattttggcaaaaggaaaggtaaaagtaacacagagcacagaaggccatgatcaaccacagctgataaaaacactgcagaaaggagaatactttggagaaaaagctcttatcagtgatgatgtcaggtcagctaacattattgctgaagaaaatgatgttgcatgcctggttatagatcgagaaacattcaaccaaactgtcggtacatttgaagagctgcaaaaataccttgaaggatatgtggcaaacctgaaccgtgatgatgaaaaaagacatgcgaagcggtccatgtctaactggaagctgtccaaagcactctctctggaaatgattcagctgaaggagaaggttaaagtaaaaaatgagaatgttgcttttgctatgaagtgtataaggaagaagcacatagttgacaccaagcagcaggagcatgtctactcagagaagaggatcctagaggagctgtgctctccattcattgtgaaattatatcgtactttcaaggacaataagtatgtatacatgcttctggaggcctgcttaggtggggagctctggagtatattaagggacagaggcagctttgatgaacccacctccaaattctgcgttgcttgtgtgacagaagcatttgattacctgcatcgactaggtattatctacagagacttgaaaccagaaaacttaattctagatgctgagggttaccttaaattggttgactttggatttgcgaagaaaatagggtctggacagaaaacatggacattctgtgggactccagaatatgtagctcctgaagtcattctcaacaagggacatgacttcagtgtggatttctggtcactgggaattctagtgtatgagctcctaacgggcaacccacccttttctggggttgaccaaatgatgacctacaatttgattctcaaaggaattgaaaaaatggattttcccaggaagataacacgacgacctgaggatttgattcggaggctttgcaggcaaaatccaacagaaaggctgggaaatctgaagaatggaataaatgacattaagaaacacaggtggttaaatggttttaattgggagggactgaaagcacggagccttccatcacctttgcaaagagagctcaagggacccatagatcacagctactttgacaaatatcctcctgaaaagggaatgcctccagatgagctatcaggctgggataaagacttctgacagaagaaaagttgattactgcctgtactctacagaagaggacctcaaggatcaataatccaacacattattttcttttcagagtattataatatctttggaagaccattagggaaaagaaattcctgcacaatgggaagaggagaatggtgtggatatggttctgagttatagtgtcttatttagatgctgtgaattattgatgtattacattatttgcttttctcaactgctagaggctaccccattttcctttccacaatcagagccatttttgtt

SEQ ID NO: 101606 - DNA, 2202 bp, Artificial Sequence
  derived and/or modified sequence
atgggcaacggcagcgtgaagcccaagcacagcaagcaccccgacggccacagcggcaacctgaccaccgacgccctgagaaacaaggtgaccgagctggagagagagctgagaagaaaggacgccgagatccaggagagagagtaccacctgaaggagctgagagagcagctgagcaagcagaccgtggccatcgccgagctgaccgaggagctgcagaacaagtgcatccagctgaacaagctgcaggacgtggtgcacatgcagggcggcagccccctgcaggccagccccgacaaggtgcccctggaggtgcacagaaagaccagcggcctggtgagcctgcacagcagaagaggcgccaaggccggcgtgagcgccgagcccaccaccagaacctacgacctgaacaagccccccgagttcagcttcgagaaggccagagtgagaaaggacagcagcgagaagaagctgatcaccgacgccctgaacaagaaccagttcctgaagagactggacccccagcagatcaaggacatggtggagtgcatgtacggcagaaactaccagcagggcagctacatcatcaagcagggcgagcccggcaaccacatcttcgtgctggccgagggcagactggaggtgttccagggcgagaagctgctgagcagcatccccatgtggaccaccttcggcgagctggccatcctgtacaactgcaccagaaccgccagcgtgaaggccatcaccaacgtgaagacctgggccctggacagagaggtgttccagaacatcatgagaagaaccgcccaggccagagacgagcagtacagaaacttcctgagaagcgtgagcctgctgaagaacctgcccgaggacaagctgaccaagatcatcgactgcctggaggtggagtactacgacaagggcgactacatcatcagagagggcgaggagggcagcaccttcttcatcctggccaagggcaaggtgaaggtgacccagagcaccgagggccacgaccagccccagctgatcaagaccctgcagaagggcgagtacttcggcgagaaggccctgatcagcgacgacgtgagaagcgccaacatcatcgccgaggagaacgacgtggcctgcctggtgatcgacagagagaccttcaaccagaccgtgggcaccttcgaggagctgcagaagtacctggagggctacgtggccaacctgaacagagacgacgagaagagacacgccaagagaagcatgagcaactggaagctgagcaaggccctgagcctggagatgatccagctgaaggagaaggtgaaggtgaagaacgagaacgtggccttcgccatgaagtgcatcagaaagaagcacatcgtggacaccaagcagcaggagcacgtgtacagcgagaagagaatcctggaggagctgtgcagccccttcatcgtgaagctgtacagaaccttcaaggacaacaagtacgtgtacatgctgctggaggcctgcctgggcggcgagctgtggagcatcctgagagacagaggcagcttcgacgagcccaccagcaagttctgcgtggcctgcgtgaccgaggccttcgactacctgcacagactgggcatcatctacagagacctgaagcccgagaacctgatcctggacgccgagggctacctgaagctggtggacttcggcttcgccaagaagatcggcagcggccagaagacctggaccttctgcggcacccccgagtacgtggcccccgaggtgatcctgaacaagggccacgacttcagcgtggacttctggagcctgggcatcctggtgtacgagctgctgaccggcaacccccccttcagcggcgtggaccagatgatgacctacaacctgatcctgaagggcatcgagaagatggacttccccagaaagatcaccagaagacccgaggacctgatcagaagactgtgcagacagaaccccaccgagagactgggcaacctgaagaacggcatcaacgacatcaagaagcacagatggctgaacggcttcaactgggagggcctgaaggccagaagcctgcccagccccctgcagagagagctgaagggccccatcgaccacagctacttcgacaagtacccccccgagaagggcatgccccccgacgagctgagcggctgggacaaggacttctag

SEQ ID NO: 101607 - protein, 599 aa, Artificial Sequence
  derived and/or modified sequence
MMLPYPSALGDQYWEEILLPKNGENVETMKKLTQNHKAKGLPSNDTDCPQKKEGKAQIVVPVTFRDVTVIFTEAEWKRLSPEQRNLYKEVMLENYRNLLSLAEPKPEIYTCSSCLLAFSCQQFLSQHVLQIFLGLCAENHFHPGNSSPGHWKQQGQQYSHVSCWFENAEGQERGGGSKPWSARTEERETSRAFPSPLQRQSASPRKGNMVVETEPSSAQRPNPVQLDKGLKELETLRFGAINCREYEPDHNLESNFITNPRTLLGKKPYICSDCGRSFKDRSTLIRHHRIHSMEKPYVCSECGRGFSQKSNLSRHQRTHSEEKPYLCRECGQSFRSKSILNRHQWTHSEEKPYVCSECGRGFSEKSSFIRHQRTHSGEKPYVCLECGRSFCDKSTLRKHQRIHSGEKPYVCRECGRGFSQNSDLIKHQRTHLDEKPYVCRECGRGFCDKSTLIIHERTHSGEKPYVCGECGRGFSRKSLLLVHQRTHSGEKHYVCRECRRGFSQKSNLIRHQRTHSNEKPYICRECGRGFCDKSTLIVHERTHSGEKPYVCSECGRGFSRKSLLLVHQRTHSGEKHYVCRECGRGFSHKSNLIRHQRTH

SEQ ID NO: 101608 - protein, 144 aa, Artificial Sequence
  derived and/or modified sequence
MMLPYPSALGDQYWEEILLPKNGENVETMKKLTQNHKAKGLPSNDTDCPQKKEGKAQIVVPVTFRDVTVIFTEAEWKRLSPEQRNLYKEVMLENYRNLLSLAEPKPEIYTCSSCLLAFSCQQFLSQHVLQIFLGLCAENHFHPG

SEQ ID NO: 101609 - DNA, 1800 bp, Artificial Sequence
  derived and/or modified sequence
atgatgctgccctaccccagcgccctgggcgaccagtactgggaggagatcctgctgcccaagaacggcgagaacgtggagaccatgaagaagctgacccagaaccacaaggccaagggcctgcccagcaacgacaccgactgcccccagaagaaggagggcaaggcccagatcgtggtgcccgtgaccttcagagacgtgaccgtgatcttcaccgaggccgagtggaagagactgagccccgagcagagaaacctgtacaaggaggtgatgctggagaactacagaaacctgctgagcctggccgagcccaagcccgagatctacacctgcagcagctgcctgctggccttcagctgccagcagttcctgagccagcacgtgctgcagatcttcctgggcctgtgcgccgagaaccacttccaccccggcaacagcagccccggccactggaagcagcagggccagcagtacagccacgtgagctgctggttcgagaacgccgagggccaggagagaggcggcggcagcaagccctggagcgccagaaccgaggagagagagaccagcagagccttccccagccccctgcagagacagagcgccagccccagaaagggcaacatggtggtggagaccgagcccagcagcgcccagagacccaaccccgtgcagctggacaagggcctgaaggagctggagaccctgagattcggcgccatcaactgcagagagtacgagcccgaccacaacctggagagcaacttcatcaccaaccccagaaccctgctgggcaagaagccctacatctgcagcgactgcggcagaagcttcaaggacagaagcaccctgatcagacaccacagaatccacagcatggagaagccctacgtgtgcagcgagtgcggcagaggcttcagccagaagagcaacctgagcagacaccagagaacccacagcgaggagaagccctacctgtgcagagagtgcggccagagcttcagaagcaagagcatcctgaacagacaccagtggacccacagcgaggagaagccctacgtgtgcagcgagtgcggcagaggcttcagcgagaagagcagcttcatcagacaccagagaacccacagcggcgagaagccctacgtgtgcctggagtgcggcagaagcttctgcgacaagagcaccctgagaaagcaccagagaatccacagcggcgagaagccctacgtgtgcagagagtgcggcagaggcttcagccagaacagcgacctgatcaagcaccagagaacccacctggacgagaagccctacgtgtgcagagagtgcggcagaggcttctgcgacaagagcaccctgatcatccacgagagaacccacagcggcgagaagccctacgtgtgcggcgagtgcggcagaggcttcagcagaaagagcctgctgctggtgcaccagagaacccacagcggcgagaagcactacgtgtgcagagagtgcagaagaggcttcagccagaagagcaacctgatcagacaccagagaacccacagcaacgagaagccctacatctgcagagagtgcggcagaggcttctgcgacaagagcaccctgatcgtgcacgagagaacccacagcggcgagaagccctacgtgtgcagcgagtgcggcagaggcttcagcagaaagagcctgctgctggtgcaccagagaacccacagcggcgagaagcactacgtgtgcagagagtgcggcagaggcttcagccacaagagcaacctgatcagacaccagagaacccactag

SEQ ID NO: 101610 - DNA, 435 bp, Artificial Sequence
  derived and/or modified sequence
atgatgctgccctaccccagcgccctgggcgaccagtactgggaggagatcctgctgcccaagaacggcgagaacgtggagaccatgaagaagctgacccagaaccacaaggccaagggcctgcccagcaacgacaccgactgcccccagaagaaggagggcaaggcccagatcgtggtgcccgtgaccttcagagacgtgaccgtgatcttcaccgaggccgagtggaagagactgagccccgagcagagaaacctgtacaaggaggtgatgctggagaactacagaaacctgctgagcctggccgagcccaagcccgagatctacacctgcagcagctgcctgctggccttcagctgccagcagttcctgagccagcacgtgctgcagatcttcctgggcctgtgcgccgagaaccacttccaccccggctag

SEQ ID NO: 101611 - DNA, 1800 bp, Artificial Sequence
  derived and/or modified sequence
atgatgctgccatatccaagtgctctcggggaccagtattgggaggaaattctcttgcccaagaacggagagaacgtcgaaacaatgaaaaaattaacacagaaccataaggccaaaggcctgccctctaatgataccgactgcccccagaagaaggaagggaaggcccagatcgttgttccagtcacctttcgagatgtgaccgtcatttttactgaggccgaatggaagcgcctgtctccagagcaacggaatttgtataaagaggtgatgctggagaactaccgaaatctgctgagtttagccgagcctaaacccgagatttacacttgtagtagctgccttctcgcatttagctgtcagcaatttctttcccagcatgtgttgcaaatattccttggtctttgcgcggaaaatcactttcaccccggcaacagcagccccggacactggaaacagcagggtcagcaatacagccacgtttcatgctggttcgagaacgctgagggacaggagaggggaggggggagcaagccctggtcagcccggaccgaagagcgcgagaccagccgggcattcccaagccctctgcagaggcagtccgcctctcctaggaaggggaatatggtggtcgagaccgaaccctccagtgcgcaaaggcctaaccccgtgcagttggacaaaggactgaaggagttggagaccttgcggtttggagcaatcaattgtcgggagtatgagcctgatcacaacctggaatccaactttataaccaacccccgcactttactaggtaagaaaccttacatttgctctgactgtggccgtagctttaaggaccgttccacactcattcgccatcaccgaatccattctatggagaaaccttatgtctgctccgagtgtggccggggcttcagccagaaatccaacctgagtcggcaccagcgaacccatagcgaggagaaaccctacctctgcagggaatgcgggcagtcttttcggtctaagtctatcttgaaccgacatcagtggacacactcagaagaaaaaccttacgtctgtagcgagtgtggcaggggctttagtgaaaagtccagcttcatccggcatcaaagaacacattcaggagaaaagccgtacgtgtgcctagaatgcggtcgatccttttgtgacaaatccactctgcgtaagcaccaacggattcactctggcgaaaagccgtatgtgtgtcgtgagtgcggcagagggttcagccagaatagtgacctgattaagcatcagcggacccaccttgacgagaagccctacgtgtgcagggaatgcggaaggggcttctgcgataagagcactttgatcatccatgaacggacacattcaggcgagaaaccttacgtgtgtggcgagtgtggacgtggcttctcgcggaaatccctcctcctcgtgcaccagcgtacacactccggcgaaaaacactacgtatgtcgcgagtgtagaaggggttttagtcagaaaagcaatttaatccgacaccagaggacccactctaatgaaaagccctacatttgtcgcgagtgcggcaggggcttctgcgacaagagcacattgatagtccacgaaaggactcattccggggagaagccctatgtgtgctccgagtgcggaagaggatttagcagaaagtcacttctgctggtgcaccagcgcacacattccggagagaagcattatgtgtgccgcgagtgcggccgtggattctcccacaaaagcaacctgattcggcaccagcgaacccactag

SEQ ID NO: 101612 - DNA, 435 bp, Artificial Sequence
  derived and/or modified sequence
atgatgctgccctacccttccgctctcggggaccagtattgggaagagatcctgttgccaaaaaatggagagaatgtggagacaatgaaaaaattgacccagaatcataaggccaaaggtctgccttctaatgacacagactgcccacagaaaaaagagggtaaggctcagattgtggtgccagtcactttcagggatgtgactgttatcttcacggaagccgaatggaaaaggcttagcccagagcaacggaacctgtataaagaggtaatgttagaaaattaccgtaacctactgtcgctcgccgagccgaagcccgagatttatacatgttcttcatgcctgctggcattttcctgccaacagttcctgtcgcaacacgtcctgcagatattcctgggactgtgcgctgagaaccacttccatccaggatag

SEQ ID NO: 101613 - DNA, 1800 bp, Artificial Sequence
  derived and/or modified sequence
atgatgctgccctaccccagcgccctgggggaccagtactgggaggagatcctgctgcccaagaatggagaaaatgtggagaccatgaagaagctgacccagaaccacaaggccaagggcctgcccagcaatgacacagactgcccccagaagaaggagggcaaggcccagatcgtggtgcctgtgaccttcagagatgtgaccgtcatcttcacagaggccgagtggaagaggctgagccctgagcagaggaacctgtacaaggaggtgatgctggagaactacagaaacctgctgagcctggccgagcccaagccagagatctacacctgcagcagctgcctgctggccttcagctgccagcagttcctgagccagcacgtgctgcagatcttcctgggcctgtgtgccgagaaccacttccaccctggcaacagcagccctggccactggaagcagcagggccagcagtacagccacgtgtcctgctggtttgaaaatgctgagggccaggagcggggcggcggcagcaagccctggagcgccaggacagaggagcgggagaccagccgggccttccccagccccctgcagaggcagagcgccagccccaggaagggcaacatggtggtggagacagagcccagcagcgcccagaggcccaaccctgtgcagctggacaagggcctgaaggagctggagaccctgcgctttggagccatcaactgccgggagtatgagccagaccacaacctggagagcaacttcatcaccaaccccaggaccctgctgggcaagaagccctacatctgcagcgactgtggccgctccttcaaggacaggagcaccctcatccgccaccaccgcatccacagcatggagaagccctacgtgtgcagtgaatgtggccggggcttcagccagaagagcaacctgagccgccaccagaggacccacagcgaggagaagccctacctgtgcagagaatgtggccagagcttccgcagcaagagcatcctgaacagacaccagtggacccacagcgaggagaagccctacgtgtgcagtgaatgtggccggggcttcagcgagaagagcagcttcatccgccaccagaggacccacagcggggagaagccctacgtgtgcctggagtgtggccgctccttctgtgacaagagcaccctgaggaagcaccagaggatccacagcggggagaagccctacgtgtgcagagaatgtggccggggcttcagccagaacagcgacctgatcaagcaccagaggacccacctggatgagaagccctacgtgtgcagagaatgtggccggggcttctgtgacaagagcaccctcatcatccacgagaggacccacagcggggagaagccctacgtgtgtggagaatgtggccggggcttcagcaggaagagcctgctgctggtgcaccagaggacccacagcggggagaagcactacgtgtgcagagaatgtagaagaggcttcagccagaagagcaacctgatccgccaccagaggacccacagcaatgagaagccctacatctgcagagaatgtggccggggcttctgtgacaagagcaccctgattgtgcatgagaggacccacagcggggagaagccctacgtgtgcagtgaatgtggccggggcttcagcaggaagagcctgctgctggtgcaccagaggacccacagcggggagaagcactacgtgtgcagagaatgtggccggggcttcagccacaagagcaacctgatccgccaccagaggacccactag

SEQ ID NO: 101614 - DNA, 435 bp, Artificial Sequence
  derived and/or modified sequence
atgatgctgccctaccccagcgccctgggggaccagtactgggaggagatcctgctgcccaagaatggagaaaatgtggagaccatgaagaagctgacccagaaccacaaggccaagggcctgcccagcaatgacacagactgcccccagaagaaggagggcaaggcccagatcgtggtgcctgtgaccttcagagatgtgaccgtcatcttcacagaggccgagtggaagaggctgagccctgagcagaggaacctgtacaaggaggtgatgctggagaactacagaaacctgctgagcctggccgagcccaagccagagatctacacctgcagcagctgcctgctggccttcagctgccagcagttcctgagccagcacgtgctgcagatcttcctgggcctgtgtgccgagaaccacttccaccctggatag

SEQ ID NO: 101615 - DNA, 1800 bp, Artificial Sequence
  derived and/or modified sequence
atgatgctgccctaccccagcgccctgggcgaccagtactgggaggagatattgttaccaaaaaacggggaaaacgtagaaacaatgaaaaagcttactcagaatcacaaagccaaaggactcccgtcgaacgatacagattgccctcagaaaaaggagggaaaagctcagatcgtggtcccagtgacctttagagacgtgactgtgatcttcacagaggcggaatggaaaagactatctcctgagcagcgcaacttgtacaaagaggtgatgctggagaattaccgcaacctattgtctctcgccgagcccaaaccagaaatatacacatgcagctcctgcttattggccttcagttgtcagcaattcctctcccagcacgtccttcagattttcctgggcttatgcgctgaaaatcactttcaccctggcaactcctctcccggccactggaaacaacagggccagcagtactcccacgtctcctgctggtttgagaacgctgagggacaggaacgcggcggcgggtcaaagccttggagtgcccgaaccgaggagcgcgagacctctcgcgcgttccctagtcccctccagcgccagagcgcatccccgaggaaaggcaatatggtggtggagacggagccctcatcagcccagcggccaaatcccgtgcagttagataagggactcaaagaattggagactctaagatttggagcaatcaattgcagagaatatgagcctgaccataatctggaaagcaactttattaccaatccaaggacactgctgggtaagaagccatatatatgctccgattgtgggagaagtttcaaagacaggtcaacgctcattcgccatcataggatccattccatggaaaaaccgtatgtttgcagcgaatgcgggcgaggtttctcacaaaagagtaacctgtccaggcaccagcgcacccactccgaggaaaaaccatacttgtgcagagaatgtggacagtcatttcgttctaaatcgatcctgaacagacaccagtggacccattctgaggaaaaaccttacgtttgttccgaatgtgggcgggggttcagcgagaaaagtagcttcatccgccaccagagaacacattccggcgagaagccatacgtgtgtctggagtgcggtcgaagcttctgcgacaaaagcactctgcgaaagcatcagaggattcatagcggggagaagccttatgtgtgcagagagtgtggcagagggttcagccagaactctgatctcataaaacaccaacgcacacacctggatgagaaaccttatgtgtgccgcgaatgcgggcgcggattctgcgataagagtacgttaattatacacgaaaggacacatagcggggaaaagccttacgtctgtggcgagtgtggtcgcgggttttctcggaaatccttgctgcttgttcatcagcgaactcattccggcgagaagcactacgtgtgcagggagtgtaggagaggattttcccaaaaaagtaaccttattcgtcaccagcggacacactccaacgagaagccatatatctgtagggaatgtggccgcggcttttgcgataagtcaactttgattgtccatgagaggacccactctggggagaagccatatgtgtgctccgagtgtgggagggggttttcacgcaaatccctgctcctggtgcaccagaggacacatagcggagagaaacactatgtgtgtagggaatgtggccgcggcttttcccacaaatctaacctgattagacaccagcgaacgcactag

SEQ ID NO: 101616 - DNA, 435 bp, Artificial Sequence
  derived and/or modified sequence
atgatgctgccctaccccagcgccctgggcgaccagtactgggaggaaatcctcctgcctaaaaacggagagaacgtcgaaaccatgaaaaaactgacacaaaaccacaaagccaaggggttgccctcaaatgacacagactgccctcagaaaaaagagggaaaagcacagattgtggtcccggtgaccttcagggatgtgacagtgatcttcaccgaagccgagtggaagcgcctgtctcctgaacagaggaatctgtataaagaggtcatgctggaaaattatagaaatcttctatccctggcggaacccaagcctgaaatctatacttgcagcagttgtctgctagccttttcatgccaacagtttctttcccagcatgtgctgcaaattttcctggggctctgtgccgagaatcatttccacccaggatag

SEQ ID NO: 101617 - DNA, 1800 bp, Artificial Sequence
  derived and/or modified sequence
atgatgttaccctacccctcagctcttggcgatcagtattgggaagagatcctcctccccaaaaacggtgagaatgtggaaaccatgaagaagcttacacaaaaccacaaggccaaaggactgccgtccaatgataccgattgtcctcaaaagaaggaggggaaagcccaaattgtggtgcccgtgacgtttcgcgatgtcaccgttatattcaccgaggctgagtggaagcgcctgtccccagagcagaggaatctgtataaagaagtaatgttagaaaactaccgaaatctgcttagcctcgcggagccgaagccagaaatctatacctgttctagctgcctcctggccttctcatgccaacagtttctgtcacaacacgttctgcagatcttcttgggcctgtgcgcagagaaccattttcaccctggcaactcctcccccggacactggaaacagcagggccagcagtactcccatgtgtcgtgctggttcgaaaacgcagagggccaggagcggggaggtggaagcaagccatggagcgcccgaaccgaggagcgggagacaagtagggcttttccgtcacctctacagcgacaatcggcaagccctagaaaaggcaatatggtcgtggagacagagcctagcagtgcgcaacgtcccaaccccgtccagttggacaaaggactgaaggagctggaaacgttgcgttttggcgctatcaactgtagggaatacgagccagaccataacctggagagtaacttcattacgaatcccagaaccctcttaggaaagaagccttacatctgttctgattgtggtagaagttttaaggataggtccacccttatacgccatcacaggatccatagcatggagaaaccttacgtgtgcagcgagtgtggtcgcggattcagtcagaaaagcaatctcagccgacatcagcgcactcattccgaagagaaaccctatctctgtagggaatgtggtcagtcatttagatcaaagtccatcctgaatcggcaccagtggactcacagcgaagaaaagccttatgtttgtagcgaatgtggaagaggtttctccgaaaagtctagcttcatcagacaccagagaacacactctggtgaaaaaccctatgtatgcttggagtgcggccgtagtttttgcgacaagtctaccttacggaaacatcagcggatacacagcggggagaagccctatgtttgtcgagagtgcggccgaggcttcagccaaaattcggacctgattaagcaccagcggacccacctcgacgaaaagccctacgtgtgtcgcgagtgcggacgcggattttgcgataaaagcaccctcatcatccatgagcggactcactcaggtgagaagccttacgtttgcggtgagtgcggacggggtttctcacgaaaaagtctgctgctggtgcaccaacgtacacatagtggagagaagcactacgtttgtagagaatgccggagggggtttagccaaaaatccaatctgataaggcatcagcgaacgcattctaatgagaaaccttacatttgccgtgaatgtggcagggggttttgtgacaagtccactctgatagtgcacgagcgaactcactccggagaaaagccctatgtgtgtagcgaatgcggacgcggattcagtaggaagtcgttgctgctcgtccatcagcgtacccacagcggtgagaagcattacgtctgccgggaatgcgggagaggcttttcccataaaagtaacctgattaggcatcaacggactcactag

SEQ ID NO: 101618 - DNA, 435 bp, Artificial Sequence
  derived and/or modified sequence
atgatgcttccttatccaagcgcgcttggcgaccaatattgggaggaaatcctgctcccaaagaacggagagaacgttgagactatgaagaaactgactcagaaccataaagcaaagggtctgccctcaaacgatacagattgtcctcaaaaaaaagagggaaaggcccaaatcgtagttccggttactttccgggatgtgacggtcatcttcacagaggccgagtggaaacgcttaagtcctgagcagcggaatctgtacaaggaagtgatgctcgagaactaccgtaatctgctgtccttggctgagcctaaacccgaaatctatacctgttctagctgcctgcttgccttctcgtgccaacagttcctatctcagcatgtgctgcaaatattcctgggcctatgcgcagaaaaccacttccatccaggctag

SEQ ID NO: 101619 - DNA, 3632 bp, Artificial Sequence
  derived and/or modified sequence
gtagtcttttttttgcagaatgggccaaggggacagagacttcactcgggagccagaacctgttttcaacatgggtattttaagaagagacggagaggctgtcactgcagtggtcactgtcctggaaaagtaaccgttgcacggcccagaagtggctctgtggcggccaatgggagccgaagcctgcgaggatgttgggaattgtagttctggcgtcggtcggtggccgagatcccgggcacgctggctctggtccaccttctccaatccctgcctgctgggagaggacgatctcttgagaaaggaaagacttctgtgctcccgagaacttcctatcaggtcctggctgcagggaaacaagctgggctttttataattaaggttggaagaagtcaccacaggcagcagaactccatcttgagatgaaataacatctacctggacctctggcagaatttcaaggcacacactgggctgactctggcgccatgatgttgccttatccttcagcactgggagatcaatactgggaagagattttgcttccaaagaatggggaaaatgtagagactatgaagaaattgacccaaaatcataaagcgaaaggcttgccttctaatgatactgactgcccccagaaaaaggagggaaaggcccaaatagtggtaccagttacattcagggatgtgactgtgatcttcacagaagcagaatggaagagactgagtccagagcagaggaatctatacaaagaagtgatgctggagaattacaggaatcttctctcattggcagaaccaaagccagaaatctacacttgttcctcctgccttctggccttctcctgtcagcagttcctcagtcaacatgtacttcagatcttcctgggcttatgtgcagaaaatcacttccatccagggaattctagcccagggcattggaaacagcaggggcagcagtattcccatgtaagctgttggtttgaaaatgcagaaggtcaggagagaggaggtggctccaaaccctggtctgcaaggacagaggagagagaaacctcaagggcattccccagcccactccaaagacagtcagcaagtcctagaaaaggcaacatggtggtagaaacagagcccagctcagcccaaagaccaaaccctgtgcagctagacaaaggcttgaaggaattagaaaccttgagatttggagcaatcaactgtagagagtatgaaccggaccataacctggaatcaaactttattacaaacccgaggaccctcttagggaagaagccctacatttgcagtgattgtgggcgaagctttaaagatagatcaaccctcatcagacaccatcgtatacactcgatggagaagccttatgtgtgcagtgagtgcgggcgaggttttagccagaagtccaacctcagcagacaccagagaacacattcagaagagaagccttatttgtgcagggagtgtgggcaaagctttagaagtaagtccatcctcaatagacatcagtggactcactcagaggagaagccctatgtttgcagcgagtgtgggcgaggctttagcgagaagtcatccttcatcagacaccagaggacacactccggtgagaaaccctatgtgtgcctggagtgtggacgaagcttttgtgataagtcaaccctcagaaaacaccagaggatacactcaggggagaagccttatgtttgcagggagtgtgggcgaggctttagccagaactcagatctcatcaaacaccagaggacacacttggatgagaagccttatgtttgcagggagtgtgggcgaggcttttgtgacaagtcaaccctcatcatacacgagcggacgcactctggagagaagccttatgtgtgtggtgagtgtggccgaggctttagtcggaaatcactcctccttgtccaccagaggacacactcaggggagaagcattatgtctgcagggagtgtaggcgaggttttagccagaagtcaaatctcatcagacaccagaggacgcactcaaatgagaagccttatatttgcagggaatgtgggcgaggcttttgtgacaagtcaaccctcattgtacatgagaggacacactcaggagagaagccttacgtgtgcagtgagtgtggccgaggctttagccggaaatcactcctccttgtccaccagaggacacactcaggggagaagcattatgtttgtagggagtgtgggcgaggctttagtcataagtcaaatctcatcagacaccagaggacacactgacgggagaaacctgtgtatgcaggggtcatgaacaagacctgagtgaccagtcaagcctcatgttaccccagagagacacatggggagtagaccctgtgtacacagattgtgagtgaagttccagagatgtgtcagcccttatcaggcatgggagggacacgttcaggagaggagccttatgagtatagagtacgggcaactgtagccatcagtcagccttgagcatgcacaaaaggacacacttaggagagaagtttatgtgtagggactgtgggaaggctttagcaataatcaacatttaccagacatccaatgacagcctcaggggaaagcacccttgtctggggagtgttggggagcatcagtaaaagaatggacactcaggcacagagtggccctcaggaaggaggtctttgtttgtaggatgtatgggcaaagcttttgtgatcacacaccacagggagaatctgcatgtggggacactgtggagctctgcccagatgaccttttcaggggtaacaccccagctgcttgagagaacagtgttgctgctggcagagatgcattccagagatgcactccgctctggaactcactctcagccacagggagctgcatgcaccacaggggcaatgcacctttgcaggggtaccttctggccccaacccttgactcaacggggacaactccagaaggtcattccagatccagagatccccatcgaactgaaggatcactgggttgcagacacattgcaggtcagcttcttcctctgcccagtcctgccctcactccccagtgaatcctcaattttctgtctcgttgtctgtccagataattgattctaagacatgttaggtatataaggagtgtagataaggcttcagccatgagtcaccccgcagtaagccccagagtatattgaatagaaattctgcatgtgtggggagaatggacaaggacttaggaaaaagtcctcatcaaagaacagcttttttgggacaagctttacatgggtggggagggaaaatgtgaaacacattagcaataagttaaacctcatcttgtactaaaggaggacacactcagggagaagacctctgtgggcagggcttgtgggtggagcttcatcccgatgtcactcctcaactgacttaggaggacagtcttgctaccccaagtcactacctcactcacctctgagggattttcaggaaatgtcttgactcccccatgtactctgtatgtgagcgaagatggcagtaactgttaaataagcattcttttctacttcttggaatcagatgaaataaaaaagcaggctttatttaagtaatcaaaaaa

SEQ ID NO: 101620 - DNA, 1028 bp, Artificial Sequence
  derived and/or modified sequence
cctttctgaaaggcctccagatcctctgcgaaggccccctgggctcccccggcggggcccgcagctctcccccgcgctgaatctgaggaactgggcccggaagctcgcgagtctcggtcctggcggttcgggcgggcgccccctgttggccaagttgggacttgccattgcggcaaaacctgcgattcggggcaggggcaggcagtggggggacagcctggaaccagaacgcgaaacccagcctcacggtccaccttctccaatccctgcctgctgggagaggacgatctcttgagaaaggaaagacttctgtgctcccgagaacttcctatcagtagaaccacagtccctcttcggacatgctgttctcagaacaaaagaaatggtggaattatgcaatgcttagaaatggcatcgtcgctttcactcacattcattttccaaggtcctggctgcagggaaacaagctgggctttttataattaaggttggaagaagtcaccacaggcagcagaactccatcttgagatgaaataacatctacctggacctctggcagaatttcaaggcacacactgggctgactctggcgccatgatgttgccttatccttcagcactgggagatcaatactgggaagagattttgcttccaaagaatggggaaaatgtagagactatgaagaaattgacccaaaatcataaagcgaaaggcttgccttctaatgatactgactgcccccagaaaaaggagggaaaggcccaaatagtggtaccagttacattcagggatgtgactgtgatcttcacagaagcagaatggaagagactgagtccagagcagaggaatctatacaaagaagtgatgctggagaattacaggaatcttctctcattggcagaaccaaagccagaaatctacacttgttcctcctgccttctggccttctcctgtcagcagttcctcagtcaacatgtacttcagatcttcctgggcttatgtgcagaaaatcacttccatccagggaa

SEQ ID NO: 101621 - protein, 101 aa, Artificial Sequence
  derived and/or modified sequence
MMLPYPSALGDQYWEEILLPKNGENVETMKKLTQNHKAKGLPSNDTDCPQKKEGKAQIVVPVTFRDVTVIFTEAEWKRLSPEQRNLYKEVMLENYRNLLSL

SEQ ID NO: 101622 - protein, 118 aa, Artificial Sequence
  derived and/or modified sequence
MMLPYPSALGDQYWEEILLPKNGENVETMKKLTQNHKAKGLPSNDTDCPQKKEGKAQIVVPVTFRDVTVIFTEAEWKRLSPEQRNLYKEVMLENYRNLLSLGQEIETILANIVKSHLY

SEQ ID NO: 101623 - DNA, 357 bp, Artificial Sequence
  derived and/or modified sequence
atgatgctgccctaccccagcgccctgggcgaccagtactgggaggagatcctgctgcccaagaacggcgagaacgtggagaccatgaagaagctgacccagaaccacaaggccaagggcctgcccagcaacgacaccgactgcccccagaagaaggagggcaaggcccagatcgtggtgcccgtgaccttcagagacgtgaccgtgatcttcaccgaggccgagtggaagagactgagccccgagcagagaaacctgtacaaggaggtgatgctggagaactacagaaacctgctgagcctgggccaggagatcgagaccatcctggccaacatcgtgaagagccacctgtactag

SEQ ID NO: 101624 - DNA, 306 bp, Artificial Sequence
  derived and/or modified sequence
atgatgctgccctaccccagcgccctgggcgaccagtactgggaggagatcctgctgcccaagaacggcgagaacgtggagaccatgaagaagctgacccagaaccacaaggccaagggcctgcccagcaacgacaccgactgcccccagaagaaggagggcaaggcccagatcgtggtgcccgtgaccttcagagacgtgaccgtgatcttcaccgaggccgagtggaagagactgagccccgagcagagaaacctgtacaaggaggtgatgctggagaactacagaaacctgctgagcctgtag

SEQ ID NO: 101625 - DNA, 357 bp, Artificial Sequence
  derived and/or modified sequence
atgatgctcccatatccaagcgccctgggagatcaatactgggaggaaattctgctgcccaagaatggcgagaatgtcgaaaccatgaagaaattaacccagaatcacaaagccaaagggctcccgagcaacgacaccgactgcccccagaaaaaggagggcaaagctcagattgtagtccctgtgacatttcgggatgttacagtgattttcacagaagcggagtggaagcgcctcagccccgagcagagaaatttgtataaagaagttatgttggagaactaccgcaaccttcttagcctgggccaggagattgagacaatcctggccaacattgtcaaatcacatctgtactag

SEQ ID NO: 101626 - DNA, 306 bp, Artificial Sequence
  derived and/or modified sequence
atgatgcttccctatccgagtgctctcggagatcagtattgggaggagatcctgctccccaaaaatggggagaatgttgagactatgaagaagttaacacagaatcataaagccaaaggcctgcccagcaacgacaccgattgtccacagaaaaaagaaggaaaggcgcaaatcgtggtgcccgttacgttccgggatgtgacagtaatctttacagaagcagagtggaagcgactgtctcccgaacagcgaaatctgtacaaagaggtgatgctcgaaaattaccggaatctactgagcctttag

SEQ ID NO: 101627 - DNA, 357 bp, Artificial Sequence
  derived and/or modified sequence
atgatgctgccctaccccagcgccctgggggaccagtactgggaggagatcctgctgcccaagaatggagaaaatgtggagaccatgaagaagctgacccagaaccacaaggccaagggcctgcccagcaatgacacagactgcccccagaagaaggagggcaaggcccagatcgtggtgcctgtgaccttcagagatgtgaccgtcatcttcacagaggccgagtggaagaggctgagccctgagcagaggaacctgtacaaggaggtgatgctggagaactacagaaacctgctgagcctgggccaggagattgagaccatcctggccaacatcgtgaagagccacctgtactag

SEQ ID NO: 101628 - DNA, 306 bp, Artificial Sequence
  derived and/or modified sequence
atgatgctgccctaccccagcgccctgggggaccagtactgggaggagatcctgctgcccaagaatggagaaaatgtggagaccatgaagaagctgacccagaaccacaaggccaagggcctgcccagcaatgacacagactgcccccagaagaaggagggcaaggcccagatcgtggtgcctgtgaccttcagagatgtgaccgtcatcttcacagaggccgagtggaagaggctgagccctgagcagaggaacctgtacaaggaggtgatgctggagaactacagaaacctgctgagcctgtag

SEQ ID NO: 101629 - DNA, 357 bp, Artificial Sequence
  derived and/or modified sequence
atgatgctgccctaccccagcgccctgggcgaccagtactgggaggaaatactcctgcctaagaacggtgaaaacgtggagaccatgaaaaagttaacacaaaatcacaaggctaagggcctaccttcaaacgataccgattgcccacaaaaaaaagagggtaaagcacaaatagtcgttccagtcacctttcgggatgttaccgttatcttcaccgaggccgaatggaaacgtctgtcacccgagcagagaaatctctataaagaagtcatgttggagaactatcgcaacctgctcagccttggccaggaaatcgagacaatcctggctaacattgttaagtcccatctgtactag

SEQ ID NO: 101630 - DNA, 306 bp, Artificial Sequence
  derived and/or modified sequence
atgatgctgccctaccccagcgccctgggcgaccagtactgggaggaaatcctccttccaaaaaatggagagaacgtggagaccatgaaaaagctgacacaaaaccacaaagccaagggcctgcccagcaacgataccgactgcccccagaaaaaagagggaaaagcccagattgttgttccggtgaccttcagggacgtcaccgtgatatttacagaggccgaatggaagagactttcacctgaacagcgtaacttgtacaaagaggtgatgttggaaaattataggaacctgctttcgctgtag

SEQ ID NO: 101631 - DNA, 357 bp, Artificial Sequence
  derived and/or modified sequence
atgatgctcccatatcctagtgctcttggagaccagtactgggaagagattcttctgcctaagaatggcgaaaacgtagaaactatgaagaaactcacacagaaccataaagcaaaggggctacccagcaacgataccgactgccctcagaaaaaagagggcaaggcgcagattgtggttcccgttacgttccgggacgtcacagtgatctttactgaagctgagtggaagagattatcaccagagcagaggaacctgtacaaagaggtgatgctagagaattacaggaatctgctttctctggggcaggagattgagactattctagcgaatatcgtgaagagccacctctactag

SEQ ID NO: 101632 - DNA, 306 bp, Artificial Sequence
  derived and/or modified sequence
atgatgcttccctacccatctgccctcggcgaccaatattgggaggagattctactgcccaaaaacggtgagaatgtggagaccatgaagaagctcacccaaaatcataaggctaagggccttcccagcaacgataccgattgtccacagaagaaggagggcaaagctcagattgtggttcccgtcacgttcagagacgtgacagtgatcttcaccgaagctgaatggaagcggctgagccccgaacaacgaaacctttacaaggaggtaatgctggaaaactaccgcaacctcctgtccttatag

SEQ ID NO: 101633 - DNA, 768 bp, Artificial Sequence
  derived and/or modified sequence
gattcggggcaggggcaggcagtggggggacagcctggaaccagaacgcgaaacccagcctcacggtccaccttctccaatccctgcctgctgggagaggacgatctcttgagaaaggaaagacttctgtgctcccgagaacttcctatcagtagaaccacagtccctcttcggacatgctgttctcagaacaaaagaaatggtggaattatgcaatgcttagaaatggcatcgtcgctttcactcacattcattttccaaggtcctggctgcagggaaacaagctgggctttttataattaaggttggaagaagtcaccacaggcagcagaactccatcttgagatgaaataacatctacctggacctctggcagaatttcaaggcacacactgggctgactctggcgccatgatgttgccttatccttcagcactgggagatcaatactgggaagagattttgcttccaaagaatggggaaaatgtagagactatgaagaaattgacccaaaatcataaagcgaaaggcttgccttctaatgatactgactgcccccagaaaaaggagggaaaggcccaaatagtggtaccagttacattcagggatgtgactgtgatcttcacagaagcagaatggaagagactgagtccagagcagaggaatctatacaaagaagtgatgctggagaattacaggaatcttctctcattgggtcaggagatcgagaccatcctggccaacatagtgaaatcccatctctactaa

SEQ ID NO: 101634 - DNA, 642 bp, Artificial Sequence
  derived and/or modified sequence
atcccgggcacgctggctctggtgagcgcggcctccgcggctccttggccccaggatgccctctctcgtggggaaaggagggtcgggaaaggccgagcgtaggtccaccttctccaatccctgcctgctgggagaggacgatctcttgagaaaggaaagacttctgtgctcccgagaacttcctatcaggtcctggctgcagggaaacaagctgggctttttataattaaggttggaagaagtcaccacaggcagcagaactccatcttgagatgaaataacatctacctggacctctggcagaatttcaaggcacacactgggctgactctggcgccatgatgttgccttatccttcagcactgggagatcaatactgggaagagattttgcttccaaagaatggggaaaatgtagagactatgaagaaattgacccaaaatcataaagcgaaaggcttgccttctaatgatactgactgcccccagaaaaaggagggaaaggcccaaatagtggtaccagttacattcagggatgtgactgtgatcttcacagaagcagaatggaagagactgagtccagagcagaggaatctatacaaagaagtgatgctggagaattacaggaatcttctctcattgg

SEQ ID NO: 101635 - protein, 292 aa, Artificial Sequence
  derived and/or modified sequence
MGEKSENCGVPEDLLNGLKVTDTQEAECAGPPVPDPKNQHSQSKLLRDDEAHLQEDQGEEECFHDCSASFEEEPGADKVENKSNEDVNSSELDEEYLIELEKNMSDEEKQKRREESTRLKEEGNEQFKKGDYIEAESSYSRALEMCPSCFQKERSILFSNRAAARMKQDKKEMAINDCSKAIQLNPSYIRAILRRAELYEKTDKLDEALEDYKSILEKDPSIHQAREACMRLPKQIEERNERLKEEMLGKLKDLGNLVLRPFGLSTENFQIKQDSSTGSYSINFVQNPNNNR

SEQ ID NO: 101636 - DNA, 879 bp, Artificial Sequence
  derived and/or modified sequence
atgggtgagaaatctgaaaactgcggcgtgcccgaggacctcctgaacggcctcaaggtgaccgatactcaagaggcagaatgcgcgggacctcccgtccctgaccctaagaaccagcactcacagtccaaactccttcgcgacgacgaggcgcatttacaggaggatcagggggaggaggagtgtttccatgactgcagtgcttccttcgaggaggaaccaggggctgacaaagtggagaacaagagcaatgaagatgttaattcaagcgaactcgatgaggaatacttaatcgagctagagaaaaacatgtccgatgaagagaaacagaaaaggcgagaagaaagcacaagactcaaggaggagggcaatgaacagtttaagaagggggactacatcgaggcagagtctagctatagcagggcccttgagatgtgcccctcttgttttcagaaggagcgctcaatcttgttctctaatcgggcagctgccaggatgaagcaagataagaaggaaatggccattaacgattgtagcaaagcgatccagcttaacccctcttacatccgggcaatcctgagacgggctgagctgtacgaaaagaccgacaaattagacgaggcgctagaggactacaagagtattctcgagaaagacccaagcattcaccaggctcgcgaggcgtgcatgcgactgcctaagcaaattgaggaaagaaacgagagactgaaggaggagatgctggggaagttgaaggatttagggaaccttgtgctgagaccttttggtctcagtactgagaatttccagattaagcaggactcgagcaccggttcatacagtatcaatttcgttcagaaccccaataacaaccgatag

SEQ ID NO: 101637 - DNA, 879 bp, Artificial Sequence
  derived and/or modified sequence
atgggcgagaagagcgagaactgcggcgtgcccgaggacctgctgaacggcctgaaggtgaccgacacccaggaggccgagtgcgccggcccccccgtgcccgaccccaagaaccagcacagccagagcaagctgctgagagacgacgaggcccacctgcaggaggaccagggcgaggaggagtgcttccacgactgcagcgccagcttcgaggaggagcccggcgccgacaaggtggagaacaagagcaacgaggacgtgaacagcagcgagctggacgaggagtacctgatcgagctggagaagaacatgagcgacgaggagaagcagaagagaagagaggagagcaccagactgaaggaggagggcaacgagcagttcaagaagggcgactacatcgaggccgagagcagctacagcagagccctggagatgtgccccagctgcttccagaaggagagaagcatcctgttcagcaacagagccgccgccagaatgaagcaggacaagaaggagatggccatcaacgactgcagcaaggccatccagctgaaccccagctacatcagagccatcctgagaagagccgagctgtacgagaagaccgacaagctggacgaggccctggaggactacaagagcatcctggagaaggaccccagcatccaccaggccagagaggcctgcatgagactgcccaagcagatcgaggagagaaacgagagactgaaggaggagatgctgggcaagctgaaggacctgggcaacctggtgctgagacccttcggcctgagcaccgagaacttccagatcaagcaggacagcagcaccggcagctacagcatcaacttcgtgcagaaccccaacaacaacagatag

SEQ ID NO: 101638 - DNA, 879 bp, Artificial Sequence
  derived and/or modified sequence
atgggcgagaagagcgaaaactgcggagtcccggaggacctcctgaacggacttaaggttacagatacgcaggaagccgagtgtgccggcccacctgtccccgaccctaaaaaccaacattcccagagtaaactgctgagagacgacgaggctcatctccaggaggatcagggcgaagaagaatgcttccatgattgcagcgctagctttgaggaagagccaggggccgataaggtcgaaaataagtcaaatgaagatgttaactctagcgagctggacgaggagtacctaattgaacttgagaaaaatatgtctgatgaggagaagcaaaaacgcagagaagagagtactagactgaaggaggaaggcaacgaacaatttaaaaaaggtgactacatagaagctgagtcctcttattctcgagccctggagatgtgtccctcctgtttccagaaggagcgtagtattctgttctctaacagagctgcagcacgcatgaagcaggataaaaaggagatggccataaacgactgtagcaaggctatacagctgaatccgtcctacattagagcaattctgagaagggcagaattgtacgagaaaaccgataagttggacgaggctctggaggattataagagcattctcgaaaaggacccctccatccaccaggcccgcgaagcctgcatgaggttgcctaaacagatcgaggagaggaatgagaggctgaaagaggagatgttgggtaagcttaaggaccttggaaatctggtcctgcgccccttcggcctttcaacagaaaacttccagataaaacaggactcgagtactgggagctactcaatcaattttgtgcagaaccccaacaacaatcggtag

SEQ ID NO: 101639 - DNA, 879 bp, Artificial Sequence
  derived and/or modified sequence
atgggagagaagtctgagaactgtggggtgcctgaggacctgctgaatggcctgaaggtgacagacacccaggaggctgaatgtgccggcccccctgtgcctgaccccaagaaccagcacagccagagcaagctgctgagagatgatgaggcccacctgcaggaggaccagggcgaggaggagtgcttccatgactgcagcgccagctttgaggaggagcccggggctgacaaggtggagaacaagagcaatgaagatgtgaacagcagcgagctggatgaggagtacctgattgagctggagaagaacatgtctgatgaggagaagcagaagaggcgggaggagagcacccggctgaaggaggagggcaatgagcagttcaagaagggggactacattgaagctgagagcagctacagccgggccctggagatgtgccccagctgcttccagaaggagaggagcatcctcttcagcaacagagctgctgccaggatgaagcaggacaagaaggagatggccatcaatgactgcagcaaggccatccagctgaaccccagctacatccgggccatcctgcggcgggcagagctgtatgagaagacagacaagctggatgaggccctggaggactacaagagcatcctggagaaggaccccagcatccaccaggcccgggaggcctgcatgaggctgcccaagcagatcgaggagagaaatgaaaggctgaaggaggagatgctgggcaagctgaaggacctgggcaacctggtgctgcggcccttcggcctgagcacagagaacttccagatcaagcaggacagcagcacaggcagctacagcatcaactttgtgcagaaccccaacaacaacagatag

SEQ ID NO: 101640 - DNA, 879 bp, Artificial Sequence
  derived and/or modified sequence
atgggcgagaagagcgagaactgcggcgtgcccgaggacctgctgaatggactgaaggtgaccgacacccaggaagccgagtgtgctggccctcctgtcccagatccaaaaaaccagcactcacaaagcaagctgttgagagatgacgaggcacatcttcaagaagatcagggagaggaggagtgctttcacgattgttccgctagtttcgaagaggaaccaggtgcagataaggttgaaaacaaaagcaatgaagatgtgaacagttccgagctcgacgaggaatacctgatcgaactcgagaagaatatgagtgacgaggagaaacagaagaggagagaagagtcaacgcgccttaaagaggaggggaacgaacagtttaagaagggggactacatcgaagccgagtcgtcctactcccgcgccttggagatgtgcccttcatgttttcagaaagagcgtagcatccttttctccaacagagcggccgctcgaatgaagcaggataagaaggaaatggccattaatgattgttctaaggcgatccagctgaacccctcctacattagggccattctgaggcgggccgaactgtacgaaaagactgacaaacttgatgaagcgttagaggactataaatccatcctggaaaaagacccctcaattcatcaggcccgagaggcctgtatgcgcctgccaaagcagatcgaagaacggaatgaaagacttaaggaagaaatgctcggaaagctcaaggacctggggaacctggtgctgagacctttcggactgtccaccgagaatttccagatcaagcaagatagtagtaccggttcatactcaatcaattttgtccagaaccccaacaataaccggtag

SEQ ID NO: 101641 - DNA, 879 bp, Artificial Sequence
  derived and/or modified sequence
atgggcgaaaagtcagagaattgtggagttcccgaggatctcctgaatggtctgaaggtaacagacacccaagaggctgagtgcgcagggccccctgtgcctgacccaaagaatcaacattctcagtcaaaactgctgagggatgatgaagcacacctacaggaagaccagggcgaagaggaatgttttcatgattgttctgccagctttgaggaggaacctggggccgacaaagtcgagaacaaaagcaatgaggacgtcaacagcagcgagctcgatgaggagtatttgatcgagctcgaaaaaaatatgtctgacgaggaaaagcaaaagaggcgtgaagagtccacacgactgaaagaggagggtaacgaacagttcaaaaaaggggattatattgaggcagagtctagctactcacgcgccctcgagatgtgcccttcatgtttccagaaggagcggtctattctgtttagcaatagggccgcggctaggatgaaacaggacaaaaaagaaatggcgatcaacgattgttctaaggctatccagcttaacccttcatatattcgcgccattctcagaagagctgagttgtacgagaaaaccgataaactggacgaggctctggaggattataagtccattttagagaaagatcccagcatccaccaggctcgggaagcttgcatgaggttgccaaagcaaatagaggagcgcaatgagagactgaaggaggaaatgttgggcaagttgaaagatctgggaaacctggtgctgcggccattcggactcagcactgagaatttccagataaagcaggattcctccaccggtagttacagcattaatttcgtacagaatcccaataataacaggtag

SEQ ID NO: 101642 - DNA, 879 bp, Artificial Sequence
  derived and/or modified sequence
atgggcgagaagagcgagaactgcggcgtgcccgaggacctgctgaacgggctgaaggtcacagacactcaggaggctgaatgcgccggtcccccagtccctgatcccaagaaccagcacagccagagcaaattgctgagggacgacgaggcgcacctccaagaggaccagggtgaggaggaatgctttcacgattgttctgcttcctttgaagaggaacctggtgcagacaaggtggaaaataaaagtaacgaggacgttaacagctcagagctggatgaggagtatctaattgaactggagaagaatatgtccgacgaggaaaaacaaaaacgccgtgaagaaagcactaggctgaaagaagaggggaatgaacagttcaaaaagggggactatatcgaggcagagtctagctattccagagccctcgaaatgtgcccatcctgttttcagaaagaacgcagcatcctcttcagtaacagagccgccgcccgcatgaagcaggacaagaaagagatggctatcaatgattgttcgaaggccattcaactcaatccttcctatatcagagcaattctgcgtcgggccgagctatacgaaaagaccgataagctggacgaagcgttagaggattataaatctatccttgaaaaggacccaagcattcatcaggcacgggaagcatgtatgagactgccaaagcagatcgaagagaggaacgagaggctgaaggaagaaatgttgggtaagctgaaggacttgggcaatctggtcctcagaccattcggacttagtacagagaatttccagattaagcaagactcctcaacaggaagctattctatcaacttcgtccagaaccctaataataataggtag

SEQ ID NO: 101643 - DNA, 879 bp, Artificial Sequence
  derived and/or modified sequence
atgggggaaaagtccgagaactgcggcgtgccggaagacctgctcaatggtcttaaagtgacagacactcaggaggctgagtgcgcaggtccacctgtgccagatcctaaaaaccagcactcacagagcaaactactgcgggacgacgaagcccaccttcaggaggatcagggagaagaagaatgttttcatgattgctctgcgtcgtttgaggaagaaccaggcgcagacaaagtcgaaaacaagtcaaacgaggatgtgaactcaagtgagctggatgaagaatacttgatcgaactggagaaaaacatgagcgacgaagagaaacagaaaaggcgcgaggagtcaacccgcctgaaagaggaggggaatgagcagttcaaaaagggcgactacattgaagcggagtcttcttacagcagggctctggaaatgtgtcccagttgctttcagaaggagaggagcattctgttcagtaacagggccgctgctcgcatgaaacaggataaaaaggaaatggccatcaacgactgtagcaaggccatacaattgaacccgtcctacatccgcgctattctccgtagagccgagctttatgagaaaacggataagttagatgaagccctggaagattataagtcaattctggagaaggacccttccattcatcaagcgagagaagcatgtatgagactgcccaagcaaatcgaggagcggaacgaacggctgaaggaagagatgctgggtaaactgaaagacctgggaaatttagttttgaggccctttggactgtcaacagagaactttcaaatcaaacaggactctagcacaggttcatacagtattaacttcgtccagaaccccaataacaatcggtag

SEQ ID NO: 101644 - DNA, 1435 bp, Artificial Sequence
  derived and/or modified sequence
atcgacggaagtgcacctgactgagcggaagtaggagctctcagaggctaagaaggtggagaccggagaagctgtgaggttctttagcgtcacctccctcactgggcagcatgggggagaagtcagagaactgtggggttccagaggatctgttaaatggtttgaaggttacagatactcaggaagccgagtgtgctggccctccagttcctgatcccaaaaatcagcattcccagagtaagctgctcagggatgatgaggcccatctccaggaggaccagggagaagaggagtgttttcatgactgcagtgcctcatttgaggaggagccaggagcggacaaggttgagaacaaatctaatgaagatgtgaattcctctgaactagatgaagaatacctaatagaactggaaaaaaacatgtcggatgaagagaaacagaaaagaagagaagagagcactagactaaaggaggagggaaatgaacagtttaagaaaggagattatatagaagctgaaagttcttatagtcgagccctcgaaatgtgcccatcctgcttccaaaaggagaggtcgattctattttcaaatagagctgcagcaaggatgaaacaggacaagaaagaaatggccatcaatgactgcagcaaagcaattcaattaaaccccagctatatcagggcaatattgaggagagcagagttgtatgagaagacggacaagctagatgaagccctggaagactataaatctatattagaaaaagatccatcaatacatcaagcaagagaagcttgtatgagattacctaagcaaattgaagaacgtaatgaaagactaaaagaagagatgttaggtaaattaaaagatcttgggaacttggttctccgaccttttgggctctccacggaaaatttccagatcaaacaggattcctctaccggctcgtactccatcaatttcgttcaaaatccaaataataacagataacaaagataacaaaagctttacaagctgacttggaattgtgtgctgcttgctgttagctaggggaaaggccctgccaatgtttaacttttaaaagcatcttatctaaaagaaaggctatccagtagagcccagtgctcccttgtccctcttttatgatcagggtgaaatgtacttcctgatgtaatgaacctaatttgatttccattttaaggtggtgtctgtgcagctggtgtccccgattctggctgtcctatgtccaggaagaagcccatttgttgaggctgaccttcctgatcatacacacacacagcccagcaaaagcctctcctgaaccaaacaaacctgttggttgggagactgcccagacatgattgatgacgggttcccgcctgctgtcccctccctgatcacacagctaacgaggctgcctccagcatttcctgatt

SEQ ID NO: 101645 - DNA, 1432 bp, Artificial Sequence
  derived and/or modified sequence
atcgacggaagtgcacctgactgagcggaagtaggagctctcagaggctaagaaggtggagaccggagaagctgtgagctttagcgtcacctccctcactgggcagcatgggggagaagtcagagaactgtggggttccagaggatctgttaaatggtttgaaggttacagatactcaggaagccgagtgtgctggccctccagttcctgatcccaaaaatcagcattcccagagtaagctgctcagggatgatgaggcccatctccaggaggaccagggagaagaggagtgttttcatgactgcagtgcctcatttgaggaggagccaggagcggacaaggttgagaacaaatctaatgaagatgtgaattcctctgaactagatgaagaatacctaatagaactggaaaaaaacatgtcggatgaagagaaacagaaaagaagagaagagagcactagactaaaggaggagggaaatgaacagtttaagaaaggagattatatagaagctgaaagttcttatagtcgagccctcgaaatgtgcccatcctgcttccaaaaggagaggtcgattctattttcaaatagagctgcagcaaggatgaaacaggacaagaaagaaatggccatcaatgactgcagcaaagcaattcaattaaaccccagctatatcagggcaatattgaggagagcagagttgtatgagaagacggacaagctagatgaagccctggaagactataaatctatattagaaaaagatccatcaatacatcaagcaagagaagcttgtatgagattacctaagcaaattgaagaacgtaatgaaagactaaaagaagagatgttaggtaaattaaaagatcttgggaacttggttctccgaccttttgggctctccacggaaaatttccagatcaaacaggattcctctaccggctcgtactccatcaatttcgttcaaaatccaaataataacagataacaaagataacaaaagctttacaagctgacttggaattgtgtgctgcttgctgttagctaggggaaaggccctgccaatgtttaacttttaaaagcatcttatctaaaagaaaggctatccagtagagcccagtgctcccttgtccctcttttatgatcagggtgaaatgtacttcctgatgtaatgaacctaatttgatttccattttaaggtggtgtctgtgcagctggtgtccccgattctggctgtcctatgtccaggaagaagcccatttgttgaggctgaccttcctgatcatacacacacacagcccagcaaaagcctctcctgaaccaaacaaacctgttggttgggagactgcccagacatgattgatgacgggttcccgcctgctgtcccctccctgatcacacagctaacgaggctgcctccagcatttcctgatt

SEQ ID NO: 101646 - protein, 674 aa, Artificial Sequence
  derived and/or modified sequence
MTTDDTEVPAMTLAPGHAALETQTLSAETSSRASTPAGPIPEAETRGAKRISPARETRSFTKTSPNFMVLIATSVETSAASGSPEGAGMTTVQTITGSDPREAIFDTLCTDDSSEEAKTLTMDILTLAHTSTEAKGLSSESSASSDSPHPVITPSRASESSASSDGPHPVITPSRASESSASSDGPHPVITPSRASESSASSDGPHPVITPSRASESSASSDGPHPVITPSRASESSASSDGPHPVITPSRASESSASSDGPHPVITPSRASESSASSDGPHPVITPSRASESSASSDGPHPVITPSRASESSASSDGLHPVITPSRASESSASSDGPHPVITPSRASESSASSDGPHPVITPSWSPGSDVTLLAEALVTVTNIEVINCSITEIETTTSSIPGASDTDLIPTEGVKASSTSDPPALPDSTEAKPHITEVTASAETLSTAGTTESAAPDATVGTPLPTNSATEREVTAPGATTLSGALVTVSRNPLEETSALSVETPSYVKVSGAAPVSIEAGSAVGKTTSFAGSSASSYSPSEAALKNFTPSETPTMDIATKGPFPTSRDPLPSVPPTTTNSSRGTNSTLAKITTSAKTTMKPPTATPTTARTRPTTDVSAGENGGFLLLRLSVASPEDLTDPRVAERLMQQLHRELHAHAPHFQVSLLRVRRG

SEQ ID NO: 101647 - protein, 709 aa, Artificial Sequence
  derived and/or modified sequence
MGCLWGLALPLFFFCWEVGVSGSSAGPSTRRADTAMTTDDTEVPAMTLAPGHAALETQTLSAETSSRASTPAGPIPEAETRGAKRISPARETRSFTKTSPNFMVLIATSVETSAASGSPEGAGMTTVQTITGSDPREAIFDTLCTDDSSEEAKTLTMDILTLAHTSTEAKGLSSESSASSDSPHPVITPSRASESSASSDGPHPVITPSRASESSASSDGPHPVITPSRASESSASSDGPHPVITPSRASESSASSDGPHPVITPSRASESSASSDGPHPVITPSRASESSASSDGPHPVITPSRASESSASSDGPHPVITPSRASESSASSDGPHPVITPSRASESSASSDGLHPVITPSRASESSASSDGPHPVITPSRASESSASSDGPHPVITPSWSPGSDVTLLAEALVTVTNIEVINCSITEIETTTSSIPGASDTDLIPTEGVKASSTSDPPALPDSTEAKPHITEVTASAETLSTAGTTESAAPDATVGTPLPTNSATEREVTAPGATTLSGALVTVSRNPLEETSALSVETPSYVKVSGAAPVSIEAGSAVGKTTSFAGSSASSYSPSEAALKNFTPSETPTMDIATKGPFPTSRDPLPSVPPTTTNSSRGTNSTLAKITTSAKTTMKPPTATPTTARTRPTTDVSAGENGGFLLLRLSVASPEDLTDPRVAERLMQQLHRELHAHAPHFQVSLLRVRRG

SEQ ID NO: 101648 - DNA, 2025 bp, Artificial Sequence
  derived and/or modified sequence
atgaccactgacgatactgaggtgcctgccatgaccttggcaccgggtcatgcagcactggaaacccagacgctgtctgctgagacatcctcacgcgcttccaccccggcagggcctatacccgaagccgaaactagaggggctaagcgaatctccccagccagagagacccgctcatttactaagacttcccccaacttcatggtgctcatagcaacatccgtagagacatccgcagcatccggatcccctgaaggagctggaatgaccacagtgcagaccatcacaggcagcgatccacgggaagctatcttcgataccctttgcactgacgacagcagcgaagaagcgaagaccctgaccatggacatcctcaccctggctcacacatccacggaagccaagggtttgtcttctgaatcctcggcctcttctgactcaccccaccctgtcataactccaagccgcgcttcagagtctagcgcgtcctctgatggcccacatcccgtcattactccgtcacgggcaagtgaaagtagcgcctcgtccgacggcccacaccctgtgatcactccatctcgggcaagcgaatcaagcgcctctagtgacggccctcatccggtcattactccttcgagagcaagcgaaagctccgctagttctgatgggcctcacccagtcatcacaccttcccgcgcttcagaatcttctgctagcagcgatggaccgcaccctgtgattactcctagcagggctagcgagtcttcagcaagctccgacggcccacatccagtgattaccccctcccgtgcgagcgagagctccgcctcctctgatgggccacatcctgttatcaccccttcccgcgcaagtgaatcctcagcatcctcagacggccctcatcccgtgattactccatctcgagcgagcgagagctcagcaagttctgacggccttcaccctgtgatcacccccagcagggctagcgagtcctccgcctccagcgacgggccacacccggttatcacaccatcgcgcgcttctgaaagctcagcaagcagtgacggcccacacccagtgataacccccagttggtctccaggttccgacgtcaccctgctcgccgaggctctggtcaccgtgactaacatcgaagttatcaattgcagtatcacagaaattgagactaccacctcaagcattcccggagcttctgacacagacctgatacccacagaaggggtgaaggcatcttcaacttccgatccgccagcgctgcctgatagcactgaagccaagccccacattacggaggtgactgcctcagccgagaccctgagtaccgcaggcaccactgagagcgctgcaccagacgctacagtgggcacgcctctacccactaatagtgccacggaaagggaagtaaccgctcccggagccaccactctgtccggagccctcgtgaccgtgtccaggaacccccttgaggagacctcagccttgagcgtcgagacgccttcctacgtcaaggtttccggtgctgctcccgtgtcaatcgaggcaggttccgctgtgggcaagaccaccagcttcgccggtagcagcgcatcatcttactctccctcggaagctgctctgaaaaacttcacaccgagtgaaaccccaacaatggatattgccactaagggaccattcccaacctcgcgggaccccctgcccagcgtgccaccgacaaccaccaactcctcacgtgggacaaactcgacactggctaagattactacatcggccaagactacgatgaaaccaccaacggccaccccgaccacagctcgcacacgaccaactacagatgtctccgccggagaaaacgggggttttctgttgcttaggttgagcgtcgcaagcccagaagacctgaccgatcctagggtggcggagaggttgatgcagcagttgcaccgggagttacacgcgcacgcaccccatttccaggtttccttacttcgcgtacgcagaggatag

SEQ ID NO: 101649 - DNA, 2130 bp, Artificial Sequence
  derived and/or modified sequence
atggggtgcctgtgggggctagctctgcccctcttcttcttctgctgggaggttggagtctcagggagcagcgctggtccatctactcgtagggcagatacagcaatgacgaccgacgataccgaagtgccagccatgaccttggctcctgggcacgcagcgctggaaacacagaccttaagcgcggagacttcctctcgtgcctccacccccgcaggaccaatccccgaggccgaaaccagaggagcgaaacgcatctctccagctcgggaaactaggtcctttaccaagaccagcccaaatttcatggtcctgatcgccacttcagtggagacaagcgctgcctcaggaagcccagagggggctggaatgacaacagtgcaaacaattacaggctccgacccccgtgaggccatctttgacactctgtgcaccgatgacagcagtgaggaggcgaagacactgaccatggacatcctgactctcgcccatacttcaaccgaggccaaaggtctttctagtgagtcttccgcgagctcagacagtccacatcctgtaataacccccagccgagctagcgagtcctcggcgtccagcgatgggccacaccccgtgattaccccctctcgggcttccgagtcctccgcttcctctgatgggcctcaccctgtgatcacaccatctcgggcatccgagtcaagtgcgtccagcgatggaccgcacccagttatcactccaagccgagcctccgaatcttctgccagttccgacggtccacaccccgtgataactccctcacgcgctagcgagtcatccgcatcttccgatgggcctcatccggttatcaccccttcgagagcatctgagagctctgcatctagtgatgggcctcatccagtgataacacctagtagggccagtgaaagcagtgcctcttcagatggtccccatcctgtcatcacaccatcaagagcctcagaatcttctgcttcatcggacggccctcacccagtcattacacctagccgcgctagcgaatcaagtgcctcgagcgatggcttgcacccagtaattaccccatctagagctagcgagtcatctgcaagctcagacgggcctcacccagtaatcaccccatctagagccagtgagtccagcgcatcttctgatggacctcaccctgtgatcactccttcttggtccccaggttcggatgtgaccttgctagccgaggctctggtaacggttacaaatatcgaggtcataaactgttcaattacagagatagagacaacaaccagttccattcctggggcttccgacacagacttgatccctacagaaggcgtgaaggctagttccactagtgatcctcccgctctccctgactctacagaggccaagcctcacataaccgaagtcacagcaagcgcagaaacactgtcaactgccggtacaaccgaaagtgccgctcccgacgccaccgtgggcacgcccctccctacgaattctgcaacagaacgcgaggtgaccgctcccggtgcgacaaccctttcaggagcacttgttacagtcagcaggaatccgctggaggagactagcgccctgtccgtagaaaccccaagctacgtcaaggtgagcggggctgctccagtgagcatcgaagccggaagcgctgtcggaaagacaacttcctttgccggatcttcagcttcttcttattctccctcagaggccgctctgaagaattttacaccaagtgagacacccaccatggacatagctacaaagggaccctttcccaccagcagagacccactgcctagcgtccccccaactactaccaactcttcacggggaactaactcaactctcgcaaaaattacaacttccgccaagactacaatgaagccaccaaccgcaacacctactacagccaggaccaggccaacaacggacgtgtcagcgggagaaaacgggggattcctgcttcttaggttatcggtcgcgagccccgaggacctgaccgaccctcgggtcgcagagaggttgatgcagcagttgcaccgggaactgcacgcgcacgctccccattttcaggtgagcctgctgcgagtgaggcgcggatag

SEQ ID NO: 101650 - DNA, 2025 bp, Artificial Sequence
  derived and/or modified sequence
atgacaaccgacgacaccgaggtgcctgccatgactctagctcctggccatgccgccctggagacccaaacactatcagccgaaacctcttccagagcgtcgactcctgctggaccgatccccgaagcagagactcggggcgctaagcgaatttccccggcccgcgagacccgttcgttcaccaaaactagccccaattttatggtattgatcgcaacttcagtcgagacatccgccgccagtggtagtcccgaaggggcaggtatgaccacagtccagacaattactgggtcagacccaagggaagccatttttgacacactgtgtacagacgattcctccgaggaggccaagacgttgaccatggacatccttaccttggctcacacctccaccgaggccaagggccttagtagtgagtcatcagctagctctgactctcctcaccccgtcatcaccccttcccgagcgagtgagagcagtgcgtcttccgatggaccccaccctgttattactccatctagagcctctgagtcctcggcatcttcagatggtccccacccagttattaccccttccagagcgtcggagtcatccgctagcagtgacggtccccaccccgtgattactcccagtagggccagcgaaagcagtgcatccagcgacgggccacatcccgtgatcacgccaagccgtgccagtgagtcaagcgcgagttcagacggccctcaccctgtgatcacaccatcaagagcaagcgaatcaagtgcatccagtgatgggccccatccagtaatcacaccaagtagggcttctgaatcttccgcaagttcagacggaccccatccagttattacaccttctcgcgcaagcgaaagttccgcctcttccgacggccctcacccagtaataacaccttcccgggcttctgaatcctccgccagtagtgacggactgcatccggtgatcacgccatcacgagcctctgagagctccgcatcttcagacggacctcacccagttatcaccccctctagggccagcgaatcctcagcgtcctctgacggcccccaccctgtgattacacccagctggtcacctggctctgacgtgacactgctggccgaggccctcgttaccgttacgaatatcgaagttattaattgctctatcaccgaaattgaaaccacgacgtcttctattcctggagcatccgataccgacctgatccctaccgagggagtcaaggctagttccacgtctgatccccctgcactgcccgacagcaccgaagccaagccgcatattacggaagttaccgccagtgccgaaacactctccactgcagggacaacagaatccgccgcaccagatgccactgtgggtacacccctccctacgaactcggccaccgaacgcgaagtgaccgcccccggcgccacaacactctcaggtgctctagtgaccgttagccgtaaccccctggaggagacaagcgccctctctgtggaaactccttcttacgtgaaagtgtcaggggccgctcccgtgagtatcgaggccggttccgctgttggcaaaacaacctccttcgcgggtagttctgcttcttcatattcaccctctgaggcagctcttaaaaatttcacaccgtccgagacgccgactatggacatagccaccaagggtccattccctaccagccgggacccccttccttctgttccgcccacgaccacaaactcctctcgtggtaccaactcaaccctggccaagattacaactagcgctaagacaacgatgaagccaccaacagccacaccaacaactgccaggacgcgccccactactgacgtgagcgcgggggagaatggcggttttctattgctgcggctatcagtggcaagcccagaggacctaaccgatcctagagtagctgagcgactgatgcaacagctacacagagagcttcacgcccatgcccctcactttcaggtctcacttttgagagttcgtagaggctag

SEQ ID NO: 101651 - DNA, 2130 bp, Artificial Sequence
  derived and/or modified sequence
atggggtgcctgtgggggctggctctgccattattctttttctgctgggaggtcggcgtatccggctctagcgcaggaccttccaccagacgagccgatacagctatgactacagacgacacagaagtccctgcaatgacactcgcacccggccatgccgctctagagacgcagacactttctgccgagacatcttctcgtgctagcaccccagccggtccgatccctgaagctgagacaagaggagcaaaaagaatttcgcctgcacgtgaaaccaggagctttacgaaaacttcccccaatttcatggtgcttatagctacgtccgtggagacgtctgccgcatcaggctcccctgagggagctggcatgaccactgttcagactataacgggcagcgacccacgcgaagccattttcgacactctgtgtaccgacgattctagtgaggaggccaagaccctgactatggacattctcaccctagcacacacatcaacagaagcaaagggcctaagttctgagtcctccgccagtagtgacagccctcatccagttattactccatccagggcaagcgagagctccgcatctagcgacgggccacacccggtcataacccccagtcgagcttccgaatccagtgcttcatccgatggaccacacccagtgattacaccgtcccgggcctctgaatccagcgcttctagcgacggcccccatcccgtcatcacgccaagtcgcgctagtgagagctcagcatcgtctgacgggccgcatcccgtgattaccccctcccgggcttccgaaagcagtgcaagctccgatggacctcacccggtcatcacaccaagtcgtgcctctgagagtagtgcctcttcagacggacctcacccagtcatcacaccgagcagagcttccgagagctcagctagctccgatgggccccaccctgtcataacaccatcacgggcatccgagtccagtgccagctctgacgggcctcatcccgtgataacaccatctagggcctctgagtcatcggcctcttccgatggcctgcatcccgttataaccccttcaagagcgtccgagtcttctgctagctctgacggcccacaccccgttatcaccccctctagggccagcgaaagctcagcaagctctgacgggccccatcctgtaattacaccctcttggtcccccggctctgatgtgactctgttggccgaggcgctggtcaccgtcaccaatattgaggtgattaactgcagcattacagaaattgaaactactacctccagcattcccggcgcttcagatactgacctgattcctactgaaggggtaaaagcgagctccacgtctgacccccctgcattaccggactccacggaggcaaaaccacatataactgaggtaacagcctcggccgaaactcttagcacagcgggaacgacagagtccgcggcacctgacgctactgtgggcacacctcttccaacaaattccgccacagaacgagaggtgaccgcgcctggcgcaaccactctgtctggggccctggtgactgttagccggaatcctttagaggagaccagcgctctctccgtcgagaccccctcctatgtcaaggtaagcggcgctgcgcccgtcagcatagaggcaggcagtgctgtggggaaaacgactagtttcgccggatcgagcgcctcatcatactcacctagcgaagctgccctcaagaatttcacaccatccgagaccccgactatggacatcgccaccaagggccccttccccacaagcagggaccccttacctagcgtcccccccactacgacgaacagctccaggggaaccaactcaacccttgcaaagatcacgactagcgccaagacaactatgaagccccctactgctactccaacgaccgcacgcacaagacccacaaccgatgttagcgcgggagagaacggagggtttcttttacttcgactaagtgtggcctcccctgaggacctgacagacccaagggtggcagagaggctcatgcaacagttacacagggaactgcatgctcatgctccccatttccaagttagtcttcttagggttcgacgaggatag

SEQ ID NO: 101652 - DNA, 2842 bp, Artificial Sequence
  derived and/or modified sequence
ggcctttctcgtcttttaagggtttttacttccatggggaactatgtgttggatgagaaaagtatccggggaaggggacagaggttcagaaagctctgcgagtcctggacgctggtctgccttcttggctcaccctggaaggtggacgctggccccacacatcccctcttaaagacgcaggccgatagccagcagatcctggggcttgctggccccaagtgagttgtcagggtttcagaggacaccagtcatggcaaccccagctccatggctgccacacaggcctgggcttcccaggactgcctccttcttgttcgcttatgtagatgaaaaatgaggtaacggcactcccctgccccaccctcctcccagaagtgcccagggtgtaaacgcaatagcttgtgtgaagtccactggaacccaggctcaccaagtcagtcttaaccaacacaggccccagcacccgcagagcagacactgcgatgacaacggacgacacagaagtgcccgctatgactctagcaccgggccacgccgctctggaaactcaaacgctgagcgctgagacctcttctagggcctcaaccccagccggccccattccagaagcagagaccaggggagccaagagaatttcccctgcaagagagaccaggagtttcacaaaaacatctcccaacttcatggtgctgatcgccacctccgtggagacatcagccgccagtggcagccccgagggagctggaatgaccacagttcagaccatcacaggcagtgatcccagggaagccatctttgacaccctttgcaccgatgacagctctgaagaggcaaagacactcacaatggacatattgacattggctcacacctccacagaagctaagggcctgtcctcagagagcagcgcctcttccgacagcccccatccagtcatcaccccgtcacgggcctcagagagcagcgcctcttccgacggcccccatccagtcatcaccccgtcacgggcctcagagagcagcgcctcttccgacggcccccatccagtcatcaccccgtcacgggcctcagagagcagcgcctcttccgacggcccccatccagtcatcaccccgtcacgggcctcagagagcagcgcctcttccgacggcccccatccagtcatcaccccgtcacgggcctcagagagcagcgcctcttccgacggcccccatccagtcatcaccccgtcacgggcctcagagagcagcgcctcttccgacggcccccatccagtcatcaccccgtcacgggcctcagagagcagcgcctcttccgacggcccccatccagtcatcaccccgtcacgggcctcagagagcagcgcctcttccgacggcccccatccagtcatcaccccgtcacgggcctcagagagcagcgcctcttccgacggcctccatccagtcatcaccccgtcacgggcctcagagagcagcgcctcttccgacggcccccatccagtcatcaccccgtcacgggcctcagagagcagcgcctcttccgacggcccccatccagtcatcaccccctcatggtccccgggatctgacgtcactctcctcgctgaagccctggtgactgtcacaaacatcgaggttattaattgcagcatcacagaaatagaaacaacgacttccagcatccctggggcctcagacacagatctcatccccacggaaggggtgaaggcctcgtccacctccgatccaccagctctgcctgactccactgaagcaaaaccacacatcactgaggtcacagcctctgccgagaccctgtccacagccggcaccacagagtcagctgcacctgatgccacggttgggaccccactccccactaacagcgccacagaaagagaagtgacagcacccggggccacgaccctcagtggagctctggtcacagttagcaggaatccccttgaagaaacctcagccctctctgttgagacaccaagttacgtcaaagtctcaggagcagctccggtctccatagaggctgggtcagcagtgggcaaaacaacttcctttgctgggagctctgcttcctcctacagcccctcggaagccgccctcaagaacttcaccccttcagagacaccgaccatggacatcgcaaccaaggggcccttccccaccagcagggaccctcttccttctgtccctccgactacaaccaacagcagccgagggacgaacagcaccttagccaagatcacaacctcagcgaagaccacgatgaagcccccaacagccacgcccacgactgcccggacgaggccgaccacagacgtgagtgcaggtgaaaatggaggtttcctcctcctgcggctgagtgtggcttccccggaagacctcactgaccccagagtggcagaaaggctgatgcagcagctccaccgggaactccacgcccacgcgcctcacttccaggtctccttactgcgtgtcaggagaggctaacggacatcagctgcagccaggcatgtcccgtatgccaaaagagggtgctgcccctagcctgggcccccaccgacagactgcagctgcgttactgtgctgagaggtacccagaaggttcccatgaagggcagcatgtccaagcccctgaccccagatgtggcaacaggaccctcgctcacatccaccggagtgtatgtgtggggaggggcttcacctgttcccagaggtgtccttggactcaccttggcacatgttctgtgtttcagtaaagagagacctgatcacccatctgtgtgcttccatcctgcattaaaattcactcagtgtggcccaga

SEQ ID NO: 101653 - DNA, 2589 bp, Artificial Sequence
  derived and/or modified sequence
acatttgtgatcacctggtcacacacctgggcaggaggctgcccctcctccctggtttgaggaagcaggaaaaggtacccgcgagagacagccagcagttctgtggagcagcggtggccggctaggatgggctgtctctggggtctggctctgccccttttcttcttctgctgggaggttggggtctctgggagctctgcaggccccagcacccgcagagcagacactgcgatgacaacggacgacacagaagtgcccgctatgactctagcaccgggccacgccgctctggaaactcaaacgctgagcgctgagacctcttctagggcctcaaccccagccggccccattccagaagcagagaccaggggagccaagagaatttcccctgcaagagagaccaggagtttcacaaaaacatctcccaacttcatggtgctgatcgccacctccgtggagacatcagccgccagtggcagccccgagggagctggaatgaccacagttcagaccatcacaggcagtgatcccagggaagccatctttgacaccctttgcaccgatgacagctctgaagaggcaaagacactcacaatggacatattgacattggctcacacctccacagaagctaagggcctgtcctcagagagcagcgcctcttccgacagcccccatccagtcatcaccccgtcacgggcctcagagagcagcgcctcttccgacggcccccatccagtcatcaccccgtcacgggcctcagagagcagcgcctcttccgacggcccccatccagtcatcaccccgtcacgggcctcagagagcagcgcctcttccgacggcccccatccagtcatcaccccgtcacgggcctcagagagcagcgcctcttccgacggcccccatccagtcatcaccccgtcacgggcctcagagagcagcgcctcttccgacggcccccatccagtcatcaccccgtcacgggcctcagagagcagcgcctcttccgacggcccccatccagtcatcaccccgtcacgggcctcagagagcagcgcctcttccgacggcccccatccagtcatcaccccgtcacgggcctcagagagcagcgcctcttccgacggcccccatccagtcatcaccccgtcacgggcctcagagagcagcgcctcttccgacggcctccatccagtcatcaccccgtcacgggcctcagagagcagcgcctcttccgacggcccccatccagtcatcaccccgtcacgggcctcagagagcagcgcctcttccgacggcccccatccagtcatcaccccctcatggtccccgggatctgacgtcactctcctcgctgaagccctggtgactgtcacaaacatcgaggttattaattgcagcatcacagaaatagaaacaacgacttccagcatccctggggcctcagacacagatctcatccccacggaaggggtgaaggcctcgtccacctccgatccaccagctctgcctgactccactgaagcaaaaccacacatcactgaggtcacagcctctgccgagaccctgtccacagccggcaccacagagtcagctgcacctgatgccacggttgggaccccactccccactaacagcgccacagaaagagaagtgacagcacccggggccacgaccctcagtggagctctggtcacagttagcaggaatccccttgaagaaacctcagccctctctgttgagacaccaagttacgtcaaagtctcaggagcagctccggtctccatagaggctgggtcagcagtgggcaaaacaacttcctttgctgggagctctgcttcctcctacagcccctcggaagccgccctcaagaacttcaccccttcagagacaccgaccatggacatcgcaaccaaggggcccttccccaccagcagggaccctcttccttctgtccctccgactacaaccaacagcagccgagggacgaacagcaccttagccaagatcacaacctcagcgaagaccacgatgaagcccccaacagccacgcccacgactgcccggacgaggccgaccacagacgtgagtgcaggtgaaaatggaggtttcctcctcctgcggctgagtgtggcttccccggaagacctcactgaccccagagtggcagaaaggctgatgcagcagctccaccgggaactccacgcccacgcgcctcacttccaggtctccttactgcgtgtcaggagaggctaacggacatcagctgcagccaggcatgtcccgtatgccaaaagagggtgctgcccctagcctgggcccccaccgacagactgcagctgcgttactgtgctgagaggtacccagaaggttcccatgaagggcagcatgtccaagcccctgaccccagatgtggcaacaggaccctcgctcacatccaccggagtgtatgtgtggggaggggcttcacctgttcccagaggtgtccttggactcaccttggcacatgttctgtgtttcagtaaagagagacctgatcacccatctgtgtgcttccatcctgcattaaaattcactcagtgtggccca

SEQ ID NO: 101654 - DNA, 2025 bp, Artificial Sequence
  derived and/or modified sequence
atgacaacagatgacaccgaagtaccagccatgactctcgctcctggacacgcagctctcgagacccaaaccctttcggctgaaacctcatcacgggcatctacccctgcgggacctatcccagaagctgaaactaggggcgccaaacgcatatcgccagccagggaaactagatctttcaccaagacatcccccaatttcatggtactgattgctacctccgtggagacaagcgccgcttcaggtagcccagagggtgctggaatgacaactgtacagacgatcaccggttccgacccaagagaagccatcttcgacacactctgtactgatgacagctctgaggaggcaaaaaccctcaccatggatatactgactctcgcccacacctccaccgaggctaaaggtttaagcagtgagagctcagccagttctgactccccccatcctgtgattaccccatcccgagcctctgagtcttccgcttcttctgacggcccccacccagtcatcaccccttcacgcgcctctgagagtagtgctagcagcgatggtccgcacccagtgattacgcccagcagggcctccgaatcctctgccagttcagacggtcctcatcctgttataaccccttcaagagcatccgaatccagtgcctccagcgatggacctcatccagtgattactccttcacgtgcatctgagtcaagtgcatcttcggacggccctcatcccgttataactcctagtagagcaagtgagtcatctgcatcaagcgatggcccccaccctgtgatcaccccctctcgggcttctgaaagctctgcctcctctgacgggccacaccctgttatcaccccatcaagagcttctgaatcatctgcctcatccgacgggcctcaccctgtaatcactccgagtcgggcctcagaatcctctgcatctagtgatggactccacccagtcattacaccctcccgggctagcgaatcctccgcctcttccgacggaccgcatccagtaataactcccagccgggcctctgaatcttctgcttcatctgatggaccccacccagtaattactcctagctggagcccaggcagtgacgtaaccctgttagcagaagccctggtgacggtgacaaatatcgaggtgatcaattgttcaattaccgagatcgaaactactacctctagtattcctggagcatccgataccgacctgatccctaccgagggagtcaaggctagttccacgtctgatccccctgcactgcccgacagcaccgaagccaagccgcatattacggaagttaccgccagtgccgaaacactctccactgcagggacaacagaatccgccgcaccagatgccactgtgggtacacccctccctacgaactcggccaccgaacgcgaagtgaccgcccccggcgccacaacactctcaggtgctctagtgaccgttagccgtaaccccctggaggagacaagcgccctatcagtcgaaacaccatcctatgtcaaggtcagcggtgccgcaccagtcagcattgaggccggctccgccgtcggaaaaacaacaagttttgctgggagcagtgcaagttcttattccccgtcagaggctgccttaaaaaattttacacccagtgaaacacctaccatggacattgccacaaaaggcccatttcctactagtcgagaccccctaccatccgtccctccaactaccactaacagctcgcggggcaccaattctacactggcaaaaataacaacatccgccaaaacaaccatgaagccacccactgctaccccgactactgctaggacccgccctacaacagacgtcagtgccggcgagaatggaggattcctgctacttaggcttagcgtcgcatctcccgaagacttgacagaccctagagtagccgagagactaatgcaacagctgcatcgcgagctccacgcgcacgcaccacactttcaggtgagcctactccgggtgagacgcggctag

SEQ ID NO: 101655 - DNA, 2130 bp, Artificial Sequence
  derived and/or modified sequence
atggggtgcctgtgggggctggctctgccattattctttttctgctgggaggtcggcgtatccggctctagcgcaggaccttccaccagacgagccgatacagctatgactacagacgacacagaagtccctgcaatgacactcgcacccggccatgccgctctagagacgcagacactttctgccgagacatcttctcgtgctagcaccccagccggtccgatccctgaagctgagacaagaggagcaaaaagaatttcgcctgcacgtgaaaccaggagctttacgaaaacttcccccaatttcatggtgctcattgccaccagcgtggaaacatcagccgctagcggctctcctgaaggcgccgggatgaccacagtccagacgattaccgggagtgatccccgagaggcaatattcgataccctttgcaccgacgacagctcagaggaggccaaaaccctaacgatggatattctgaccctggctcacacttctaccgaggctaaaggcctgtcttccgaaagctccgcatcgagcgatagtccacaccccgttattacaccttctagggccagcgaatcatctgctagttctgatggcccccatccagtcattaccccatcgcgcgcatcagaatctagtgcctcctcagacggtccacacccagtgattaccccctctagagcgagcgagagttcagccagttccgatggaccccacccagtgatcacccctagccgagccagcgaaagctccgccagttcagatggtccacatccagtaattacaccttcccgggcatccgaatcaagcgcgtcttccgacggcccccatccagttattactcctagtagagcgagcgagtccagcgcgtcgagcgacggccctcaccccgtgatcacaccaagccgagcttctgagtcaagcgcgtccagcgacggcccccaccctgtcattacaccatcccgtgcaagcgaatccagtgcatctagcgatggacctcaccctgtgattacaccgagtcgtgccagcgagagctctgcttcctctgatggcctgcatcccgttattactccttctcgcgcctcagagagctcagccagcagcgatggtccccatcctgtgattacaccttctagagccagcgaatctagtgcatcatccgatggcccacaccctgttattaccccgagctggtcacctgggtccgacgtgacattgttggccgaggcactggtgaccgttacaaacattgaagtcatcaattgttccattactgagatcgaaacgactacttccagcatacctggtgcgtcagacaccgacctgatacctaccgaaggagtaaaagcgagttccacatctgaccctcctgccctgccagattccacagaagccaagccacacatcacagaggtgaccgcttccgccgagaccttgtccaccgccggaaccacagagtctgccgcccccgatgctaccgttggcacaccgttaccaacaaactccgcaaccgagagagaagtcaccgcgcctggagctacaactctgagcggggcactggtcaccgtctcgcgcaaccctttagaagagacctctgctctttccgtagagacacccagttatgtcaaggtttccggagccgcccctgtgagcatcgaagcgggtagtgcagtcgggaaaaccacatcctttgccgggtcgtccgcttccagctacagtccaagtgaggccgcgctgaagaactttaccccatccgaaacacccaccatggatatcgccacaaagggcccctttcccacatcccgggaccctctgccatctgtgcccccaaccacaaccaactcgtctaggggtaccaactcaacactcgccaagatcaccacaagcgccaagaccactatgaaaccacctacagctactcccactacagccagaactagacccaccaccgatgttagtgcaggcgagaacgggggctttttacttctccgattgagtgtcgcctctcctgaggatctgaccgacccaagggtggctgaacgactgatgcagcaattacatagagaactccacgcccacgctccacacttccaggtgtctttattacgtgttcgcagaggctag

SEQ ID NO: 101656 - DNA, 2025 bp, Artificial Sequence
  derived and/or modified sequence
atgaccaccgacgacaccgaggtgcccgccatgaccctggcccccggccacgccgccctggagacccagaccctgagcgccgagaccagcagcagagccagcacccccgccggccccatccccgaggccgagaccagaggcgccaagagaatcagccccgccagagagaccagaagcttcaccaagaccagccccaacttcatggtgctgatcgccaccagcgtggagaccagcgccgccagcggcagccccgagggcgccggcatgaccaccgtgcagaccatcaccggcagcgaccccagagaggccatcttcgacaccctgtgcaccgacgacagcagcgaggaggccaagaccctgaccatggacatcctgaccctggcccacaccagcaccgaggccaagggcctgagcagcgagagcagcgccagcagcgacagcccccaccccgtgatcacccccagcagagccagcgagagcagcgccagcagcgacggcccccaccccgtgatcacccccagcagagccagcgagagcagcgccagcagcgacggcccccaccccgtgatcacccccagcagagccagcgagagcagcgccagcagcgacggcccccaccccgtgatcacccccagcagagccagcgagagcagcgccagcagcgacggcccccaccccgtgatcacccccagcagagccagcgagagcagcgccagcagcgacggcccccaccccgtgatcacccccagcagagccagcgagagcagcgccagcagcgacggcccccaccccgtgatcacccccagcagagccagcgagagcagcgccagcagcgacggcccccaccccgtgatcacccccagcagagccagcgagagcagcgccagcagcgacggcccccaccccgtgatcacccccagcagagccagcgagagcagcgccagcagcgacggcctgcaccccgtgatcacccccagcagagccagcgagagcagcgccagcagcgacggcccccaccccgtgatcacccccagcagagccagcgagagcagcgccagcagcgacggcccccaccccgtgatcacccccagctggagccccggcagcgacgtgaccctgctggccgaggccctggtgaccgtgaccaacatcgaggtgatcaactgcagcatcaccgagatcgagaccaccaccagcagcatccccggcgccagcgacaccgacctgatccccaccgagggcgtgaaggccagcagcaccagcgacccccccgccctgcccgacagcaccgaggccaagccccacatcaccgaggtgaccgccagcgccgagaccctgagcaccgccggcaccaccgagagcgccgcccccgacgccaccgtgggcacccccctgcccaccaacagcgccaccgagagagaggtgaccgcccccggcgccaccaccctgagcggcgccctggtgaccgtgagcagaaaccccctggaggagaccagcgccctgagcgtggagacccccagctacgtgaaggtgagcggcgccgcccccgtgagcatcgaggccggcagcgccgtgggcaagaccaccagcttcgccggcagcagcgccagcagctacagccccagcgaggccgccctgaagaacttcacccccagcgagacccccaccatggacatcgccaccaagggccccttccccaccagcagagaccccctgcccagcgtgccccccaccaccaccaacagcagcagaggcaccaacagcaccctggccaagatcaccaccagcgccaagaccaccatgaagccccccaccgccacccccaccaccgccagaaccagacccaccaccgacgtgagcgccggcgagaacggcggcttcctgctgctgagactgagcgtggccagccccgaggacctgaccgaccccagagtggccgagagactgatgcagcagctgcacagagagctgcacgcccacgccccccacttccaggtgagcctgctgagagtgagaagaggctag

SEQ ID NO: 101657 - DNA, 2130 bp, Artificial Sequence
  derived and/or modified sequence
atgggctgcctgtggggcctggccctgcccctgttcttcttctgctgggaggtgggcgtgagcggcagcagcgccggccccagcaccagaagagccgacaccgccatgaccaccgacgacaccgaggtgcccgccatgaccctggcccccggccacgccgccctggagacccagaccctgagcgccgagaccagcagcagagccagcacccccgccggccccatccccgaggccgagaccagaggcgccaagagaatcagccccgccagagagaccagaagcttcaccaagaccagccccaacttcatggtgctgatcgccaccagcgtggagaccagcgccgccagcggcagccccgagggcgccggcatgaccaccgtgcagaccatcaccggcagcgaccccagagaggccatcttcgacaccctgtgcaccgacgacagcagcgaggaggccaagaccctgaccatggacatcctgaccctggcccacaccagcaccgaggccaagggcctgagcagcgagagcagcgccagcagcgacagcccccaccccgtgatcacccccagcagagccagcgagagcagcgccagcagcgacggcccccaccccgtgatcacccccagcagagccagcgagagcagcgccagcagcgacggcccccaccccgtgatcacccccagcagagccagcgagagcagcgccagcagcgacggcccccaccccgtgatcacccccagcagagccagcgagagcagcgccagcagcgacggcccccaccccgtgatcacccccagcagagccagcgagagcagcgccagcagcgacggcccccaccccgtgatcacccccagcagagccagcgagagcagcgccagcagcgacggcccccaccccgtgatcacccccagcagagccagcgagagcagcgccagcagcgacggcccccaccccgtgatcacccccagcagagccagcgagagcagcgccagcagcgacggcccccaccccgtgatcacccccagcagagccagcgagagcagcgccagcagcgacggcctgcaccccgtgatcacccccagcagagccagcgagagcagcgccagcagcgacggcccccaccccgtgatcacccccagcagagccagcgagagcagcgccagcagcgacggcccccaccccgtgatcacccccagctggagccccggcagcgacgtgaccctgctggccgaggccctggtgaccgtgaccaacatcgaggtgatcaactgcagcatcaccgagatcgagaccaccaccagcagcatccccggcgccagcgacaccgacctgatccccaccgagggcgtgaaggccagcagcaccagcgacccccccgccctgcccgacagcaccgaggccaagccccacatcaccgaggtgaccgccagcgccgagaccctgagcaccgccggcaccaccgagagcgccgcccccgacgccaccgtgggcacccccctgcccaccaacagcgccaccgagagagaggtgaccgcccccggcgccaccaccctgagcggcgccctggtgaccgtgagcagaaaccccctggaggagaccagcgccctgagcgtggagacccccagctacgtgaaggtgagcggcgccgcccccgtgagcatcgaggccggcagcgccgtgggcaagaccaccagcttcgccggcagcagcgccagcagctacagccccagcgaggccgccctgaagaacttcacccccagcgagacccccaccatggacatcgccaccaagggccccttccccaccagcagagaccccctgcccagcgtgccccccaccaccaccaacagcagcagaggcaccaacagcaccctggccaagatcaccaccagcgccaagaccaccatgaagccccccaccgccacccccaccaccgccagaaccagacccaccaccgacgtgagcgccggcgagaacggcggcttcctgctgctgagactgagcgtggccagccccgaggacctgaccgaccccagagtggccgagagactgatgcagcagctgcacagagagctgcacgcccacgccccccacttccaggtgagcctgctgagagtgagaagaggctag

SEQ ID NO: 101658 - DNA, 2025 bp, Artificial Sequence
  derived and/or modified sequence
atgacaaccgacgacaccgaggtgccagcaatgactctcgccccggggcacgcggctctggaaacacagactctctccgctgagacatccagtcgagcttcgaccccagccggcccaatccctgaggccgaaacaaggggagccaaaagaatatctccagcacgggagactagaagcttcaccaagacatcacctaactttatggtgctaatcgctacaagcgtagaaacaagcgccgcctcaggctcacctgaaggtgccgggatgacaaccgtgcaaactatcacgggaagcgatccccgtgaggctatcttcgacaccctgtgcacagatgacagcagcgaagaagcgaagaccctgactatggacattcttacccttgcacacaccagtacagaggctaaggggttgtcttctgagtcttcggccagctccgattccccacatcctgtcattactcctagccgggccagcgagtcatcagccagctcagatggcccacaccccgtgatcaccccctcacgagcctcagagtcatctgcttcttctgatggtcctcacccagtgataacgccatcacgtgcatctgagagctcggcctcaagtgacggaccacacccggtaattacacctagtcgcgccagtgagagttcggcctctagcgacggccctcatcctgttatcaccccctccagggctagcgagtcttcggcgtctagtgacgggccacatcctgttataacaccgtctcgcgcatcagagagcagtgcaagtagcgatggtccgcatccagtgatcaccccttctcgagctagtgaatcaagtgccagcagtgatggcccccacccggtgatcactccgtcgagggccagcgaatctagcgcttcctcagatgggccacatccagtgatcaccccgtcacgagcatccgaatcgtctgcttcatcagacggacttcaccctgttatcaccccctcgcgtgcctcggaatcctccgcaagctccgatggccctcacccagtcatcacaccatctagagcatcagaaagcagtgccagtagtgatggtcctcacccggtgattaccccttcttggtcccccggatccgatgtgacgctgctagcagaggctcttgtaactgtcaccaatatagaagtcattaattgttcaataaccgaaatcgagacaaccactagttcaatccctggcgcctcagatacagatctgattcctaccgagggcgtcaaagccagttccaccagcgatcctccggctcttccagacagtactgaagctaagcctcatattaccgaggtgactgcttccgccgagactctcagcactgctgggactacagagtctgctgcgcctgacgcgactgtagggacgcccttacccaccaactccgccacagagagagaggtcactgctcccggagctactaccctaagtggtgcactggttacagtctccaggaaccccctggaggagacatctgcattgagcgtcgagacgcctagttacgtgaaggtgagtggcgctgccccggtgtctatcgaggctggcagtgccgtgggaaaaaccacctcatttgccggctcatctgctagctcctacagcccctcagaagccgcattgaagaactttaccccttccgaaacacctactatggatatagccactaagggacctttcccaacatctcgtgaccccctgccaagcgtcccgccgaccacaactaacagtagcaggggaaccaactccacactggccaaaattaccacaagtgcaaagacaacaatgaagccgccaacggcgacccctacgactgccagaacaaggcccacaacagatgtcagcgctggtgagaatggcgggtttctgctgttgcgcctgagcgttgctagccccgaagacctcaccgacccacgtgtagcagaaagattaatgcagcagttgcaccgagaactgcatgctcatgcaccccattttcaggtctctttgcttcgcgtgagacggggttag

SEQ ID NO: 101659 - DNA, 2130 bp, Artificial Sequence
  derived and/or modified sequence
atgggatgcctgtggggactcgctctgcccctcttctttttttgctgggaggttggcgtgagtggctctagcgccgggccaagcacccggagggcagatacggccatgactacagatgacaccgaagtgcctgctatgacattggcccccggtcatgccgccttggagacacaaacactgagtgctgagacctcctccagagcctcaactccagctggacctatccctgaggccgagactcgcggagccaagcggatttctcccgcacgcgagacacgatcattcactaagacttcccctaattttatggtactgattgcaacgtctgtagagacttccgcagcatcaggaagtcctgagggcgctggaatgactactgtgcaaactatcacaggtagcgatcctcgcgaggctattttcgatactctgtgtaccgacgactcttcggaggaagccaaaaccctgaccatggacatcctgactctggcccacacttccacggaggccaaaggcctgagcagcgaatcttctgccagttctgattcgcctcacccagtaattacaccctcacgggcatctgaaagcagcgcgtctagcgacggccctcaccccgttatcactcctagtcgcgcctctgagtcttccgcttcaagcgatggaccacaccctgtcatcacaccctctcgggcctccgagtccagcgcaagcagtgatggaccacaccctgtgatcactcctagccgggcttctgaaagtagtgcatcttccgacggccctcaccccgtaataacccctagtcgagcgagcgaatcatctgcttcatccgatggaccccatcctgtcatcacccccagtcgtgcttccgaatcatctgccagctctgacgggccccatcccgtcatcaccccgagtcgtgcttcagaatcatctgcctcttcagacggcccgcaccctgtcatcacccctagccgcgctagcgagagttccgcaagctcagacggccctcaccctgtgatcaccccgagtcgggcatcagagagcagcgcgtccagtgacgggctccatcctgtgatcactcctagccgtgcatctgagagctctgcctcgtcggatggcccacaccccgtaatcacacccagtagagcttcagagtcttccgccagttccgacggaccacaccccgtgatcaccccgtcctggtcccccggctcagatgtgaccctgctggcagaagctctcgtgacagtgacaaacatcgaggttattaattgctctattacagagattgagacgacgaccagctctataccaggggccagcgacactgatttgatcccaactgaaggggtaaaggcctcaagcacctccgacccgcccgcattacccgactcgacagaagcaaagccacatatcacggaagtgaccgcctcagccgaaacactgtccactgccggtaccaccgagtctgccgccccggacgcaactgtcggcaccccccttcccaccaactccgcaacggagagggaggtgacagccccgggggccacgaccctctccggagcacttgtcaccgtgagccgcaacccactcgaggagaccagcgctttgtccgtggagactcccagctacgtcaaggtgtcaggggccgccccagttagcattgaagcaggctcagcagtgggtaagactaccagcttcgccggctcctccgcaagcagctactccccctcggaagccgcactgaaaaactttaccccttctgagacccctaccatggacattgcaaccaaaggacctttcccaaccagccgtgaccctttgccatctgttcccccgacaactacgaactcctctcgaggtactaacagtactctggcaaaaattactacctcagccaagaccaccatgaaaccgccgactgctacccctacaacagctaggactagaccaaccactgacgtttcggcgggtgagaatgggggattcctgctcttgcgtttaagtgtggcatccccagaggacctgacagacccgcgggtggctgaacgtctgatgcagcagctgcacagagagctccacgcgcacgccccacactttcaggtttccctgctcagagtgcgtcgaggctag

SEQ ID NO: 101660 - DNA, 2025 bp, Artificial Sequence
  derived and/or modified sequence
atgaccacagatgacacagaggtgcctgccatgaccctggcccctggccacgccgccctggagacccagaccctgtctgctgagaccagcagccgggccagcaccccagctggccccatccctgaggccgagaccaggggggccaagaggatcagccctgcccgggagaccaggagcttcaccaagaccagccccaacttcatggtgctgattgccacctctgtggagaccagcgctgccagcggcagccctgagggcgccggcatgaccaccgtgcagaccatcaccggcagtgacccccgggaggccatctttgacaccctgtgcacagatgacagcagcgaggaggccaagaccctgaccatggacatcctgaccctggcccacaccagcacagaggccaagggcctgagcagcgagagcagcgccagcagtgacagcccccaccctgtgatcacccccagccgggccagcgagagcagcgccagcagtgatggcccccaccctgtgatcacccccagccgggccagcgagagcagcgccagcagtgatggcccccaccctgtgatcacccccagccgggccagcgagagcagcgccagcagtgatggcccccaccctgtgatcacccccagccgggccagcgagagcagcgccagcagtgatggcccccaccctgtgatcacccccagccgggccagcgagagcagcgccagcagtgatggcccccaccctgtgatcacccccagccgggccagcgagagcagcgccagcagtgatggcccccaccctgtgatcacccccagccgggccagcgagagcagcgccagcagtgatggcccccaccctgtgatcacccccagccgggccagcgagagcagcgccagcagtgatggcccccaccctgtgatcacccccagccgggccagcgagagcagcgccagcagtgatggcctgcaccctgtgatcacccccagccgggccagcgagagcagcgccagcagtgatggcccccaccctgtgatcacccccagccgggccagcgagagcagcgccagcagtgatggcccccaccctgtgatcacccccagctggagccctggcagtgatgtgaccctgctggccgaggccctggtgacagtgaccaacatcgaggtgatcaactgcagcatcacagaaattgagaccaccaccagcagcatccctggggccagtgacacagacctgatccccacagagggcgtgaaggccagcagcaccagtgaccccccagccctgcctgacagcacagaggccaagccccacatcacagaggtgacagccagcgctgagaccctgagcacagctggcaccacagagagcgctgccccagatgccaccgtgggcacccccctgcccaccaacagcgccacagagcgggaggtgacagcccctggggccaccaccctgagcggggccctggtgacagtgtccaggaaccccctggaggagaccagcgccctgtctgtggagacccccagctatgtgaaggtgtctggggccgcccctgtgtccattgaagctggcagcgctgtgggcaagaccaccagctttgctggcagcagcgccagcagctacagccccagcgaggccgccctgaagaacttcacccccagcgagacccccaccatggacatcgccaccaagggccccttccccaccagccgggaccccctgcccagcgtgccccccaccaccaccaacagcagccggggcaccaacagcaccctggccaagatcaccaccagcgccaagaccaccatgaagcccccaacagccacccccaccacagcccggacccggcccaccacagatgtgtctgctggagaaaatggaggcttcctgctgctgcggctgtctgtggccagccctgaggacctgacagacccccgggtggccgagcggctgatgcagcagctgcaccgggagctgcacgcccacgccccccacttccaggtgtccctgctgcgggtgcggcggggctag

SEQ ID NO: 101661 - DNA, 2130 bp, Artificial Sequence
  derived and/or modified sequence
atgggctgcctgtggggcctggccctgcccctcttcttcttctgctgggaggtgggcgtgtctggcagcagcgctggccccagcacccggcgggctgacacagccatgaccacagatgacacagaggtgcctgccatgaccctggcccctggccatgctgccctggagacccagaccctgtctgctgagaccagcagccgggccagcaccccagctggccccatccctgaggccgagaccaggggggccaagaggatcagccctgcccgggagaccaggagcttcaccaagaccagccccaacttcatggtgctgattgccacctctgtggagaccagcgctgccagcggcagccctgagggcgccggcatgaccaccgtgcagaccatcactggaagtgacccccgggaggccatctttgacaccctgtgcacagatgacagcagcgaggaggccaagaccctgaccatggacatcctgaccctggcccacaccagcacagaggccaagggcctgagcagcgagagcagcgccagcagtgacagcccccaccctgtgatcacccccagccgggccagcgagagcagcgccagcagtgatggcccccaccctgtgatcacccccagccgggccagcgagagcagcgccagcagtgatggcccccaccctgtgatcacccccagccgggccagcgagagcagcgccagcagtgatggcccccaccctgtgatcacccccagccgggccagcgagagcagcgccagcagtgatggcccccaccctgtgatcacccccagccgggccagcgagagcagcgccagcagtgatggcccccaccctgtgatcacccccagccgggccagcgagagcagcgccagcagtgatggcccccaccctgtgatcacccccagccgggccagcgagagcagcgccagcagtgatggcccccaccctgtgatcacccccagccgggccagcgagagcagcgccagcagtgatggcccccaccctgtgatcacccccagccgggccagcgagagcagcgccagcagtgatggcctgcaccctgtgatcacccccagccgggccagcgagagcagcgccagcagtgatggcccccaccctgtgatcacccccagccgggccagcgagagcagcgccagcagtgatggcccccaccctgtgatcacccccagctggagccctggcagtgatgtgaccctgctggccgaggccctggtgacagtgaccaacattgaagtcatcaactgcagcatcacagaaattgagaccaccaccagcagcatccctggggccagtgacacagacctgatccccacagaaggagtgaaggccagcagcaccagtgaccccccagccctgcctgacagcacagaggccaagccccacatcacagaggtgacagccagcgctgagaccctgagcacagctggcaccacagaatctgctgccccagatgccaccgtgggcacccccctgcccaccaacagcgccacagagcgggaggtgacagcccctggggccaccaccctgagcggggccctggtgacagtgtccaggaaccccctggaggagaccagcgccctgtctgtggagacccccagctatgtgaaggtgtctggagctgcccctgtgtccattgaggccggcagcgctgtgggcaagaccaccagctttgctggcagcagcgccagcagctacagccccagcgaggccgccctgaagaacttcaccccatctgagacccccaccatggacatcgccaccaagggccccttccccaccagccgggaccccctgcccagcgtgccccccaccaccaccaacagcagccggggcaccaacagcaccctggccaagatcaccaccagcgccaagaccaccatgaagccacccacagccacccccaccacagcccggacccggcccaccacagatgtgtctgctggggagaatggaggcttcctgctgctgcggctgtctgtggccagccctgaggacctgacagacccccgggtggccgagcggctgatgcagcagctgcaccgggagctgcacgcccacgccccccacttccaggtgtccctgctgcgggtgagaagaggatag

SEQ ID NO: 101662 - DNA, 2025 bp, Artificial Sequence
  derived and/or modified sequence
atgaccaccgacgacaccgaggtgcccgccatgaccctggcccccggacatgccgccttagagactcagactttgtctgccgaaaccagcagtagagccagcacgcccgcaggtcccattcctgaggccgaaactcgaggggccaagaggatcagcccagcacgcgagaccagatcctttacaaagactagtcccaattttatggtgctgatcgctaccagcgtagaaaccagtgcggcatccggatctcctgaaggcgctggaatgacaactgtgcagactattactggtagcgaccctcgggaagcgatatttgataccctgtgtaccgacgatagctccgaagaagcaaaaacactaaccatggatatcctgaccctggcacatacatctacagaagccaagggactgtcaagcgaaagcagcgcatctagtgattccccccaccccgtcatcacaccaagccgtgcttctgagagctcagctagctcagacgggccacacccagttatcaccccctctcgcgctagtgagagttctgcatcttccgacggtccgcatccagtcatcaccccctcaagagcctctgaaagttctgcttcctcggacggaccacacccagtgattacgcccagtagggccagtgagagcagcgcttccagtgacggcccgcaccctgtgattaccccctcacgagctagcgagtccagcgcttcatctgacggacctcaccccgtaattacaccatctcgcgctagcgaatcctctgcgtcctcagatggtcctcacccggttattacaccctctagagcctctgagtcctccgcaagttctgatgggcctcaccccgtaattaccccctcacgcgcctctgagtccagtgccagctcggacggaccacatcctgtgatcacaccaagcagagccagcgagagcagtgccagttccgatgggctacaccccgtcattactcccagccgggctagtgaatcatccgcaagcagtgatggccctcatccagtcatcaccccatcgcgtgcctctgaaagttccgcctctagcgatggcccccacccggttataacaccatcttggagccccggttctgatgtaaccctgcttgcggaggcactggtgaccgtgaccaacatagaagtgatcaattgctccataactgaaattgagactacaacgtcttctatccctggcgcctcggacacagatctgatcccaacagagggggttaaggcgagttctacgagtgaccccccagctcttcccgactctacagaggcgaagcctcatattactgaagtcaccgcctcagccgagaccctatccaccgccggaacaacagagagcgccgcccctgatgcaaccgtgggtaccccactccccacgaatagcgcaactgagcgagaggtaacagctccaggggccaccactctgagcggcgcactggtgaccgtgtccagaaacccattggaggagacaagtgcactctccgtggaaacaccttcctatgtcaaagtgtctggagccgcaccagtgtctatcgaggccggctctgcagtcggcaagacaactagcttcgccggatcgtccgcctccagctacagcccaagcgaggccgcactgaagaattttactcccagtgaaaccccgaccatggacatcgcgacaaaagggccattccctacaagccgggatcctctgccgtccgtgccaccaactactacaaatagttcccggggaacaaacagcacacttgcaaaaatcacaacatcggccaaaaccacaatgaaaccccccaccgccactccgaccacagcccgcacccgacccaccactgatgtgtcagctggtgagaacggcggctttttactccttagactttccgtggcttctcccgaagacctgaccgatccaagggtagctgaacgccttatgcaacagttacacagggaactgcacgctcacgcaccccatttccaggtgtctctgctgagagtgcgaagaggatag

SEQ ID NO: 101663 - DNA, 2130 bp, Artificial Sequence
  derived and/or modified sequence
atgggctgcctgtggggcctggccctgcccctgttcttcttctgctgggaagttggtgtgtcagggtcaagcgccggaccctccacacgccgtgctgacacagccatgactactgatgacactgaggtgcctgcaatgacattggccccaggccatgcagctctggaaacacagaccctttctgccgagaccagtagccgggcttccacacctgcgggaccgatacctgaagctgaaactcgcggggctaagcgcattagccctgcacgcgagactcggtcatttactaaaacctcgcccaattttatggtcctgatcgcaacatccgtggaaacctctgccgcctctggtagccccgagggcgctggaatgacaacagtccaaaccattaccggctccgatcctcgagaagccatatttgatacattgtgtacggacgattccagtgaagaggcaaaaaccttaactatggatatattgacactcgcccacactagtaccgaggctaaagggctgtcatctgaaagttccgcaagtagcgattcaccacaccccgtaatcacaccatcaagagcttcagagtcttccgcatcttctgatggacctcaccctgtcattactccatccagagccagtgaaagctcagcctcatccgatgggccccaccctgtaatcaccccctcccgcgcgtcagaatcttccgcctccagtgacggtccacatcccgtaatcacaccaagcagagcctccgaatcgtctgcttcctccgatgggccacaccctgtgattactccctctcgggccagcgagtcatctgccagctcggatggtccacaccctgtgataaccccaagtcgggctagtgagtcttctgcatctagcgatggtccccacccagtgattactccgtcccgggcctccgagagctctgctagtagtgacgggcctcatcctgtgattactccgagtcgggcctcagaatcctctgcctcctctgatggtccccaccccgtgattacccccagtcgagcatctgaaagctcggccagttcagatgggctgcaccccgtgatcactccaagtcgcgcctctgaatcatctgcgtccagcgatggtccgcatcctgtcataaccccatcacgggccagtgagagctccgctagttctgatgggccccatcctgtcatcacgccaagctggagccccggctcggatgtaacactccttgcggaggccctcgtcacagtcaccaatatagaagttattaactgctctatcactgagatcgaaactaccaccagctccattcccggcgcttcagacaccgacttaatcccgaccgagggtgtgaaggcttcctctacaagcgacccccctgccctgccagactccaccgaggcaaaaccacacataacagaggtgacagccagcgcggagactctgtctactgccggtacaaccgaaagcgctgcacctgacgctactgttggaacccctttacctaccaactcagctacggaacgggaagttactgcaccaggagccacaactctgagcggggctctcgtcactgtgtccagaaatccactggaggaaacttctgcactgagtgtagaaaccccttcctacgttaaggtttcaggagcagcaccagttagcatcgaggccgggagcgctgtgggcaagacaacatcttttgcaggatctagcgcctcttcttactccccttcagaagccgcgttaaagaatttcacgcccagcgagactcccacaatggacatcgccaccaagggcccctttccgacgagtcgggatccactcccctctgtcccgccaacaaccaccaattcctcgaggggtaccaacagcaccctggcaaaaataaccacttcggcgaaaaccaccatgaagccccccaccgctaccccaacaaccgcgcgaacccgtcctacgaccgatgttagcgccggcgagaatggcggtttcctgctgctaaggctgagcgttgcgtcgccagaagacctaacggaccctcgggtcgctgagcgcctgatgcagcagctccatcgcgaactgcacgctcacgcccctcatttccaagtgtctctcttacgggtccggagaggctag

SEQ ID NO: 101664 - RNA, 2025 nt, Artificial Sequence
  derived and/or modified sequence
augacaaccgacgacaccgaggugccugccaugacucuagcuccuggccaugccgcccuggagacccaaacacuaucagccgaaaccucuuccagagcgucgacuccugcuggaccgauccccgaagcagagacucggggcgcuaagcgaauuuccccggcccgcgagacccguucguucaccaaaacuagccccaauuuuaugguauugaucgcaacuucagucgagacauccgccgccagugguagucccgaaggggcagguaugaccacaguccagacaauuacugggucagacccaagggaagccauuuuugacacacuguguacagacgauuccuccgaggaggccaagacguugaccauggacauccuuaccuuggcucacaccuccaccgaggccaagggccuuaguagugagucaucagcuagcucugacucuccucaccccgucaucaccccuucccgagcgagugagagcagugcgucuuccgauggaccccacccuguuauuacuccaucuagagccucugaguccucggcaucuucagaugguccccacccaguuauuaccccuuccagagcgucggagucauccgcuagcagugacgguccccaccccgugauuacucccaguagggccagcgaaagcagugcauccagcgacgggccacaucccgugaucacgccaagccgugccagugagucaagcgcgaguucagacggcccucacccugugaucacaccaucaagagcaagcgaaucaagugcauccagugaugggccccauccaguaaucacaccaaguagggcuucugaaucuuccgcaaguucagacggaccccauccaguuauuacaccuucucgcgcaagcgaaaguuccgccucuuccgacggcccucacccaguaauaacaccuucccgggcuucugaauccuccgccaguagugacggacugcauccggugaucacgccaucacgagccucugagagcuccgcaucuucagacggaccucacccaguuaucacccccucuagggccagcgaauccucagcguccucugacggcccccacccugugauuacacccagcuggucaccuggcucugacgugacacugcuggccgaggcccucguuaccguuacgaauaucgaaguuauuaauugcucuaucaccgaaauugaaaccacgacgucuucuauuccuggagcauccgauaccgaccugaucccuaccgagggagucaaggcuaguuccacgucugaucccccugcacugcccgacagcaccgaagccaagccgcauauuacggaaguuaccgccagugccgaaacacucuccacugcagggacaacagaauccgccgcaccagaugccacuguggguacaccccucccuacgaacucggccaccgaacgcgaagugaccgcccccggcgccacaacacucucaggugcucuagugaccguuagccguaacccccuggaggagacaagcgcccucucuguggaaacuccuucuuacgugaaagugucaggggccgcucccgugaguaucgaggccgguuccgcuguuggcaaaacaaccuccuucgcggguaguucugcuucuucauauucacccucugaggcagcucuuaaaaauuucacaccguccgagacgccgacuauggacauagccaccaaggguccauucccuaccagccgggacccccuuccuucuguuccgcccacgaccacaaacuccucucgugguaccaacucaacccuggccaagauuacaacuagcgcuaagacaacgaugaagccaccaacagccacaccaacaacugccaggacgcgccccacuacugacgugagcgcgggggagaauggcgguuuucuauugcugcggcuaucaguggcaagcccagaggaccuaaccgauccuagaguagcugagcgacugaugcaacagcuacacagagagcuucacgcccaugccccucacuuucaggucucacuuuugagaguucguagaggcuag

SEQ ID NO: 101665 - RNA, 2130 nt, Artificial Sequence
  derived and/or modified sequence
auggggugccugugggggcuggcucugccauuauucuuuuucugcugggaggucggcguauccggcucuagcgcaggaccuuccaccagacgagccgauacagcuaugacuacagacgacacagaagucccugcaaugacacucgcacccggccaugccgcucuagagacgcagacacuuucugccgagacaucuucucgugcuagcaccccagccgguccgaucccugaagcugagacaagaggagcaaaaagaauuucgccugcacgugaaaccaggagcuuuacgaaaacuucccccaauuucauggugcuuauagcuacguccguggagacgucugccgcaucaggcuccccugagggagcuggcaugaccacuguucagacuauaacgggcagcgacccacgcgaagccauuuucgacacucuguguaccgacgauucuagugaggaggccaagacccugacuauggacauucucacccuagcacacacaucaacagaagcaaagggccuaaguucugaguccuccgccaguagugacagcccucauccaguuauuacuccauccagggcaagcgagagcuccgcaucuagcgacgggccacacccggucauaacccccagucgagcuuccgaauccagugcuucauccgauggaccacacccagugauuacaccgucccgggccucugaauccagcgcuucuagcgacggcccccaucccgucaucacgccaagucgcgcuagugagagcucagcaucgucugacgggccgcaucccgugauuacccccucccgggcuuccgaaagcagugcaagcuccgauggaccucacccggucaucacaccaagucgugccucugagaguagugccucuucagacggaccucacccagucaucacaccgagcagagcuuccgagagcucagcuagcuccgaugggccccacccugucauaacaccaucacgggcauccgaguccagugccagcucugacgggccucaucccgugauaacaccaucuagggccucugagucaucggccucuuccgauggccugcaucccguuauaaccccuucaagagcguccgagucuucugcuagcucugacggcccacaccccguuaucacccccucuagggccagcgaaagcucagcaagcucugacgggccccauccuguaauuacacccucuuggucccccggcucugaugugacucuguuggccgaggcgcuggucaccgucaccaauauugaggugauuaacugcagcauuacagaaauugaaacuacuaccuccagcauucccggcgcuucagauacugaccugauuccuacugaagggguaaaagcgagcuccacgucugaccccccugcauuaccggacuccacggaggcaaaaccacauauaacugagguaacagccucggccgaaacucuuagcacagcgggaacgacagaguccgcggcaccugacgcuacugugggcacaccucuuccaacaaauuccgccacagaacgagaggugaccgcgccuggcgcaaccacucugucuggggcccuggugacuguuagccggaauccuuuagaggagaccagcgcucucuccgucgagacccccuccuaugucaagguaagcggcgcugcgcccgucagcauagaggcaggcagugcuguggggaaaacgacuaguuucgccggaucgagcgccucaucauacucaccuagcgaagcugcccucaagaauuucacaccauccgagaccccgacuauggacaucgccaccaagggccccuuccccacaagcagggaccccuuaccuagcgucccccccacuacgacgaacagcuccaggggaaccaacucaacccuugcaaagaucacgacuagcgccaagacaacuaugaagcccccuacugcuacuccaacgaccgcacgcacaagacccacaaccgauguuagcgcgggagagaacggaggguuucuuuuacuucgacuaaguguggccuccccugaggaccugacagacccaaggguggcagagaggcucaugcaacaguuacacagggaacugcaugcucaugcuccccauuuccaaguuagucuucuuaggguucgacgaggauag

SEQ ID NO: 101666 - RNA, 2025 nt, Artificial Sequence
  derived and/or modified sequence
augacaacagaugacaccgaaguaccagccaugacucucgcuccuggacacgcagcucucgagacccaaacccuuucggcugaaaccucaucacgggcaucuaccccugcgggaccuaucccagaagcugaaacuaggggcgccaaacgcauaucgccagccagggaaacuagaucuuucaccaagacaucccccaauuucaugguacugauugcuaccuccguggagacaagcgccgcuucagguagcccagagggugcuggaaugacaacuguacagacgaucaccgguuccgacccaagagaagccaucuucgacacacucuguacugaugacagcucugaggaggcaaaaacccucaccauggauauacugacucucgcccacaccuccaccgaggcuaaagguuuaagcagugagagcucagccaguucugacuccccccauccugugauuaccccaucccgagccucugagucuuccgcuucuucugacggcccccacccagucaucaccccuucacgcgccucugagaguagugcuagcagcgaugguccgcacccagugauuacgcccagcagggccuccgaauccucugccaguucagacgguccucauccuguuauaaccccuucaagagcauccgaauccagugccuccagcgauggaccucauccagugauuacuccuucacgugcaucugagucaagugcaucuucggacggcccucaucccguuauaacuccuaguagagcaagugagucaucugcaucaagcgauggcccccacccugugaucacccccucucgggcuucugaaagcucugccuccucugacgggccacacccuguuaucaccccaucaagagcuucugaaucaucugccucauccgacgggccucacccuguaaucacuccgagucgggccucagaauccucugcaucuagugauggacuccacccagucauuacacccucccgggcuagcgaauccuccgccucuuccgacggaccgcauccaguaauaacucccagccgggccucugaaucuucugcuucaucugauggaccccacccaguaauuacuccuagcuggagcccaggcagugacguaacccuguuagcagaagcccuggugacggugacaaauaucgaggugaucaauuguucaauuaccgagaucgaaacuacuaccucuaguauuccuggagcauccgauaccgaccugaucccuaccgagggagucaaggcuaguuccacgucugaucccccugcacugcccgacagcaccgaagccaagccgcauauuacggaaguuaccgccagugccgaaacacucuccacugcagggacaacagaauccgccgcaccagaugccacuguggguacaccccucccuacgaacucggccaccgaacgcgaagugaccgcccccggcgccacaacacucucaggugcucuagugaccguuagccguaacccccuggaggagacaagcgcccuaucagucgaaacaccauccuaugucaaggucagcggugccgcaccagucagcauugaggccggcuccgccgucggaaaaacaacaaguuuugcugggagcagugcaaguucuuauuccccgucagaggcugccuuaaaaaauuuuacacccagugaaacaccuaccauggacauugccacaaaaggcccauuuccuacuagucgagacccccuaccauccgucccuccaacuaccacuaacagcucgcggggcaccaauucuacacuggcaaaaauaacaacauccgccaaaacaaccaugaagccacccacugcuaccccgacuacugcuaggacccgcccuacaacagacgucagugccggcgagaauggaggauuccugcuacuuaggcuuagcgucgcaucucccgaagacuugacagacccuagaguagccgagagacuaaugcaacagcugcaucgcgagcuccacgcgcacgcaccacacuuucaggugagccuacuccgggugagacgcggcuag

SEQ ID NO: 101667 - RNA, 2130 nt, Artificial Sequence
  derived and/or modified sequence
auggggugccugugggggcuggcucugccauuauucuuuuucugcugggaggucggcguauccggcucuagcgcaggaccuuccaccagacgagccgauacagcuaugacuacagacgacacagaagucccugcaaugacacucgcacccggccaugccgcucuagagacgcagacacuuucugccgagacaucuucucgugcuagcaccccagccgguccgaucccugaagcugagacaagaggagcaaaaagaauuucgccugcacgugaaaccaggagcuuuacgaaaacuucccccaauuucauggugcucauugccaccagcguggaaacaucagccgcuagcggcucuccugaaggcgccgggaugaccacaguccagacgauuaccgggagugauccccgagaggcaauauucgauacccuuugcaccgacgacagcucagaggaggccaaaacccuaacgauggauauucugacccuggcucacacuucuaccgaggcuaaaggccugucuuccgaaagcuccgcaucgagcgauaguccacaccccguuauuacaccuucuagggccagcgaaucaucugcuaguucugauggcccccauccagucauuaccccaucgcgcgcaucagaaucuagugccuccucagacgguccacacccagugauuacccccucuagagcgagcgagaguucagccaguuccgauggaccccacccagugaucaccccuagccgagccagcgaaagcuccgccaguucagaugguccacauccaguaauuacaccuucccgggcauccgaaucaagcgcgucuuccgacggcccccauccaguuauuacuccuaguagagcgagcgaguccagcgcgucgagcgacggcccucaccccgugaucacaccaagccgagcuucugagucaagcgcguccagcgacggcccccacccugucauuacaccaucccgugcaagcgaauccagugcaucuagcgauggaccucacccugugauuacaccgagucgugccagcgagagcucugcuuccucugauggccugcaucccguuauuacuccuucucgcgccucagagagcucagccagcagcgaugguccccauccugugauuacaccuucuagagccagcgaaucuagugcaucauccgauggcccacacccuguuauuaccccgagcuggucaccuggguccgacgugacauuguuggccgaggcacuggugaccguuacaaacauugaagucaucaauuguuccauuacugagaucgaaacgacuacuuccagcauaccuggugcgucagacaccgaccugauaccuaccgaaggaguaaaagcgaguuccacaucugacccuccugcccugccagauuccacagaagccaagccacacaucacagaggugaccgcuuccgccgagaccuuguccaccgccggaaccacagagucugccgcccccgaugcuaccguuggcacaccguuaccaacaaacuccgcaaccgagagagaagucaccgcgccuggagcuacaacucugagcggggcacuggucaccgucucgcgcaacccuuuagaagagaccucugcucuuuccguagagacacccaguuaugucaagguuuccggagccgccccugugagcaucgaagcggguagugcagucgggaaaaccacauccuuugccgggucguccgcuuccagcuacaguccaagugaggccgcgcugaagaacuuuaccccauccgaaacacccaccauggauaucgccacaaagggccccuuucccacaucccgggacccucugccaucugugcccccaaccacaaccaacucgucuagggguaccaacucaacacucgccaagaucaccacaagcgccaagaccacuaugaaaccaccuacagcuacucccacuacagccagaacuagacccaccaccgauguuagugcaggcgagaacgggggcuuuuuacuucuccgauugagugucgccucuccugaggaucugaccgacccaaggguggcugaacgacugaugcagcaauuacauagagaacuccacgcccacgcuccacacuuccaggugucuuuauuacguguucgcagaggcuag

SEQ ID NO: 101668 - DNA, 1026 bp, Artificial Sequence
  derived and/or modified sequence
ggacacagaggggcagagcaagtcagcattggcgccccttcctcagatccctatcatcttgggaaacagtagcccagaggttcaggaagatgttaacttaaatgttcagggtgccccagtctgttcagcatggctgaaatccacactccgtattcttccttgaagaaactgttatctttactcaatggcttcgtggctgtgtctggcatcatcctagttggcctgggcattggtggtaaatgtggaggggcctctctgacgaatgtcctcgggctgtcctccgcatacctccttcacgttggcaacctgtgcctggtgatgggatgcatcacggtactgcttggctgtgccgggtggtatggagcgactaaagagagcagaggcacgctcttgttttgcatcctgtcaatggttattgtcctcatcatggaagttacagctgccacagtggtccttcttttctttccaattgttggagatgtggccttggaacacaccttcgtgaccctgaggaagaattacagaggttacaacgagccagacgactattctacacagtggaacttggtcatggagaagggactctccaagtatttcttctcctctctatagctaaagtgctgtggggtgaataactacacagatttttctggctcttccttcgaaatgacaacgggccacacctaccccaggagttgctgtaaatccatcggaagtgtgtcctgtgacggacgcgatgtgtctccaaacgtcatccaccagaagggctgtttccataaactcctaaaaatcaccaagactcagagcttcaccctgagtgggagctctctgggagctgcagtgatacagttgccaggaattcttgccactttgctgctgtttatcaagctgggctgacacccaggcctggagaagatgagacacctgggcccatctggctgctggagattcagtctcagttttatttctctgtggcactcactgcttctggaggggagactgttaataaaagatttgggaaccccc

SEQ ID NO: 101669 - protein, 338 aa, Artificial Sequence
  derived and/or modified sequence
MAAMAVALRGLGGRFRWRTQAVAGGVRGAARGAAAGQRDYDLLVVGGGSGGLACAKEAAQLGRKVAVVDYVEPSPQGTRWGLGGTCVNVGCIPKKLMHQAALLGGLIQDAPNYGWEVAQPVPHDWRKMAEAVQNHVKSLNWGHRVQLQDRKVKYFNIKASFVDEHTVCGVAKGGKEILLSADHIIIATGGRPRYPTHIEGALEYGITSDDIFWLKESPGKTLVVGASYVALECAGFLTGIGLDTTIMMRSIPLRGFDQQMSSMVIEHMASHGTRFLRGCAPSRVRRLPDGQLQVTWEDSTTGKEDTGTFDTVLWAIAPCISACLPTTVGHAGKNQRRD

SEQ ID NO: 101670 - DNA, 1017 bp, Artificial Sequence
  derived and/or modified sequence
atggccgccatggccgtggccctgagaggcctgggcggcagattcagatggagaacccaggccgtggccggcggcgtgagaggcgccgccagaggcgccgccgccggccagagagactacgacctgctggtggtgggcggcggcagcggcggcctggcctgcgccaaggaggccgcccagctgggcagaaaggtggccgtggtggactacgtggagcccagcccccagggcaccagatggggcctgggcggcacctgcgtgaacgtgggctgcatccccaagaagctgatgcaccaggccgccctgctgggcggcctgatccaggacgcccccaactacggctgggaggtggcccagcccgtgccccacgactggagaaagatggccgaggccgtgcagaaccacgtgaagagcctgaactggggccacagagtgcagctgcaggacagaaaggtgaagtacttcaacatcaaggccagcttcgtggacgagcacaccgtgtgcggcgtggccaagggcggcaaggagatcctgctgagcgccgaccacatcatcatcgccaccggcggcagacccagataccccacccacatcgagggcgccctggagtacggcatcaccagcgacgacatcttctggctgaaggagagccccggcaagaccctggtggtgggcgccagctacgtggccctggagtgcgccggcttcctgaccggcatcggcctggacaccaccatcatgatgagaagcatccccctgagaggcttcgaccagcagatgagcagcatggtgatcgagcacatggccagccacggcaccagattcctgagaggctgcgcccccagcagagtgagaagactgcccgacggccagctgcaggtgacctgggaggacagcaccaccggcaaggaggacaccggcaccttcgacaccgtgctgtgggccatcgccccctgcatcagcgcctgcctgcccaccaccgtgggccacgccggcaagaaccagagaagagactag

SEQ ID NO: 101671 - DNA, 1017 bp, Artificial Sequence
  derived and/or modified sequence
atggctgcaatggccgtcgctctgcggggattgggaggtcgatttcggtggcggacccaggcagttgccgggggggttcggggcgcggctcgcggtgctgctgcgggacagcgcgactacgatctgctggttgttggaggtggctctggcggcctcgcttgcgcaaaggaagcggcgcaacttggcagaaaggtggcagtggtcgattacgtcgagccttcgccacagggcaccagatggggactgggagggacctgcgttaacgtggggtgcatcccaaaaaaactgatgcaccaagctgcgctcctcggcggactgattcaggacgccccgaattacgggtgggaggtggcccagcctgtgcctcacgactggcgcaagatggctgaggccgtgcagaatcatgttaaatctctgaattggggccaccgcgtccagcttcaggaccgcaaggtgaaatacttcaacatcaaagcctcctttgtcgacgagcatacggtgtgtggtgtggccaaggggggaaaagagattttactgtcagcggatcatatcattatcgcaactggaggccgacctcgttaccccacccatatcgagggcgcattagagtacggcatcacttctgatgatatcttctggcttaaggagtcacctgggaagaccctcgttgtaggagcatcctacgtcgctttagaatgtgccggattcctgacagggatcggactagacactacaattatgatgaggtcaattcccttaaggggctttgatcaacagatgtcctctatggtgattgagcatatggcctcgcacggcaccaggtttctgagggggtgcgctccatcaagggtgcgccggctccccgacggccagctccaggttacctgggaagactcgaccaccgggaaggaggacactgggacctttgacactgtgctctgggcaatagctccctgtatttctgcatgtctgcctaccacagtgggtcacgcaggcaaaaaccagcgtagggactag

SEQ ID NO: 101672 - DNA, 1017 bp, Artificial Sequence
  derived and/or modified sequence
atggccgccatggctgtggccctgcggggcctgggcggccgcttccgctggaggacccaggccgtggccggcggcgtgagaggagctgcccggggagctgctgctggccagagggactatgacctgctggtggtgggcggcggcagcggcggcctggcctgtgccaaggaggccgcccagctgggcaggaaggtggccgtggtggactatgtggagcccagcccccagggcacccgctggggcctgggcggcacctgtgtgaatgtgggctgcatccccaagaagctgatgcaccaggccgccctgctgggcggcctcatccaggatgcccccaactacggctgggaggtggcccagcctgtgccccatgactggaggaagatggccgaggccgtgcagaaccacgtgaagagcctgaactggggccaccgggtgcagctgcaggacaggaaggtgaagtacttcaacatcaaggccagctttgtggatgagcacacagtgtgtggggtggccaagggcggcaaggagatcctgctgtctgctgaccacatcatcatcgccaccggcggccggccccgctaccccacccacatcgagggcgccctggagtatggcatcaccagtgatgacatcttctggctgaaggagagccctgggaagaccctggtggtgggcgccagctatgtggccctggagtgtgccggcttcctgaccggcatcggcctggacaccaccatcatgatgaggagcatccccctgcggggctttgaccagcagatgagctccatggtgattgagcacatggccagccacggcacccgcttcctgcggggctgtgcccccagccgggtgcggcggctgcctgatggccagctgcaggtgacctgggaggacagcaccaccgggaaggaggacaccggcacctttgacacagtgctgtgggccatcgccccctgcatcagcgcctgcctgcccaccaccgtgggccatgctgggaagaaccagaggcgggactag

SEQ ID NO: 101673 - DNA, 1017 bp, Artificial Sequence
  derived and/or modified sequence
atggccgccatggccgtggccctgcggggcctgggcggccggttccggtggaggacccaggctgtagcagggggggtccgtggcgctgcaagaggagcagcagcaggtcagcgggattacgaccttctggttgtcggggggggctctgggggactggcctgtgccaaagaggcagctcagctcggaagaaaggtcgctgtagtggattacgttgaaccttctccgcaaggcacacgatgggggctaggtgggacatgtgtaaatgttgggtgcatacccaagaagctaatgcatcaggccgcactcctaggaggactgatccaggatgctcccaattacggttgggaggtggcccagcctgtgccccacgattggcggaagatggctgaggccgtgcagaaccacgtgaaaagtctgaactggggccacagggtccagttgcaggaccgcaaggttaaatacttcaatataaaagcatctttcgtcgacgaacacactgtctgcggcgtagcaaaaggagggaaagaaattctcctttcagccgaccatattatcatcgcaaccggcggacgcccacggtatccgacccatatcgagggggctctcgaatacggaataacttccgatgacatcttctggttgaaggaaagccccggaaaaaccctggtggtcggagcctcatatgtggccctcgagtgcgccgggtttcttaccggtatcggattggacaccaccatcatgatgaggtcaatcccgctgcgagggtttgaccagcagatgagttcgatggtcatagagcatatggcctcccacgggacgagattccttaggggttgcgccccaagtcgtgtccgcagacttcccgacgggcaactgcaggtgacctgggaagacagtacaactggcaaggaagacacgggcacctttgacactgtgctttgggctatagcaccttgcatctccgcttgccttcccaccactgttggtcatgccgggaagaaccaacgtagggattag

SEQ ID NO: 101674 - DNA, 1017 bp, Artificial Sequence
  derived and/or modified sequence
atggccgcaatggctgtggcgctgagaggattgggcggaagattccggtggcgaacacaggcagtggccggtggcgtcagaggggcagccagaggcgcagccgcaggccaaagggactacgatttgctggtcgtgggcggagggtcgggtggactggcctgcgcaaaagaagccgctcagctgggccgtaaagtggcagtcgtggactacgtggagccaagcccgcaaggcacccggtggggtctggggggaacatgcgttaatgttggctgcattcctaagaaactcatgcaccaggccgcactgctcggcggacttatacaggacgcacccaactatggatgggaggtcgctcagcctgtgccccacgattggcgcaaaatggcagaggccgtgcagaaccacgttaagagcttgaactgggggcacagggtccagcttcaggatcggaaggtcaagtatttcaatattaaggcatcttttgttgacgagcacaccgtttgtggggtcgcgaagggcggaaaagagatactcttaagcgctgaccacattattatagcaacaggagggcgaccgaggtacccaacacacatcgagggagcccttgagtatggcattacatccgatgatatcttctggctgaaagagtcccccggaaagactctcgtggtgggtgcctcatacgttgctctcgagtgtgcaggatttctgacaggaatcggcctggacaccacaattatgatgcggagtatccccctgagaggatttgatcagcagatgagctctatggttatagagcacatggcctcccacgggacccggttcttaagggggtgtgccccatccagagtacgtcgactccccgacggccaactccaggtgacctgggaagacagcaccactgggaaagaagatacaggtaccttcgacacagtgctgtgggctatcgccccttgtatttcggcctgcctacctaccaccgtggggcatgcaggcaagaaccagaggcgcgattag

SEQ ID NO: 101675 - DNA, 1893 bp, Artificial Sequence
  derived and/or modified sequence
gatggcggcaatggcggtggcgctgcggggattaggagggcgcttccggtggcggacgcaggccgtggcgggcggggtgcggggcgcggcgcggggcgcagcagcaggtcagcgggactatgatctcctggtggtcggcgggggatctggtggcctggcttgtgccaaggaggccgcccagctgggaaggaaggtggccgtggtggactacgtggaaccttctccccaaggcacccggtggggcctcggcggcacctgcgtcaacgtgggctgcatccccaagaagctgatgcaccaggcggcactgctgggaggcctgatccaagatgcccccaactatggctgggaggtggcccagcccgtgccgcatgactggaggaagatggcagaagctgttcaaaatcacgtgaaatccttgaactggggccaccgtgtccagcttcaggacagaaaagtcaagtactttaacatcaaagccagctttgttgacgagcacacggtttgcggcgttgccaaaggtgggaaagagattctgctgtcagccgatcacatcatcattgctactggagggcggccgagataccccacgcacatcgaaggtgccttggaatatggaatcacaagtgatgacatcttctggctgaaggaatcccctggaaaaacgttggtggtcggggccagctatgtggccctggagtgtgctggcttcctcaccgggattgggctggacaccaccatcatgatgcgcagcatccccctccgcggcttcgaccagcaaatgtcctccatggtcatagagcacatggcatctcatggcacccggttcctgaggggctgtgccccctcgcgggtcaggaggctccctgatggccagctgcaggtcacctgggaggacagcaccaccggcaaggaggacacgggcacctttgacaccgtcctgtgggccatagcaccttgcatctctgcgtgtctccccaccaccgtgggacatgctggaaaaaaccagagaagagactgagacggcatcagccaggtgtcctcatcgaggatcaactaggcaatcatcctcgccttccctggcccttgagcaattgcttattaaggtttcagcacataaatcctacttgtcaccttccaggtttaagtcttggtatgtttcttttctttttttttttttttttgagatggagtctcgctctgtcgcccaggctggagtgcagtggcaacctccgcctcccgggttcaagcgattctcctgcctcagcctcctgggtagctggggctacaggcgcccaccactacacctgactaatttttgtatttttagtagagacggggtttcaccatgtaggccaggatggtctcaatctcctgaccttgtgatccacctgccttggcctcccaaagtactgagattacaggtgtgagccaccgcacctggccagtatgtattttttctttagcatattaaatgttttgctgcttcaggctttccagctaggtttttttctttttttgcgtgtgaaacagggtctctctctgttgcctaggaggagtgtggtggtgtgatcatagctcactgcagcctccacctcccaggctcaatcaatcttcccatctcagccttctaagtgctgggattacaggtttgagctactgtgcccagccaagctagtttgttgtttttaacataaaaatgatatggatttgaaagttttaaaaattatggtgacatacacataacatcaaattcatcatcttaagcattttaaagtatatagttcagtggtgttaagtacgttcatattgtacaagcagcatgaccatccatctctagaacttttccattatctccaaactgagctctgtccccattaaacactcactccctgc

SEQ ID NO: 101676 - protein, 645 aa, Artificial Sequence
  derived and/or modified sequence
MSVSSGVQILTKPETVDRRRSAETTKEAGRPLEMAVSEPEASAAVSVTFKHVTMAFTQKEWKQLDPAQSNLYNDVMLENYCNQASMGCQAPKPDMISKLEKGEAPWLGKGKRPSQGCPSKIARPKQKETDGKVQKDDDQLENIQKSQNKLLREVAVKKKTQAKKNGSDCGSLGKKNNLHKKHVPSKKRLLKFESCGKILKQNLDLPDHSRNCVKRKSDAAKEHKKSFNHSLSDTRKGKKQTGKKHEKLSSHSSSDKCNKTGKKHDKLCCHSSSHIKQDKIQTGEKHEKSPSLSSSTKHEKPQACVKPYECNQCGKVLSHKQGLIDHQRVHTGEKPYECNECGIAFSQKSHLVVHQRTHTGEKPYECIQCGKAHGHKHALTDHLRIHTGEKPYECAECGKTFRHSSNLIQHVRSHTGEKPYECKECGKSFRYNSSLTEHVRTHTGEIPYECNECGKAFKYSSSLTKHMRIHTGEKPFECNECGKAFSKKSHLIIHQRTHTKEKPYKCNECGKAFGHSSSLTYHMRTHTGESPFECNQCGKGFKQIEGLTQHQRVHTGEKPYECNECGKAFSQKSHLIVHQRTHTGEKPYECNECEKAFNAKSQLVIHQRSHTGEKPYECNECGKTFKQNASLTKHVKTHSEDKSHE

SEQ ID NO: 101677 - DNA, 1938 bp, Artificial Sequence
  derived and/or modified sequence
atgagcgtgagcagcggcgtgcagatcctgaccaagcccgagaccgtggacagaagaagaagcgccgagaccaccaaggaggccggcagacccctggagatggccgtgagcgagcccgaggccagcgccgccgtgagcgtgaccttcaagcacgtgaccatggccttcacccagaaggagtggaagcagctggaccccgcccagagcaacctgtacaacgacgtgatgctggagaactactgcaaccaggccagcatgggctgccaggcccccaagcccgacatgatcagcaagctggagaagggcgaggccccctggctgggcaagggcaagagacccagccagggctgccccagcaagatcgccagacccaagcagaaggagaccgacggcaaggtgcagaaggacgacgaccagctggagaacatccagaagagccagaacaagctgctgagagaggtggccgtgaagaagaagacccaggccaagaagaacggcagcgactgcggcagcctgggcaagaagaacaacctgcacaagaagcacgtgcccagcaagaagagactgctgaagttcgagagctgcggcaagatcctgaagcagaacctggacctgcccgaccacagcagaaactgcgtgaagagaaagagcgacgccgccaaggagcacaagaagagcttcaaccacagcctgagcgacaccagaaagggcaagaagcagaccggcaagaagcacgagaagctgagcagccacagcagcagcgacaagtgcaacaagaccggcaagaagcacgacaagctgtgctgccacagcagcagccacatcaagcaggacaagatccagaccggcgagaagcacgagaagagccccagcctgagcagcagcaccaagcacgagaagccccaggcctgcgtgaagccctacgagtgcaaccagtgcggcaaggtgctgagccacaagcagggcctgatcgaccaccagagagtgcacaccggcgagaagccctacgagtgcaacgagtgcggcatcgccttcagccagaagagccacctggtggtgcaccagagaacccacaccggcgagaagccctacgagtgcatccagtgcggcaaggcccacggccacaagcacgccctgaccgaccacctgagaatccacaccggcgagaagccctacgagtgcgccgagtgcggcaagaccttcagacacagcagcaacctgatccagcacgtgagaagccacaccggcgagaagccctacgagtgcaaggagtgcggcaagagcttcagatacaacagcagcctgaccgagcacgtgagaacccacaccggcgagatcccctacgagtgcaacgagtgcggcaaggccttcaagtacagcagcagcctgaccaagcacatgagaatccacaccggcgagaagcccttcgagtgcaacgagtgcggcaaggccttcagcaagaagagccacctgatcatccaccagagaacccacaccaaggagaagccctacaagtgcaacgagtgcggcaaggccttcggccacagcagcagcctgacctaccacatgagaacccacaccggcgagagccccttcgagtgcaaccagtgcggcaagggcttcaagcagatcgagggcctgacccagcaccagagagtgcacaccggcgagaagccctacgagtgcaacgagtgcggcaaggccttcagccagaagagccacctgatcgtgcaccagagaacccacaccggcgagaagccctacgagtgcaacgagtgcgagaaggccttcaacgccaagagccagctggtgatccaccagagaagccacaccggcgagaagccctacgagtgcaacgagtgcggcaagaccttcaagcagaacgccagcctgaccaagcacgtgaagacccacagcgaggacaagagccacgagtag

SEQ ID NO: 101678 - DNA, 1938 bp, Artificial Sequence
  derived and/or modified sequence
atgagcgtttcgtccggagtccagatactgactaagcctgaaactgtcgatcgcaggcgcagtgctgagactaccaaggaggcaggaaggccacttgagatggccgtcagtgaacccgaggcctctgccgccgtgtcggtgacttttaaacatgtgactatggccttcacccagaaagaatggaagcaactggatccagcgcaaagtaacctctataatgacgtgatgctcgagaactattgtaatcaggcaagtatgggctgtcaggcacctaaaccagacatgatctcaaagttggagaaaggagaagcaccttggcttgggaagggaaagcgacccagccagggttgcccctccaaaatcgcacggcctaaacaaaaagagaccgatggaaaagttcaaaaagatgatgaccagttggaaaacatccagaagagtcagaataagttactcagggaggtcgcagtgaaaaagaaaacacaagccaagaaaaatggtagtgattgtggttcactgggcaagaaaaataacctgcataaaaagcatgtacccagtaagaagagactgcttaaatttgagtcttgcggcaagattctcaaacaaaatctcgacctgcctgatcactcgaggaattgcgtgaagagaaagtccgatgctgccaaggaacataagaaatcatttaatcactccttgtcagacactaggaagggcaagaaacagacgggcaagaaacatgaaaagctttcttcccactctagttcggacaagtgcaacaagacggggaagaagcacgataagctgtgctgccactcaagcagccatattaagcaagataagatacaaaccggagaaaagcacgaaaagagcccttcactgtctagctcaacaaagcacgagaagccgcaggcgtgcgttaaaccctacgagtgcaaccaatgtggtaaggtcctgtcccataaacaggggctcattgatcatcagcgggttcacacaggagaaaaaccatatgaatgcaacgaatgcggtatcgcatttagtcaaaagtcacaccttgtggttcatcaacgaacccacacaggagagaaaccatacgagtgtatacagtgcggcaaggcacacgggcacaagcacgccctgactgatcacctgcggattcacaccggagaaaaaccatatgaatgtgcggaatgtggaaaaacgtttcgccacagcagcaatttgatccagcacgtgcgatcacacacaggcgaaaaaccctatgaatgtaaggagtgtgggaaatctttccgctataatagctccctcacagagcacgtgcgaactcacacaggagagataccatacgaatgcaatgaatgcggcaaggctttcaaatacagcagctctcttacaaaacacatgagaatacacactggcgagaaacccttcgagtgtaacgagtgtggaaaggccttctcaaaaaagtcccatttaatcattcaccagcgtactcacactaaggagaaaccatataagtgcaatgagtgcggaaaagctttcggacactcatcttctttgacataccacatgcggacgcatacaggcgaatccccctttgaatgtaaccagtgtggtaagggattcaagcagatcgagggcctgacccagcatcaacgtgtgcataccggcgaaaagccttatgaatgtaatgagtgtggcaaagccttttcccagaagtcgcacctgatcgttcaccagcggacccacaccggggagaagccgtacgagtgtaacgagtgtgagaaagctttcaatgccaaatctcagttggtgatccaccagaggtcacacaccggagaaaagccctatgaatgcaatgagtgcggcaaaaccttcaaacaaaacgcttccctgacaaagcatgtcaaaactcattctgaagacaagtcccacgagtag

SEQ ID NO: 101679 - DNA, 1938 bp, Artificial Sequence
  derived and/or modified sequence
atgtctgtgtcctctggagtgcagatcctgaccaagccagagaccgtggacagaagaagatctgctgagaccaccaaggaggccggccggcccctggagatggctgtgtctgagcctgaggccagcgctgctgtgtctgtgaccttcaagcacgtgaccatggccttcacccagaaggagtggaagcagctggaccctgcccagagcaacctgtacaatgatgtgatgctggagaactactgcaaccaggcctccatgggctgccaggcccccaagccagacatgatcagcaagctggagaagggggaggccccctggctgggcaagggcaagaggcccagccagggctgccccagcaagatcgcccggcccaagcagaaggagacagatggcaaggtgcagaaggatgatgaccagctggagaacatccagaagagccagaacaagctgctgcgggaggtggccgtgaagaagaagacccaggccaagaagaatggaagtgactgtggcagcctgggcaagaagaacaacctgcacaagaagcacgtgcccagcaagaagaggctgctgaagtttgagagctgtgggaagatcctgaagcagaacctggacctgcctgaccacagcaggaactgtgtgaagaggaagagtgatgctgccaaggagcacaagaagagcttcaaccacagcctgagtgacaccaggaagggcaagaagcagacaggcaagaagcatgagaagctgagcagccacagcagcagtgacaagtgcaacaagacaggcaagaagcatgacaagctgtgctgccacagcagcagccacatcaagcaggacaagatccagacaggagagaagcatgagaagagccccagcctgagcagcagcaccaagcatgagaagccccaggcctgtgtgaagccctatgagtgcaaccagtgtgggaaggtgctgagccacaagcagggcctgattgaccaccagagggtgcacactggagagaagccctatgaatgtaatgaatgtggcatcgccttcagccagaagagccacctggtggtgcaccagaggacccacactggagagaagccctatgagtgcatccagtgtgggaaggcccacggccacaagcacgccctgacagaccacctgcgcatccacactggagagaagccctatgaatgtgccgagtgtgggaagaccttccgccacagcagcaacctgatccagcacgtgcgcagccacactggagagaagccctatgagtgcaaggaatgtgggaagagcttccgctacaacagcagcctgacagagcacgtgaggacccacactggagagatcccctatgaatgtaatgaatgtgggaaggccttcaagtacagcagcagcctgaccaagcacatgaggatccacactggagagaagccctttgaatgtaatgaatgtgggaaggccttcagcaagaagagccacctgatcatccaccagaggacccacaccaaggagaagccctacaagtgcaatgaatgtgggaaggccttcggccacagcagcagcctgacctaccacatgaggacccacactggagagagcccctttgagtgcaaccagtgtgggaagggcttcaagcagatcgagggcctgacccagcaccagagggtgcacactggagagaagccctatgaatgtaatgaatgtgggaaggccttcagccagaagagccacctgattgtgcaccagaggacccacactggagagaagccctatgaatgtaatgaatgtgagaaggccttcaatgccaagagccagctggtgatccaccagaggagccacactggagagaagccctatgaatgtaatgaatgtgggaagaccttcaagcagaatgccagcctgaccaagcacgtgaagacccacagcgaggacaagagccatgaatag

SEQ ID NO: 101680 - DNA, 1938 bp, Artificial Sequence
  derived and/or modified sequence
atgagcgtgagcagcggcgtgcagatcctgaccaagcccgagaccgtcgaccgccgtagatccgctgaaacaaccaaggaggctggcagacctctcgaaatggccgtatccgaacccgaagccagcgcagcagtgtctgtcaccttcaagcatgtgacaatggcctttacgcaaaaagagtggaaacaactggacccagcccagagcaatctgtataatgatgttatgctcgaaaactactgtaatcaggcctccatggggtgtcaggccccaaaacctgatatgatctccaagctggagaagggagaggccccctggctggggaagggaaagcggccgtcccagggttgcccatctaagatcgcccgcccaaaacagaaagagaccgacggaaaagttcagaaggacgatgatcagctcgagaatatccagaagtcacagaacaagctccttcgtgaggtagctgttaaaaagaaaactcaggcaaagaaaaatggctccgattgcggaagccttgggaagaagaacaacctgcacaagaagcacgtgccatccaagaaacggctccttaaattcgaatcctgtgggaaaatattgaaacaaaacctggacctgccggaccattctaggaattgtgtgaagcgaaaatcagacgcagcgaaggaacataagaagagttttaatcacagcttgtctgacacacggaaaggcaagaagcagaccggtaagaagcatgaaaagttatctagtcactctagctccgacaaatgtaacaagaccggaaaaaaacacgataaactgtgctgtcactccagctctcacattaagcaggacaagatccagacgggcgagaaacacgaaaagtctccatctctctcatcatcaaccaagcacgaaaagccccaggcttgtgttaaaccctatgaatgcaatcagtgtggcaaagtgctgtctcataagcagggcctgatcgatcatcagagagtgcatacgggcgagaagccatacgagtgtaacgagtgtgggatcgcattcagccagaagagtcatctggtggtccaccagcgcactcatacaggggaaaagccatatgagtgtatacagtgtggcaaggcgcacggtcataaacacgctctgacagaccacctgaggatccatacgggtgaaaagccctatgaatgtgccgagtgtggcaaaaccttccgtcattcctccaatttgatccagcacgtcaggtcacacactggcgagaaaccttacgaatgtaaggagtgtggaaagagtttccgatacaacagctcactcacggagcacgtacgtacacacacaggtgaaattccgtacgagtgcaacgagtgcggcaaagcgtttaaatattcttcctcactgacaaaacatatgagaatccacacaggcgagaagccctttgagtgcaatgagtgcggtaaggcttttagcaagaagtctcacctaatcattcaccagcggacgcataccaaggaaaagccctacaaatgcaacgaatgtggtaaggcattcggacattcctccagcttgacttaccatatgagaacgcataccggcgaatccccttttgagtgcaaccagtgtgggaagggctttaaacagatcgaaggactaactcagcaccagagagtgcatactggcgagaaaccttacgagtgcaatgagtgcgggaaggcatttagtcaaaagtcccatctgattgtgcaccaacgcacacatactggtgagaaaccctatgaatgcaacgagtgtgagaaagcattcaacgctaaatcccagctggtgatccaccagagatcacacacaggagagaagccctacgaatgtaacgagtgcggcaagacctttaaacagaatgccagcttgaccaaacatgtcaaaactcactctgaggataagtcccacgagtag

SEQ ID NO: 101681 - DNA, 1938 bp, Artificial Sequence
  derived and/or modified sequence
atgtctgtgagcagtggagtccagatcctgacaaagcctgaaactgttgatcgacgccgttcggccgagacgaccaaggaggcaggaagacccctcgagatggcagtgagcgaacccgaggcatccgctgcagtgagtgttactttcaaacacgtgactatggcttttacacagaaagaatggaaacaattggaccctgctcagagtaatctctataatgacgtgatgcttgaaaactactgtaatcaggcctccatgggatgccaggcaccaaagccagacatgatatctaagttggaaaagggggaagctccttggctgggaaaaggcaaacgcccttctcagggctgcccttcaaaaatcgcaaggcccaaacagaaggaaacggatggaaaggtgcagaaggacgatgatcagctggaaaacatccagaaaagtcaaaacaaactgctgcgagaggttgcagtaaagaaaaaaacccaggccaaaaagaatgggagtgactgcggcagcctagggaaaaaaaacaacctacacaaaaaacacgtgccatcaaaaaaaagacttctgaaattcgagagctgcggaaaaatcctgaaacagaatctggacctcccagatcattcccgaaactgcgttaagcgtaagagtgatgccgcaaaggagcataagaaatcttttaaccattcactgtcggatacccggaaggggaaaaaacagactgggaagaaacatgaaaaactcagttctcatagttcttcagacaaatgtaataaaacgggcaagaagcacgacaagctttgctgtcactctagcagccacattaagcaggacaagattcagaccggcgaaaaacacgagaaatcaccgagcctgtccagctcgaccaagcatgagaagccacaggcttgtgttaagccgtatgagtgtaatcaatgcggcaaggtattaagccacaagcagggcctgattgaccaccaaagggtgcacactggagaaaagccatacgagtgtaacgagtgcggaattgcattcagtcagaagagccatctcgtggtccatcagcgcacccacacaggggaaaagccttacgagtgcattcaatgtggaaaagctcatggccacaaacacgctttgacagaccaccttaggattcacaccggcgaaaagccatacgagtgcgccgaatgcggcaagaccttcaggcattcctcgaacctaatacagcatgtcaggtcacatacaggagaaaagccttatgagtgtaaagagtgtggcaaatccttccgctacaactcaagcttgactgagcatgttaggacccacaccggcgaaatcccgtacgaatgcaatgagtgcgggaaggcgttcaaatatagtagcagtctgaccaagcacatgcgaatccacaccggcgagaagcccttcgaatgcaacgagtgcggtaaggccttctctaagaaatcccacctgatcatccatcaaaggactcacacaaaggagaagccttataaatgcaacgaatgtggtaaagcattcggacatagcagcagcttaacatatcacatgagaacacacaccggtgagtctcctttcgagtgcaaccagtgcggcaagggctttaaacagatcgaggggctgacccagcaccagcgggtacacacaggggagaagccctacgaatgcaacgaatgcggtaaagccttttcccagaagagccaccttattgtgcatcagcgtactcacaccggtgaaaaaccatacgaatgcaatgaatgtgaaaaagcattcaatgctaagtcgcagcttgtcatccatcaaaggagtcacactggggaaaagccttacgaatgtaacgagtgcggcaagactttcaagcaaaatgcctctctcacaaaacacgtcaaaacccacagcgaagacaagagccacgaatag

SEQ ID NO: 101682 - DNA, 1969 bp, Artificial Sequence
  derived and/or modified sequence
atgtcggtctccagcggcgtccagattctgacaaagccagagaccgtggaccggaggagaagtgcggaaacgaccaaagaggccgggcgaccactggagatggctgtgtccgagcccgaggccagcgccgcggtatcagtaacattcaaacatgtgactatggcctttacccagaaggaatggaagcaactggatcctgctcagagcaacctgtataatgatgtgatgctggagaactactgcaaccaagcctcaatggggtgtcaagctcccaaaccagacatgatctccaagttggaaaaaggagaagcaccatggttggggaaggggaaaagacccagtcaaggttgtccaagtaaaatagcaagacccaagcaaaaagaaactgatggaaaagtccagaaagatgatgaccagcttgaaaatatccagaaatctcaaaacaaactcctcagggaagttgcagtcaagaagaaaactcaagctaagaagaatggcagtgactgtggttcactggggaaaaaaaataatttgcataaaaaacatgttccttcaaagaaaaggcttcttaaatttgagtcatgtggaaaaattttgaaacagaatttagatttacctgatcactcaagaaactgtgtaaaaaggaaatctgatgcagctaaagaacacaagaagtcattcaaccatagcttatctgatacaaggaaaggcaaaaagcaaactggaaagaaacatgagaaattatccagccatagctcatctgataagtgtaacaaaactggcaaaaaacatgacaaattatgctgtcatagttcatcccatattaaacaggacaaaattcaaactggagagaaacatgagaaatcacccagccttagctcatctactaagcatgaaaaacctcaagcttgtgtgaaaccctatgaatgtaatcaatgtggaaaggttctcagccataaacaaggactcattgaccatcagagagttcatactggggagaaaccatatgaatgtaatgaatgtgggatagcctttagccaaaagtcacaccttgttgtacatcagagaactcacaccggagaaaaaccatatgaatgtattcagtgtggcaaagcccatggtcataaacatgcactcactgaccatctaagaattcatactggagaaaagccctatgaatgtgctgaatgtgggaaaaccttcagacacagctcaaaccttattcaacatgtgagatctcacacaggtgagaagccatatgaatgtaaggaatgtgggaagtcttttaggtataactcatctcttaccgaacatgtgagaacacatacaggtgaaataccatatgaatgcaatgaatgtggaaaagcctttaagtatagctcatcccttactaaacacatgagaattcatacaggtgagaaaccctttgaatgtaatgaatgtgggaaagctttcagcaagaagtcacacctcattatacatcaaagaactcatactaaggagaaaccttataaatgtaatgagtgtggaaaagcctttggacatagctcatctcttacttaccatatgagaactcatacaggtgaaagtccctttgaatgtaatcaatgtgggaaaggctttaaacaaattgaaggccttactcaacatcagagagttcatactggagagaaaccgtatgagtgtaatgaatgtgggaaagcctttagccaaaagtctcacctcattgtacatcagagaactcatactggggagaaaccttatgaatgtaacgaatgtgaaaaagcctttaatgcaaaatcacagcttgttatacatcagcgatcccacactggagaaaaaccctatgaatgtaatgaatgtgggaaaactttcaaacaaaatgcatccctaaccaaacatgtgaaaactcattcagaagataaatctcatgagtgaagttaatgtgggaaatttgttaactaaattt

SEQ ID NO: 101683 - protein, 176 aa, Artificial Sequence
  derived and/or modified sequence
MGRPAGLFPPLCPFLGFRPEACWERHMQIERAPSVPPFLRWAGYRPGPVRRRGKVELIKFVRVQWRRPQVEWRRRRWGPGPGASMAGSEELGLREDTLRVLAAFLRRGEAAGSPVPTPPRPSYSRLLCFGGPAAGTAGPRAAEISAQPRITGSPIDREGSHTAEAGGPAGGGGRSH

SEQ ID NO: 101684 - DNA, 531 bp, Artificial Sequence
  derived and/or modified sequence
atgggtcgccctgctggccttttccctcctctgtgccccttcctaggatttagaccagaggcctgttgggaacgccacatgcagattgaaagggccccttcagtgccaccttttctcagatgggcaggttacaggcctgggcccgtgagaaggagggggaaagtggagctcatcaaattcgttcgcgtacagtggcgtcggcctcaagtggagtggcgcagaaggcgctggggccccggaccgggggcctcgatggctggttccgaggaactggggctgcgtgaggatacactgagggttctggcagcctttcttagaagaggggaggccgccgggtctcccgtacccactccacctaggcctagctatagccggttgctttgcttcggtgggcccgccgccggaacagctggcccgagggccgctgaaatttctgcccagccaaggattaccggaagccccatcgacagagaggggagccacacagcagaggccggaggacctgctggcggaggcggacggagccattag

SEQ ID NO: 101685 - DNA, 531 bp, Artificial Sequence
  derived and/or modified sequence
atgggccggcctgctggcctcttcccccccctgtgccccttcctgggcttccggcctgaggcctgctgggagcggcacatgcagatcgagcgggcccccagcgtgccccccttcctgcgctgggccggctaccggcccggccctgtgagaagaagaggcaaggtggagctgatcaagtttgtgcgggtgcagtggaggcggccccaggtggagtggaggagaagacgctggggccctggccctggggcctccatggccggcagcgaggagctgggcctgcgggaggacaccctgcgggtgctggccgccttcctgcggcggggggaggccgccggcagccctgtgcccaccccaccccggcccagctacagccggctgctgtgctttggaggccctgctgctggaacagctggccccagggctgctgagatcagcgcccagccccgcatcaccggcagccccatcgaccgggagggcagccacacagctgaggccggcggccctgctgggggcggcggccgcagccactag

SEQ ID NO: 101686 - DNA, 531 bp, Artificial Sequence
  derived and/or modified sequence
atgggccggcccgccggcctgttcccccccctgtgccccttcctgggatttagacctgaagcgtgctgggaacgtcatatgcagatcgagagggccccctccgtgcccccttttcttcgctgggccgggtatagacccggcccagtgcggcgacgcggaaaggtagagctgataaagttcgtccgagtgcagtggaggagaccacaagtagaatggaggagacgacgatggggacccggccccggggcatccatggcgggatccgaggagctcggcctgcgcgaagacactctaagggtgctggcggcctttctgaggcgtggtgaagctgcggggagcccggtgccgaccccgccgcgcccttcatattctcgtcttctttgtttcggaggacctgctgctgggacagcaggtcctcgcgccgccgagatatccgctcagccacgaatcacaggctccccgattgaccgggagggctcacacaccgctgaagcgggcgggccggccggtggcggaggccgaagccactag

SEQ ID NO: 101687 - DNA, 531 bp, Artificial Sequence
  derived and/or modified sequence
atgggtaggccagccggtctgttccctcccctatgcccatttctcggatttcggcctgaagcatgctgggaacggcacatgcagatcgagcgtgctccgtcagtgcctccgtttttgcgatgggccggatatcggcctggtccagtgagacgcaggggtaaggtggagctgattaagtttgttcgcgtgcagtggcgccgtccgcaggttgagtggcgtcggaggaggtggggcccaggacctggcgcttcaatggcaggctccgaagaattggggctgagagaagataccttgcgggtgctagccgcatttctgagacgcggagaggctgccggtagcccagttcccacgccgcctaggccgtcttactcccggctgctgtgcttcggaggacccgcagccggtactgcgggacctcgggctgctgagatatctgcccaaccacggataactggatcacctattgatagagaagggtcccacacggcagaggccggaggcccagccggtgggggaggaagaagccactag

SEQ ID NO: 101688 - DNA, 531 bp, Artificial Sequence
  derived and/or modified sequence
atgggcagacccgccggcctgttcccccccctgtgccccttcctgggcttcagacccgaggcctgctgggagagacacatgcagatcgagagagcccccagcgtgccccccttcctgagatgggccggctacagacccggccccgtgagaagaagaggcaaggtggagctgatcaagttcgtgagagtgcagtggagaagaccccaggtggagtggagaagaagaagatggggccccggccccggcgccagcatggccggcagcgaggagctgggcctgagagaggacaccctgagagtgctggccgccttcctgagaagaggcgaggccgccggcagccccgtgcccaccccccccagacccagctacagcagactgctgtgcttcggcggccccgccgccggcaccgccggccccagagccgccgagatcagcgcccagcccagaatcaccggcagccccatcgacagagagggcagccacaccgccgaggccggcggccccgccggcggcggcggcagaagccactag

SEQ ID NO: 101689 - protein, 631 aa, Artificial Sequence
  derived and/or modified sequence
MSVSSGVQILTKPETVDRRRSAETTKEAGRPLEMAVSEPEASAAKEWKQLDPAQSNLYNDVMLENYCNQASMGCQAPKPDMISKLEKGEAPWLGKGKRPSQGCPSKIARPKQKETDGKVQKDDDQLENIQKSQNKLLREVAVKKKTQAKKNGSDCGSLGKKNNLHKKHVPSKKRLLKFESCGKILKQNLDLPDHSRNCVKRKSDAAKEHKKSFNHSLSDTRKGKKQTGKKHEKLSSHSSSDKCNKTGKKHDKLCCHSSSHIKQDKIQTGEKHEKSPSLSSSTKHEKPQACVKPYECNQCGKVLSHKQGLIDHQRVHTGEKPYECNECGIAFSQKSHLVVHQRTHTGEKPYECIQCGKAHGHKHALTDHLRIHTGEKPYECAECGKTFRHSSNLIQHVRSHTGEKPYECKECGKSFRYNSSLTEHVRTHTGEIPYECNECGKAFKYSSSLTKHMRIHTGEKPFECNECGKAFSKKSHLIIHQRTHTKEKPYKCNECGKAFGHSSSLTYHMRTHTGESPFECNQCGKGFKQIEGLTQHQRVHTGEKPYECNECGKAFSQKSHLIVHQRTHTGEKPYECNECEKAFNAKSQLVIHQRSHTGEKPYECNECGKTFKQNASLTKHVKTHSEDKSHE

SEQ ID NO: 101690 - DNA, 1896 bp, Artificial Sequence
  derived and/or modified sequence
atgagcgtgagcagcggcgtgcagatcctgaccaagcccgagaccgtggacagaagaagaagcgccgagaccaccaaggaggccggcagacccctggagatggccgtgagcgagcccgaggccagcgccgccaaggagtggaagcagctggaccccgcccagagcaacctgtacaacgacgtgatgctggagaactactgcaaccaggccagcatgggctgccaggcccccaagcccgacatgatcagcaagctggagaagggcgaggccccctggctgggcaagggcaagagacccagccagggctgccccagcaagatcgccagacccaagcagaaggagaccgacggcaaggtgcagaaggacgacgaccagctggagaacatccagaagagccagaacaagctgctgagagaggtggccgtgaagaagaagacccaggccaagaagaacggcagcgactgcggcagcctgggcaagaagaacaacctgcacaagaagcacgtgcccagcaagaagagactgctgaagttcgagagctgcggcaagatcctgaagcagaacctggacctgcccgaccacagcagaaactgcgtgaagagaaagagcgacgccgccaaggagcacaagaagagcttcaaccacagcctgagcgacaccagaaagggcaagaagcagaccggcaagaagcacgagaagctgagcagccacagcagcagcgacaagtgcaacaagaccggcaagaagcacgacaagctgtgctgccacagcagcagccacatcaagcaggacaagatccagaccggcgagaagcacgagaagagccccagcctgagcagcagcaccaagcacgagaagccccaggcctgcgtgaagccctacgagtgcaaccagtgcggcaaggtgctgagccacaagcagggcctgatcgaccaccagagagtgcacaccggcgagaagccctacgagtgcaacgagtgcggcatcgccttcagccagaagagccacctggtggtgcaccagagaacccacaccggcgagaagccctacgagtgcatccagtgcggcaaggcccacggccacaagcacgccctgaccgaccacctgagaatccacaccggcgagaagccctacgagtgcgccgagtgcggcaagaccttcagacacagcagcaacctgatccagcacgtgagaagccacaccggcgagaagccctacgagtgcaaggagtgcggcaagagcttcagatacaacagcagcctgaccgagcacgtgagaacccacaccggcgagatcccctacgagtgcaacgagtgcggcaaggccttcaagtacagcagcagcctgaccaagcacatgagaatccacaccggcgagaagcccttcgagtgcaacgagtgcggcaaggccttcagcaagaagagccacctgatcatccaccagagaacccacaccaaggagaagccctacaagtgcaacgagtgcggcaaggccttcggccacagcagcagcctgacctaccacatgagaacccacaccggcgagagccccttcgagtgcaaccagtgcggcaagggcttcaagcagatcgagggcctgacccagcaccagagagtgcacaccggcgagaagccctacgagtgcaacgagtgcggcaaggccttcagccagaagagccacctgatcgtgcaccagagaacccacaccggcgagaagccctacgagtgcaacgagtgcgagaaggccttcaacgccaagagccagctggtgatccaccagagaagccacaccggcgagaagccctacgagtgcaacgagtgcggcaagaccttcaagcagaacgccagcctgaccaagcacgtgaagacccacagcgaggacaagagccacgagtag

SEQ ID NO: 101691 - DNA, 1896 bp, Artificial Sequence
  derived and/or modified sequence
atgtcagtgtcttccggggtgcagatcctcaccaaaccggagaccgtggatcgcagacgtagtgctgaaactaccaaggaggcgggtcgacctttggaaatggccgtgtccgaacctgaggcctccgccgctaaagaatggaaacagttagaccccgcacagagcaacctgtacaatgacgtgatgctcgaaaactactgcaatcaggcctctatgggatgccaggctcctaaacccgatatgatatcaaaattagagaagggagaagcgccgtggctgggcaaaggtaagcgcccctcccagggttgccctagtaaaattgccaggccaaagcagaaggagactgacggaaaggttcagaaagacgatgatcaactcgaaaatattcagaagagtcaaaacaaactgttgagggaggtcgccgttaagaagaaaacacaggctaagaagaacggatcagactgtggttccctgggaaaaaagaacaacctgcataagaagcacgtgccttctaaaaagaggttactcaagtttgaaagctgtggcaagattctgaagcagaatctggacctccctgaccattctagaaactgtgttaagaggaaatctgacgccgccaaggaacataagaaaagcttcaaccactccctttcagacacaagaaagggaaaaaaacagacaggaaaaaaacatgaaaaactgagctcccattcttcttccgacaagtgcaacaaaacagggaagaaacacgacaaactgtgttgccattcttcttcacacattaaacaagacaagatccagaccggggaaaaacacgagaagagccccagcctgtcgagctctacaaaacacgagaagcctcaagcctgtgtgaagccttacgaatgtaaccagtgcggcaaagtgctgagccataaacaaggcttaattgatcatcagcgcgtccacactggggaaaaaccatatgagtgcaatgaatgcgggatcgcattttcacagaaatcccacctggtagtgcatcagagaacacacaccggcgaaaagccctatgagtgtattcagtgcggcaaagcacacggccacaaacacgccctgacagaccatctccgtatccataccggagagaagccgtacgagtgcgctgaatgcggtaaaactttcagacactcatccaacttgatccaacacgtccggagtcacacaggcgaaaagccttacgaatgcaaggaatgcgggaaatccttcaggtataatagtagcctgacggaacacgtgcgaacccatacgggtgagatcccatatgaatgcaatgagtgtggtaaggccttcaagtactcttcatccctgaccaagcatatgaggatacataccggggagaagccttttgaatgcaacgagtgtggcaaggcgttctcaaagaagagccacctcatcatccaccagcggacccatactaaggagaaaccatataaatgtaatgaatgcgggaaagcattcggccacagctcttctcttacgtaccatatgcgtactcatacaggggagtccccctttgaatgcaaccagtgtggcaaaggattcaaacagatagaagggcttacccagcaccagagagtgcacactggtgaaaaaccttacgaatgcaacgagtgtggtaaggccttttcccagaagagccacctgatagtgcatcagaggacacataccggcgaaaaaccttatgagtgtaacgagtgtgaaaaggcgttcaatgcaaaatcacagctagttatacaccagaggagtcacactggagagaaaccttatgagtgtaacgagtgtggtaaaactttcaagcagaacgccagcctgaccaaacatgtgaaaactcatagtgaagataagtcacacgagtag

SEQ ID NO: 101692 - DNA, 1896 bp, Artificial Sequence
  derived and/or modified sequence
atgtctgtgtcctctggagtgcagatcctgaccaagccagagaccgtggacagaagaagatctgctgagaccaccaaggaggccggccggcccctggagatggctgtgtctgagcctgaggccagcgctgccaaggagtggaagcagctggaccctgcccagagcaacctgtacaatgatgtgatgctggagaactactgcaaccaggcctccatgggctgccaggcccccaagccagacatgatcagcaagctggagaagggggaggccccctggctgggcaagggcaagaggcccagccagggctgccccagcaagatcgcccggcccaagcagaaggagacagatggcaaggtgcagaaggatgatgaccagctggagaacatccagaagagccagaacaagctgctgcgggaggtggccgtgaagaagaagacccaggccaagaagaatggaagtgactgtggcagcctgggcaagaagaacaacctgcacaagaagcacgtgcccagcaagaagaggctgctgaagtttgagagctgtgggaagatcctgaagcagaacctggacctgcctgaccacagcaggaactgtgtgaagaggaagagtgatgctgccaaggagcacaagaagagcttcaaccacagcctgagtgacaccaggaagggcaagaagcagacaggcaagaagcatgagaagctgagcagccacagcagcagtgacaagtgcaacaagacaggcaagaagcatgacaagctgtgctgccacagcagcagccacatcaagcaggacaagatccagacaggagagaagcatgagaagagccccagcctgagcagcagcaccaagcatgagaagccccaggcctgtgtgaagccctatgagtgcaaccagtgtgggaaggtgctgagccacaagcagggcctgattgaccaccagagggtgcacactggagagaagccctatgaatgtaatgaatgtggcatcgccttcagccagaagagccacctggtggtgcaccagaggacccacactggagagaagccctatgagtgcatccagtgtgggaaggcccacggccacaagcacgccctgacagaccacctgcgcatccacactggagagaagccctatgaatgtgccgagtgtgggaagaccttccgccacagcagcaacctgatccagcacgtgcgcagccacactggagagaagccctatgagtgcaaggaatgtgggaagagcttccgctacaacagcagcctgacagagcacgtgaggacccacactggagagatcccctatgaatgtaatgaatgtgggaaggccttcaagtacagcagcagcctgaccaagcacatgaggatccacactggagagaagccctttgaatgtaatgaatgtgggaaggccttcagcaagaagagccacctgatcatccaccagaggacccacaccaaggagaagccctacaagtgcaatgaatgtgggaaggccttcggccacagcagcagcctgacctaccacatgaggacccacactggagagagcccctttgagtgcaaccagtgtgggaagggcttcaagcagatcgagggcctgacccagcaccagagggtgcacactggagagaagccctatgaatgtaatgaatgtgggaaggccttcagccagaagagccacctgattgtgcaccagaggacccacactggagagaagccctatgaatgtaatgaatgtgagaaggccttcaatgccaagagccagctggtgatccaccagaggagccacactggagagaagccctatgaatgtaatgaatgtgggaagaccttcaagcagaatgccagcctgaccaagcacgtgaagacccacagcgaggacaagagccatgaatag

SEQ ID NO: 101693 - DNA, 1896 bp, Artificial Sequence
  derived and/or modified sequence
atgagcgtgagcagcggcgtgcagatcctgaccaagcccgagaccgtggatcgcaggcggtccgctgagaccacaaaggaagccggacgcccactggaaatggcagtttcagagccagaagcgagcgctgccaaggagtggaaacagttggacccggcacagtccaatctgtacaacgacgttatgctcgagaattactgtaatcaggcctcaatgggatgccaggcacccaagccagacatgatttctaagttggaaaaaggggaagccccttggctcggcaaaggcaagagaccgtcccagggatgtccgtccaaaatcgcccgaccaaagcaaaaggagactgacgggaaggtacagaaagatgatgatcagctcgagaacattcagaaaagccagaacaaattactgagagaggtcgccgtcaagaagaaaacccaagccaaaaaaaacggatctgattgtgggtcactggggaagaaaaataacctgcacaagaaacacgtgccttcaaagaaacgtctactgaaattcgaatcctgtggcaaaatactgaaacagaacctagaccttcccgaccactcacgcaactgtgttaagcgcaaatcagatgccgccaaggaacacaaaaagtcatttaatcactccctgtccgacactagaaaaggcaaaaagcaaacagggaaaaaacacgaaaagctgtcttcacatagcagcagtgacaagtgcaataagaccggaaagaagcacgataagctttgttgccatagttcgtcacacatcaaacaggacaagattcagacaggcgaaaagcacgagaagagcccttctctgagctcgtcaaccaagcatgaaaagccacaggcttgtgtgaaaccatatgagtgcaaccagtgcgggaaggtattgtcccacaaacaggggctcatcgaccatcagagagtgcacacaggagaaaagccatatgagtgtaacgagtgcggcattgcattttctcagaagagtcacctggtcgttcatcagaggacccacacgggcgagaagccgtacgaatgtatccagtgtggcaaagctcatggccataagcacgcactaactgatcacttacgaatccataccggcgagaagccttacgagtgtgctgagtgcggcaaaactttcagacatagctctaaccttatacagcacgtccggtcccatacaggggagaagccctacgaatgcaaggaatgcggcaagagttttagatataactcatctctgaccgaacacgtgagaactcacactggcgaaatcccatatgaatgtaacgagtgcggcaaggcatttaagtactccagctccctcactaaacacatgaggatccatactggggagaaaccatttgagtgcaacgagtgcggtaaagccttttctaagaaatcccatttaattatccatcagaggacacacaccaaggaaaaaccttataaatgtaacgaatgcggaaaagcgttcggacacagttcctctctaacgtaccatatgaggacccacaccggagagtcgccgttcgagtgtaaccaatgcggaaaggggtttaaacaaattgaaggactgacccagcaccagcgcgttcatacaggcgagaagccatacgaatgcaatgaatgtgggaaggcgtttagccagaagtcccaccttatcgtacaccagcgcacccacaccggggaaaaaccgtacgaatgcaacgaatgcgaaaaagcgttcaatgcgaaatcccaattggtgatccatcagagatcacatactggtgagaaaccttatgaatgcaacgagtgtggaaagacattcaaacaaaacgctagcttgactaaacacgttaaaactcactcggaagataaatcccacgaatag

SEQ ID NO: 101694 - DNA, 1896 bp, Artificial Sequence
  derived and/or modified sequence
atgagcgtttcgtcaggcgtgcagattctgacaaaaccagaaaccgtcgaccgcagaagaagtgcagagaccaccaaagaggctggacgtcccttggagatggcagtctctgagcccgaagctagtgccgcaaaagagtggaaacagctggatccagctcagtcaaatctgtataacgatgtcatgctagaaaattactgcaaccaggcgtccatgggttgccaggcacccaagcctgacatgattagtaaactggagaaaggagaggcgccatggttaggcaagggaaaacgaccctcccaggggtgtccatctaaaatcgctagacccaaacaaaaagaaacagatgggaaggtccagaaggatgacgaccaactggagaatattcagaagagtcaaaacaagttactgagggaagtagctgtcaagaaaaagactcaagccaagaagaacggttccgattgcggcagcttggggaagaagaataatctgcacaagaagcacgtgccctcaaagaagcgactgctgaaatttgaatcttgtggaaaaatcctcaagcaaaacctggatttgcctgaccacagcaggaactgtgtcaaacgcaagagtgacgccgctaaagagcacaagaaatcctttaaccatagcctctctgacaccaggaaaggcaaaaagcagaccggcaaaaaacacgaaaaactgtccagccactctagcagtgataaatgtaataaaaccggcaaaaaacatgataagctgtgttgccattcaagtagccacatcaagcaggacaaaatccagactggggagaagcacgaaaagtcccccagcctgtcgagctcgaccaagcacgagaaaccacaggcttgtgtgaagccttatgaatgtaatcagtgcggaaaggtgttgtcccacaagcagggcctcattgaccaccagagagtacacaccggagagaagccatatgaatgcaatgagtgtggtattgctttttctcagaagagccatctcgtagtgcatcagagaacacacacaggcgaaaaaccctacgagtgtatccagtgcggaaaagcacacggccataaacatgctctcaccgatcacctaagaatccataccggtgagaaaccttatgagtgcgccgaatgcgggaagacatttagacactctagtaatctgatacagcacgtcagatctcacaccggagaaaagccctatgaatgtaaggaatgcggaaagagctttcgatataactctagcctgactgaacacgtacgcactcataccggggaaatcccctatgagtgtaacgaatgcggcaaagcgttcaaatactcttcctcactaaccaaacacatgcgtattcatacaggagagaaaccattcgagtgtaacgaatgtggtaaggcgttcagcaaaaagtcacacttgataattcatcagagaacgcacaccaaagaaaaaccttacaagtgcaatgagtgcggcaaggcttttggccactcctcgtcacttacctaccatatgcggacacataccggagaaagtccgtttgagtgtaaccagtgcgggaaggggttcaagcagatcgaaggtcttacacaacaccaacgcgtccataccggcgaaaaaccgtacgaatgtaacgagtgcggcaaagccttctctcagaaatctcacctcattgtgcaccaacgcacgcataccggcgaaaagccttacgagtgcaacgagtgtgagaaggccttcaacgccaagtcacaactagtgattcatcagaggagtcacactggggagaagccgtatgagtgcaatgaatgtggcaaaacattcaagcagaatgcctctttgacgaagcatgtgaaaacacatagcgaagacaagtcccacgagtag

SEQ ID NO: 101695 - DNA, 2451 bp, Artificial Sequence
  derived and/or modified sequence
gtgcgctattaccgaagggcgccgccatcgcggctgccggacccgctaaggccgccctccgggtagccgccatgtcggtctccagcggcgtccagattctgacaaagccagagaccgtggaccggaggagaagtgcggaaacgaccaaagaggccgggcgaccactggagatggctgtgtccgagcccgaggccagcgccgcgaaggaatggaagcaactggatcctgctcagagcaacctgtataatgatgtgatgctggagaactactgcaaccaagcctcaatggggtgtcaagctcccaaaccagacatgatctccaagttggaaaaaggagaagcaccatggttggggaaggggaaaagacccagtcaaggttgtccaagtaaaatagcaagacccaagcaaaaagaaactgatggaaaagtccagaaagatgatgaccagcttgaaaatatccagaaatctcaaaacaaactcctcagggaagttgcagtcaagaagaaaactcaagctaagaagaatggcagtgactgtggttcactggggaaaaaaaataatttgcataaaaaacatgttccttcaaagaaaaggcttcttaaatttgagtcatgtggaaaaattttgaaacagaatttagatttacctgatcactcaagaaactgtgtaaaaaggaaatctgatgcagctaaagaacacaagaagtcattcaaccatagcttatctgatacaaggaaaggcaaaaagcaaactggaaagaaacatgagaaattatccagccatagctcatctgataagtgtaacaaaactggcaaaaaacatgacaaattatgctgtcatagttcatcccatattaaacaggacaaaattcaaactggagagaaacatgagaaatcacccagccttagctcatctactaagcatgaaaaacctcaagcttgtgtgaaaccctatgaatgtaatcaatgtggaaaggttctcagccataaacaaggactcattgaccatcagagagttcatactggggagaaaccatatgaatgtaatgaatgtgggatagcctttagccaaaagtcacaccttgttgtacatcagagaactcacaccggagaaaaaccatatgaatgtattcagtgtggcaaagcccatggtcataaacatgcactcactgaccatctaagaattcatactggagaaaagccctatgaatgtgctgaatgtgggaaaaccttcagacacagctcaaaccttattcaacatgtgagatctcacacaggtgagaagccatatgaatgtaaggaatgtgggaagtcttttaggtataactcatctcttaccgaacatgtgagaacacatacaggtgaaataccatatgaatgcaatgaatgtggaaaagcctttaagtatagctcatcccttactaaacacatgagaattcatacaggtgagaaaccctttgaatgtaatgaatgtgggaaagctttcagcaagaagtcacacctcattatacatcaaagaactcatactaaggagaaaccttataaatgtaatgagtgtggaaaagcctttggacatagctcatctcttacttaccatatgagaactcatacaggtgaaagtccctttgaatgtaatcaatgtgggaaaggctttaaacaaattgaaggccttactcaacatcagagagttcatactggagagaaaccgtatgagtgtaatgaatgtgggaaagcctttagccaaaagtctcacctcattgtacatcagagaactcatactggggagaaaccttatgaatgtaacgaatgtgaaaaagcctttaatgcaaaatcacagcttgttatacatcagcgatcccacactggagaaaaaccctatgaatgtaatgaatgtgggaaaactttcaaacaaaatgcatccctaaccaaacatgtgaaaactcattcagaagataaatctcatgagtgaagttaatgtgggaaatttgttaactaaatttaaggttttgttgaaccttggaaatatgctgattttaaagagtgttagaaagcctttagcaagatgtcacaccttgttgtacatgagaaactttgaaaatggatcttcatatagaatcagtggatggaaacaagggtttaaacttgatacaaaaccttttataaaaaatattgttttaactactcaattattataaatgatctacatgttcagattgaaattgaaagctttaaaaattgtgaattatttgaatattcaaagcaatggagaaacaagttatatatgctgacagttcctgtgtttcttcttgttttgtacttaagcaccatatattagagttgaatttgcatatctgtttattgccttatgtaaatgagtgtggccatctgtataagcctctttgacattttcacccagctctttcttaatgtctgtgttggcttctgcatcagca

SEQ ID NO: 101696 - DNA, 600 bp, Artificial Sequence
  derived and/or modified sequence
atggaccagactatgttagatgattccgccgcagaaagcttcaacggcaacgaaacactcggtcactcatccatcgcctccgggggcacacatagtcgggaaatgggtgactcaaactcagacgggaagactgggctcgagcaggacgagcagccactgaacctgagcgactctcctcttagtgctcaattaaccagcgaatacagaatcgatgaccataattctaacggcaagaataaatacaaaaatctgttaatcagtgatctcaaaatggagcgggaggcccgcgagaatggatcgaaatcaccggctcattcatactccagttatgattcagggaagaacgagagtgtggaccggggcgctgaagacctgagtctcaaccgcggcgatgaagacgaggatgatcatgaagaccatgacgattcagaaaaagtgaacgaaaccgacggagtggaggcggagcggcttaaggcattcaattcgagaccgattccttctcacctgacctcagctgtagcagaaagcatcctggcctccgcgtgcgagagcgagtcccgcaatgcggccaaacgaatgcggttagaacgccagcagtag

SEQ ID NO: 101697 - DNA, 1260 bp, Artificial Sequence
  derived and/or modified sequence
atgtcgtgttcagagtgccagaagagaatgcacctgaatcctgacggtactgatcacaaagacaacggaaagcctccaaccctcgtgacttccatgatcgattataatatgccgattacaatggcttacatgaaacatatgaaactccagctgctgaatagccagcaggacgaggacgagtcttctattgagtcagatgaatttgacatgagcgactctactaggatgtctgccgtcaattctgacctctcctccaacctcgaagaacgaatgcaaagcccacagaatctgcacggccagcaggacgacgattctgccgccgagagcttcaatggaaatgagacattgggccacagtagcatcgcttccggcggaacacactctcgcgagatgggagactctaatagtgatggtaaaacaggtctcgagcaggacgaacaaccccttaacctgagtgattcccctctgtctgcccagttaactagtgagtataggatcgatgatcacaatagcaacgggaagaacaaatataagaacctgttaattagcgatctgaagatggaacgcgaggcaagggaaaacgggagcaagtctcctgcccatagttacagcagctacgattcaggcaaaaacgagagcgtggatcggggggcagaggatctctcactgaaccgcggagacgaggacgaagacgatcacgaggaccatgatgatagcgaaaaagtgaatgaaaccgacggggttgaggccgaacgattgaaagccttcaactctcgtcctattccttcccaccttacctctgcagttgcggagtccatccttgcaagtgcttgtgagtctgagtcccgaaatgcggctaaacgcatgaggcttgagagacagcaggacgagtcggcccctgcagacaaacagtgtaaacccgaggccacccaagctacatattctacctccgcagttccaggctctcaggacgtcctatatatcaacgggaatggtacctattcctatcactcctatcgcggactcgggggaggcctcctgaatttaaatgacgcctcttcttccggaccaaccgacctgagtatgaagagacagctggcaacatcttctggcagcagcagtagttccaatagccgaccgcaactgagcccaactgagattaacgcagttcgccaacttgtagccggctatcgcgagtctgccgcctttctgctgcgctcggccgacgaattggagaacctcattctgcagcagaactag

SEQ ID NO: 101698 - DNA, 2707 bp, Artificial Sequence
  derived and/or modified sequence
atggaccaaactatgttggatgattctgctgcagagagctttaatggcaatgagactctggggcacagttcaattgcttcagggggaacacacagcagggagatgggagactccaacagtgatggcaaaactgggctggagcaagatgaacagccactgaacctgagtgacagtcccctctctgcgcagctaacttcggaatacagaatagatgatcacaacagtaatgggaaaaacaagtataagaatcttctaatttctgacctcaagatggaacgagaggcgagagaaaatggaagcaagtctcctgcacatagttactccagctatgactctggcaaaaatgagagtgtagaccgaggagctgaggacctctcactaaacaggggagatgaggacgaagatgaccacgaggaccatgacgattcggagaaagttaatgagacagacggcgttgaagccgagcggctgaaagcttttaattctcgacctattccttcccaccttacttcagcagttgcagagagtatcttggcttcagcttgtgagagtgagagtagaaatgccgccaagaggatgcgtctggagagacagcaggatgagtctgctccagctgacaaacagtgtaaaccagaggcgacccaggccacttactcaacatcagctgttccaggctcacaggacgtgctgtacatcaatggaaatgggacctatagttaccatagttacagagggctaggagggggtctgctaaatctgaatgatgcttccagcagtggacccactgatctcagcatgaagagacaattggcgactagctcaggatcctccagcagctcaaactccagaccccagctgagtccaactgaaatcaatgccgtgagacagcttgttgcaggatatcgagaatcagctgcatttttattgcgatctgcagatgaactggaaaatctcattttacaacagaactgagacagacgaccaccatattcactgaggtctaaatttgcagtttccactaatgacattttgatttcccaacagagatacttctggtcttactgcacagtcttttaagagaaatacttccattatgccacattgtccttgatccgtaagtgatgtgttaaggtgcttcaaaggaactctgacctctgaagtacttgagctactttagtatgtccagcctattgctttttgttttagtgtgtcaccataaatatcaggggcataaaaggctatctattcttaattcaaggataaaacagaagaagcttgtggtataaaacaatagttcaagatccagctgaaatattagtggaatttgctactgactcattggactgaaagctgaagtacctggcaaaaaaaaaaaaaagaaaaaaaaaagccaaatttcttgttgctacaggatataacaacaatgaaaaggatctcgtattttaaaaaaatatgtaatttttataaaaagaaaacttgtttttcattcaaacttgtcatttttactttggtaactttttcataggtcctaaaagaaaactgttttgagaaactactgtaagtaccttttccacatccctttgccttctcctctttccaaattctttctacaaaaataacacttgatgctggaaaaacccttgcctacgttctttcaatcgtcacatcaggaactacttccaagagaagcctgcatttctgctctcatgctgatctcaaaaaccccactcaacactgcaactttatcatagcagttttcatcccagaattttttttttaataatgacaagacatgttgttgaaaaaaaatcacaccttggtttcttagagctgctcgttcctgattgccgctgctgtctccaggcatccctctagcagcacctggatgtagatgactgaatgttaagaggttgcaagtgacaatctgaaaatttgcactcttgtgtgtagttttcttttcatttctttcagaaatagtttccaaaaagaccattacatctcctgatatgatttgtataattttcagttctagctaaaaataatgtaaggaactctcagcggatgcagctgcaacttacaatgaactgtgccctcctatcccccatactttacccttctttcttattttatagtgtgggatacacatgagtgatgttttctttgtgcactgagacaagcctattttttaaatatttagggagaagtactttagttcatgcttcttatacaacttttttctgttgtttagctttggttggattacaaattctttgtgcattcctgaatttgccttatttcatgtaaaatttatgtcattcagtttttgacaatgagtttgaggcatcagtgatatttcttatctacttgttacatatagtttttcaagtaatgactgtgattgtgaccgagtaatgtgcactttttcttgtaactgtggacattgctatgcttttttcttctagtgtttctagaattactgttccttacaattatgtaaacaaaaaacaaaaaaaaaacttttgtgatactgttggtgaatataatgtgaaaaatcttattgaaatatgagtattttggaaatacatagctgcacaaacatcttttaagatgtggatttagagtttgcttatttaaatgaaaattcaaaaattgagggctggtataattttctctgttttgtttggtttaataaacagatttctgtgtt

SEQ ID NO: 101699 - DNA, 600 bp, Artificial Sequence
  derived and/or modified sequence
atggaccagaccatgctggatgattctgctgctgagagcttcaatggaaatgagaccctgggccacagcagcatcgccagcggcggcacccacagccgggagatgggagacagcaacagtgatggcaagacaggcctggagcaggatgagcagcccctgaacctgagtgacagccccctgagcgcccagctgaccagcgagtacagaattgatgaccacaacagcaatggcaagaacaagtacaagaacctgctgatcagtgacctgaagatggagcgggaggccagagaaaatggcagcaagagccctgcccacagctacagcagctatgacagcggcaagaatgaatctgtggacagaggagctgaggacctgagcctgaacagaggagatgaagatgaagatgaccacgaggaccatgatgattctgagaaggtgaatgaaacagatggagtggaggccgagcggctgaaggccttcaacagccggcccatccccagccacctgaccagcgctgtggccgagagcatcctggccagcgcctgtgagagcgagagcagaaatgctgccaagaggatgaggctggagcggcagcagtag

SEQ ID NO: 101700 - DNA, 1260 bp, Artificial Sequence
  derived and/or modified sequence
atgagctgcagcgagtgccagaagaggatgcacctgaacccagatggaacagaccacaaggacaacgggaagccacccaccctggtgacctccatgattgactacaacatgcccatcaccatggcctacatgaagcacatgaagctgcagctgctgaacagccagcaggatgaagatgagagcagcattgaaagtgatgaatttgacatgtctgacagcaccaggatgtctgctgtgaacagcgacctgagcagcaacctggaggagaggatgcagagcccccagaacctgcacggccagcaggatgatgattctgctgctgagagcttcaatggaaatgagaccctgggccacagcagcatcgccagcggcggcacccacagccgggagatgggagacagcaacagtgatggcaagacaggcctggagcaggatgagcagcccctgaacctgagtgacagccccctgagcgcccagctgaccagcgagtacagaattgatgaccacaacagcaatggcaagaacaagtacaagaacctgctgatcagtgacctgaagatggagcgggaggccagagaaaatggcagcaagagccctgcccacagctacagcagctatgacagcggcaagaatgaatctgtggacagaggagctgaggacctgagcctgaacagaggagatgaagatgaagatgaccacgaggaccatgatgattctgagaaggtgaatgaaacagatggagtggaggccgagcggctgaaggccttcaacagccggcccatccccagccacctgaccagcgctgtggccgagagcatcctggccagcgcctgtgagagcgagagcagaaatgctgccaagaggatgaggctggagcggcagcaggatgagagcgccccagctgacaagcagtgcaagccagaggccacccaggccacctacagcaccagcgctgtgcccggcagccaggatgtgctgtacatcaatggaaatggcacctacagctaccacagctaccggggcctgggcggcggcctgctgaacctgaatgatgccagcagcagcggccccacagacctgtccatgaagaggcagctggccaccagcagcggcagcagcagcagcagcaacagccggccccagctgagccccacagagatcaatgctgtgcggcagctggtggccggctaccgggagagcgctgccttcctgctgcggtctgcagatgagctggagaacctgatcctgcagcagaactag

SEQ ID NO: 101701 - DNA, 600 bp, Artificial Sequence
  derived and/or modified sequence
atggaccagaccatgctggacgacagcgccgccgagagcttcaacggcaacgagaccctaggtcatagttccattgctagtggaggaacccactctcgggaaatgggggactctaacagcgatggaaaaacgggactcgagcaggatgaacagcccttaaatctaagtgacagcccgttgagcgctcaactcacctccgagtatcgcatcgacgaccataatagcaatggcaagaacaaatataaaaatctgcttatcagcgatctaaaaatggaacgcgaggctagggagaacgggagcaaaagccctgctcattcgtatagctcatacgactcgggtaagaacgagtccgtcgatagaggcgctgaggacctgtcactgaatagaggcgatgaggacgaagatgaccacgaagaccatgatgatagcgaaaaagtaaatgagacggatggggtggaagctgaacggctcaaggcctttaactctcgacctatccccagtcatcttactagtgcagtggccgagtctatcctggccagcgcctgcgagagcgaatcacggaatgctgccaaaaggatgagactcgaacggcaacaatag

SEQ ID NO: 101702 - DNA, 1260 bp, Artificial Sequence
  derived and/or modified sequence
atgagctgcagcgagtgccagaagcggatgcacctgaaccccgacggcacagatcacaaggataacgggaaaccccccaccttggtaacctcgatgatcgattataacatgccaatcaccatggcatatatgaaacacatgaagctgcagctcctgaacagccaacaggacgaagatgagtccagcatcgaaagcgatgagtttgatatgtcagattctacaagaatgtccgcagtcaactctgatcttagctctaatctggaggagaggatgcagtcaccccagaatctgcatgggcaacaagatgatgatagtgccgccgagtcatttaatgggaatgaaaccctgggccactcgtcaattgcttcaggaggcacgcacagtcgcgagatgggagattcaaattctgacggcaagacaggactcgaacaggacgagcagcccttaaatttgtccgattcacctctcagcgcccagttgacttccgagtaccgtatagacgatcataattctaacggaaagaacaagtacaaaaacttgctcatttcggacctgaagatggaaagggaagcccgggaaaacggttcgaaaagccctgcgcatagctattcttcgtacgacagtggaaagaatgaaagcgtggatcggggtgcggaggatttgtcgctcaacagaggagatgaagacgaagatgaccatgaggaccatgacgatagcgagaaagtgaacgagaccgatggcgtcgaggctgaacgtctcaaagcatttaactcacgcccaattccatctcacctcacaagtgccgtggccgagagcattctggcttctgcctgtgaatcagagagcagaaatgctgcaaagcgaatgcgactggagcgccagcaggacgagtccgctcctgccgataaacaatgtaaacccgaagcaacacaagccacatacagcacctccgcagttcctggatcacaagatgtgctttatatcaatggtaatgggacctattcctaccattcatataggggcctaggtggaggtctgttgaacctaaacgacgccagcagctctgggcctactgatttgagtatgaaacggcagctggcgacatcatccggatcgagttcctcatctaattctaggccacagctcagtccgaccgaaattaacgccgtgcggcagctggtcgccggctatcgcgaatcagccgcatttttgctgagatctgcagatgagctcgaaaacctgattctccagcagaattag

SEQ ID NO: 101703 - DNA, 600 bp, Artificial Sequence
  derived and/or modified sequence
atggaccagactatgttggacgacagcgcagccgaaagctttaacggtaacgaaacactggggcacagtagcattgcatcaggcggaactcacagccgagagatgggcgactccaactcagacgggaagaccggactcgaacaggacgagcaaccactcaacttgagcgattctcctttgtcagcacagctcacatctgaatacagaattgacgatcataattctaatggcaagaataaatataagaacctgctaatatctgacctgaagatggagagagaagcgagagagaatggatccaagtcccccgcacattcctattctagctatgatagtggcaagaacgagtccgtcgatagaggcgctgaggacttgtccctcaatagaggcgacgaggacgaggatgaccacgaggatcacgacgactccgagaaagtgaatgagacagacggcgtggaggctgaacgactgaaagctttcaattcacgaccgattcccagccacttgacctctgccgtggcagaatctatcctggctagcgcctgcgagtctgagagtcgaaatgccgcaaaacgaatgcgtctggagagacagcagtag

SEQ ID NO: 101704 - DNA, 1260 bp, Artificial Sequence
  derived and/or modified sequence
atgtcctgttccgagtgtcaaaaacggatgcatctcaaccccgatggaacggatcacaaggataacggcaaaccacccaccctcgtcacaagcatgattgactataacatgcccattacaatggcctacatgaagcacatgaagctccaacttcttaatagtcagcaggacgaggatgagtcctcaatagagtcagatgagtttgatatgagcgatagtacacgtatgtctgccgttaatagcgacctgagctctaatctggaagaacgtatgcagtcaccgcagaacctgcatggccaacaggatgacgatagcgccgctgaatccttcaatgggaacgaaacacttggccatagctccattgcttccggaggaacccattctagagaaatgggcgactctaactctgatggaaagacaggccttgaacaggacgagcagcccctgaatctgagcgattctccactgtccgcccagttgacctccgaatacaggattgacgatcacaattccaatggaaaaaataagtataaaaatctcttgataagtgatttgaaaatggagcgggaggccagagaaaacgggtctaagtctccggctcatagctatagctcttacgatagtggaaagaacgaatccgtggaccggggtgccgaggacctgtctttgaaccgcggagacgaggacgaggacgaccacgaggatcatgacgactccgagaaagtcaacgagaccgatggggtcgaggccgagaggctgaaggctttcaatagccgcccaattccatctcatctgacttccgcagtcgccgaaagcattcttgcatcagcatgtgagagcgaatctcggaatgcggcaaaaaggatgcgcttggaaaggcagcaagacgagagcgcgccagctgacaaacaatgtaagccagaggccactcaggccacttattctacatccgccgtccctgggagccaggacgtgctctatattaacggaaatggtacttacagttaccatagctataggggcctgggcggtggcctactgaatcttaatgatgcctctagcagcgggcctacagatctgagtatgaagagacagttggctacttcttccgggtcctcatcaagctcaaacagtcgccctcagctgagtcctactgagattaacgccgttcggcagctagtcgccggatatagggagagcgccgcatttctcctgcgcagcgctgacgaacttgagaacctgatccttcagcagaactag

SEQ ID NO: 101705 - DNA, 600 bp, Artificial Sequence
  derived and/or modified sequence
atggaccagaccatgctggacgacagcgccgccgagagcttcaacggcaacgagaccctgggccacagcagcatcgccagcggcggcacccacagcagagagatgggcgacagcaacagcgacggcaagaccggcctggagcaggacgagcagcccctgaacctgagcgacagccccctgagcgcccagctgaccagcgagtacagaatcgacgaccacaacagcaacggcaagaacaagtacaagaacctgctgatcagcgacctgaagatggagagagaggccagagagaacggcagcaagagccccgcccacagctacagcagctacgacagcggcaagaacgagagcgtggacagaggcgccgaggacctgagcctgaacagaggcgacgaggacgaggacgaccacgaggaccacgacgacagcgagaaggtgaacgagaccgacggcgtggaggccgagagactgaaggccttcaacagcagacccatccccagccacctgaccagcgccgtggccgagagcatcctggccagcgcctgcgagagcgagagcagaaacgccgccaagagaatgagactggagagacagcagtag

SEQ ID NO: 101706 - DNA, 1260 bp, Artificial Sequence
  derived and/or modified sequence
atgagctgcagcgagtgccagaagagaatgcacctgaaccccgacggcaccgaccacaaggacaacggcaagccccccaccctggtgaccagcatgatcgactacaacatgcccatcaccatggcctacatgaagcacatgaagctgcagctgctgaacagccagcaggacgaggacgagagcagcatcgagagcgacgagttcgacatgagcgacagcaccagaatgagcgccgtgaacagcgacctgagcagcaacctggaggagagaatgcagagcccccagaacctgcacggccagcaggacgacgacagcgccgccgagagcttcaacggcaacgagaccctgggccacagcagcatcgccagcggcggcacccacagcagagagatgggcgacagcaacagcgacggcaagaccggcctggagcaggacgagcagcccctgaacctgagcgacagccccctgagcgcccagctgaccagcgagtacagaatcgacgaccacaacagcaacggcaagaacaagtacaagaacctgctgatcagcgacctgaagatggagagagaggccagagagaacggcagcaagagccccgcccacagctacagcagctacgacagcggcaagaacgagagcgtggacagaggcgccgaggacctgagcctgaacagaggcgacgaggacgaggacgaccacgaggaccacgacgacagcgagaaggtgaacgagaccgacggcgtggaggccgagagactgaaggccttcaacagcagacccatccccagccacctgaccagcgccgtggccgagagcatcctggccagcgcctgcgagagcgagagcagaaacgccgccaagagaatgagactggagagacagcaggacgagagcgcccccgccgacaagcagtgcaagcccgaggccacccaggccacctacagcaccagcgccgtgcccggcagccaggacgtgctgtacatcaacggcaacggcacctacagctaccacagctacagaggcctgggcggcggcctgctgaacctgaacgacgccagcagcagcggccccaccgacctgagcatgaagagacagctggccaccagcagcggcagcagcagcagcagcaacagcagaccccagctgagccccaccgagatcaacgccgtgagacagctggtggccggctacagagagagcgccgccttcctgctgagaagcgccgacgagctggagaacctgatcctgcagcagaactag

SEQ ID NO: 101707 - protein, 852 aa, Artificial Sequence
  derived and/or modified sequence
MDSKGLGRILWKSGQQKTGLKIIDLVALLQKPVPHSQASEANSFETSQQQGFGQALVFTNSQHNNQMAPGTGSSTAVNSCSPQSLSSVLGSGFGELAPPKMANITSSQILDQLKAPSLGQFTTTPSTQQNSTSHPTTTTSWDLKPPTSQSSVLSHLDFKSQPEPSPVLSQLSQRQQHQSQAVTVPPPGLESFPSQAKLRESTPGDSPSTVNKLLQLPSTTIENISVSVHQPQPKHIKLAKRRIPPASKIPASAVEMPGSADVTGLNVQFGALEFGSEPSLSEFGSAPSSENSNQIPISLYSKSLSEPLNTSLSMTSAVQNSTYTTSVITSCSLTSSSLNSASPVAMSSSYDQSSVHNRIPYQSPVSSSESAPGTIMNGHGGGRSQQTLDTPKTTGPPSALPSVSSLPSTTSCTALLPSTSQHTGDLTSSPLSQLSSSLSSHQSSLSAHAALSSSTSHTHASVESASSHQSSATFSTAATSVSSSASSGASLSSSMNTANSLCLGGTPASASSSSSRAAPLVTSGKAPPNLPQGVPPLLHNQYLVGPGGLLPAYPIYGYDELQMLQSRLPVDYYGIPFAAPTALASRDGSLANNPYPGDVTKFGRGDSASPAPATTPAQPQQSQSQTHHTAQQPFVNPALPPGYSYTGLPYYTGMPSAFQYGPTMFVPPASAKQHGVNLSTPTPPFQQASGYGQHGYSTGYDDLTQGTAAGDYSKGGYAGSSQAPNKSAGSGPGKGVSVSSSTTGLPDMTGSVYNKTQTFDKQGFHAGTPPPFSLPSVLGSTGPLASGAAPGYAPPPFLHILPAHQQPHSQLLHHHLPQDAQSGSGQRSQPSSLQPKSQASKPAYGNSPYWTN

SEQ ID NO: 101708 - protein, 1028 aa, Artificial Sequence
  derived and/or modified sequence
MRLAQVIFDKNDSDFEAKVKQLMEVTGKNQDECIVALHDCNGDVNKAINILLEGNSDTTSWETVGCKKKNFAKENSENKENREKKSEKESSRGRGNNNRKGRGGNRGREFRGEENGIDCNQVDKPSDRGKRARGRELASNTHNIAQDLSNKSSYGLKGAWKNSVEEWTTEDWTEDLSETKVFTASSAPAENHILPGQSIDLVALLQKPVPHSQASEANSFETSQQQGFGQALVFTNSQHNNQMAPGTGSSTAVNSCSPQSLSSVLGSGFGELAPPKMANITSSQILDQLKAPSLGQFTTTPSTQQNSTSHPTTTTSWDLKPPTSQSSVLSHLDFKSQPEPSPVLSQLSQRQQHQSQAVTVPPPGLESFPSQAKLRESTPGDSPSTVNKLLQLPSTTIENISVSVHQPQPKHIKLAKRRIPPASKIPASAVEMPGSADVTGLNVQFGALEFGSEPSLSEFGSAPSSENSNQIPISLYSKSLSEPLNTSLSMTSAVQNSTYTTSVITSCSLTSSSLNSASPVAMSSSYDQSSVHNRIPYQSPVSSSESAPGTIMNGHGGGRSQQTLDTPKTTGPPSALPSVSSLPSTTSCTALLPSTSQHTGDLTSSPLSQLSSSLSSHQSSLSAHAALSSSTSHTHASVESASSHQSSATFSTAATSVSSSASSGASLSSSMNTANSLCLGGTPASASSSSSRAAPLVTSGKAPPNLPQGVPPLLHNQYLVGPGGLLPAYPIYGYDELQMLQSRLPVDYYGIPFAAPTALASRDGSLANNPYPGDVTKFGRGDSASPAPATTPAQPQQSQSQTHHTAQQPFVNPALPPGYSYTGLPYYTGMPSAFQYGPTMFVPPASAKQHGVNLSTPTPPFQQASGYGQHGYSTGYDDLTQGTAAGDYSKGGYAGSSQAPNKSAGSGPGKGVSVSSSTTGLPDMTGSVYNKTQTFDKQGFHAGTPPPFSLPSVLGSTGPLASGAAPGYAPPPFLHILPAHQQPHSQLLHHHLPQDAQSGSGQRSQPSSLQPKSQASKPAYGNSPYWTN

SEQ ID NO: 101709 - protein, 874 aa, Artificial Sequence
  derived and/or modified sequence
MRLAQVIFDKNDSDFEAKVKQLSETKVFTASSAPAENHILPGQSIDLVALLQKPVPHSQASEANSFETSQQQGFGQALVFTNSQHNNQMAPGTGSSTAVNSCSPQSLSSVLGSGFGELAPPKMANITSSQILDQLKAPSLGQFTTTPSTQQNSTSHPTTTTSWDLKPPTSQSSVLSHLDFKSQPEPSPVLSQLSQRQQHQSQAVTVPPPGLESFPSQAKLRESTPGDSPSTVNKLLQLPSTTIENISVSVHQPQPKHIKLAKRRIPPASKIPASAVEMPGSADVTGLNVQFGALEFGSEPSLSEFGSAPSSENSNQIPISLYSKSLSEPLNTSLSMTSAVQNSTYTTSVITSCSLTSSSLNSASPVAMSSSYDQSSVHNRIPYQSPVSSSESAPGTIMNGHGGGRSQQTLDTPKTTGPPSALPSVSSLPSTTSCTALLPSTSQHTGDLTSSPLSQLSSSLSSHQSSLSAHAALSSSTSHTHASVESASSHQSSATFSTAATSVSSSASSGASLSSSMNTANSLCLGGTPASASSSSSRAAPLVTSGKAPPNLPQGVPPLLHNQYLVGPGGLLPAYPIYGYDELQMLQSRLPVDYYGIPFAAPTALASRDGSLANNPYPGDVTKFGRGDSASPAPATTPAQPQQSQSQTHHTAQQPFVNPALPPGYSYTGLPYYTGMPSAFQYGPTMFVPPASAKQHGVNLSTPTPPFQQASGYGQHGYSTGYDDLTQGTAAGDYSKGGYAGSSQAPNKSAGSGPGKGVSVSSSTTGLPDMTGSVYNKTQTFDKQGFHAGTPPPFSLPSVLGSTGPLASGAAPGYAPPPFLHILPAHQQPHSQLLHHHLPQDAQSGSGQRSQPSSLQPKSQASKPAYGNSPYWTN

SEQ ID NO: 101710 - DNA, 978 bp, Artificial Sequence
  derived and/or modified sequence
atggccaacatcaccagcagccagatcctggaccagctgaaggcccccagcctgggccagttcaccaccacccccagcacccagcagaacagcaccagccaccccaccaccaccaccagctgggacctgaagccccccaccagccagagcagcgtgctgagccacctggacttcaagagccagcccgagcccagccccgtgctgagccagctgagccagagacagcagcaccagagccaggccgtgaccgtgcccccccccggcctggagagcttccccagccaggccaagctgagagagagcacccccggcgacagccccagcaccgtgaacaagctgctgcagctgcccagcaccaccatcgagaacatcagcgtgagcgtgcaccagccccagcccaagcacatcaagctggccaagagaagaatcccccccgccagcaagatccccgccagcgccgtggagatgcccggcagcgccgacgtgaccggcctgaacgtgcagttcggcgccctggagttcggcagcgagcccagcctgagcgagttcggcagcgcccccagcagcgagaacagcaaccagatccccatcagcctgtacagcaagagcctgagcgagcccctgaacaccagcctgagcatgaccagcgccgtgcagaacagcacctacaccaccagcgtgatcaccagctgcagcctgaccagcagcagcctgaacagcgccagccccgtggccatgagcagcagctacgaccagagcagcgtgcacaacagaatcccctaccagagccccgtgagcagcagcgagagcgcccccggcaccatcatgaacggccacggcggcggcagaagccagcagaccctggacagcaagtacagcagcaagctgctgctgagctggctggtgcccaccaagcagagaaagagaatcgcccacgtgatgtggaagacccccgtgggccagtggctgatcagatag

SEQ ID NO: 101711 - DNA, 2559 bp, Artificial Sequence
  derived and/or modified sequence
atggacagcaagggcctgggcagaatcctgtggaagagcggccagcagaagaccggcctgaagatcatcgacctggtggccctgctgcagaagcccgtgccccacagccaggccagcgaggccaacagcttcgagaccagccagcagcagggcttcggccaggccctggtgttcaccaacagccagcacaacaaccagatggcccccggcaccggcagcagcaccgccgtgaacagctgcagcccccagagcctgagcagcgtgctgggcagcggcttcggcgagctggccccccccaagatggccaacatcaccagcagccagatcctggaccagctgaaggcccccagcctgggccagttcaccaccacccccagcacccagcagaacagcaccagccaccccaccaccaccaccagctgggacctgaagccccccaccagccagagcagcgtgctgagccacctggacttcaagagccagcccgagcccagccccgtgctgagccagctgagccagagacagcagcaccagagccaggccgtgaccgtgcccccccccggcctggagagcttccccagccaggccaagctgagagagagcacccccggcgacagccccagcaccgtgaacaagctgctgcagctgcccagcaccaccatcgagaacatcagcgtgagcgtgcaccagccccagcccaagcacatcaagctggccaagagaagaatcccccccgccagcaagatccccgccagcgccgtggagatgcccggcagcgccgacgtgaccggcctgaacgtgcagttcggcgccctggagttcggcagcgagcccagcctgagcgagttcggcagcgcccccagcagcgagaacagcaaccagatccccatcagcctgtacagcaagagcctgagcgagcccctgaacaccagcctgagcatgaccagcgccgtgcagaacagcacctacaccaccagcgtgatcaccagctgcagcctgaccagcagcagcctgaacagcgccagccccgtggccatgagcagcagctacgaccagagcagcgtgcacaacagaatcccctaccagagccccgtgagcagcagcgagagcgcccccggcaccatcatgaacggccacggcggcggcagaagccagcagaccctggacacccccaagaccaccggcccccccagcgccctgcccagcgtgagcagcctgcccagcaccaccagctgcaccgccctgctgcccagcaccagccagcacaccggcgacctgaccagcagccccctgagccagctgagcagcagcctgagcagccaccagagcagcctgagcgcccacgccgccctgagcagcagcaccagccacacccacgccagcgtggagagcgccagcagccaccagagcagcgccaccttcagcaccgccgccaccagcgtgagcagcagcgccagcagcggcgccagcctgagcagcagcatgaacaccgccaacagcctgtgcctgggcggcacccccgccagcgccagcagcagcagcagcagagccgcccccctggtgaccagcggcaaggccccccccaacctgccccagggcgtgccccccctgctgcacaaccagtacctggtgggccccggcggcctgctgcccgcctaccccatctacggctacgacgagctgcagatgctgcagagcagactgcccgtggactactacggcatccccttcgccgcccccaccgccctggccagcagagacggcagcctggccaacaacccctaccccggcgacgtgaccaagttcggcagaggcgacagcgccagccccgcccccgccaccacccccgcccagccccagcagagccagagccagacccaccacaccgcccagcagcccttcgtgaaccccgccctgccccccggctacagctacaccggcctgccctactacaccggcatgcccagcgccttccagtacggccccaccatgttcgtgccccccgccagcgccaagcagcacggcgtgaacctgagcacccccaccccccccttccagcaggccagcggctacggccagcacggctacagcaccggctacgacgacctgacccagggcaccgccgccggcgactacagcaagggcggctacgccggcagcagccaggcccccaacaagagcgccggcagcggccccggcaagggcgtgagcgtgagcagcagcaccaccggcctgcccgacatgaccggcagcgtgtacaacaagacccagaccttcgacaagcagggcttccacgccggcacccccccccccttcagcctgcccagcgtgctgggcagcaccggccccctggccagcggcgccgcccccggctacgcccccccccccttcctgcacatcctgcccgcccaccagcagccccacagccagctgctgcaccaccacctgccccaggacgcccagagcggcagcggccagagaagccagcccagcagcctgcagcccaagagccaggccagcaagcccgcctacggcaacagcccctactggaccaactag

SEQ ID NO: 101712 - DNA, 978 bp, Artificial Sequence
  derived and/or modified sequence
atggctaatataacatcaagtcagatcctggatcaattaaaggcaccaagcctgggccagttcacaactacgccatctactcagcagaactccacctcacaccccaccacaactacaagctgggatctcaagcctccgacaagccagagcagcgtgctttcacacttagacttcaagagccagccagagccaagccccgtgctgagtcaactcagccagcgacaacagcatcagtcacaggctgtgactgttcctcctcccgggctggagagcttccctagccaggccaagctgcgagagagtaccccaggcgacagtcctagtaccgtaaacaaacttctgcagttacctagtactacgattgagaacatttccgtatccgtgcatcagccccagccaaagcacattaaactggctaagcgccggattcctccggcatcaaagattccagccagcgccgtcgaaatgcccggatccgcagatgtgacggggcttaacgtgcagtttggggcgctcgagttcgggtctgagcccagcttgtcagagtttgggtccgccccttcctccgagaactcaaaccaaatccccatatccctctatagcaaatccttaagcgaaccccttaatacatcactgtcgatgacgtctgccgtacagaacagtacctataccactagtgtcatcacatcatgttccttgacctccagctcccttaacagtgcctctcctgtggcaatgtcgagcagctacgaccagtcttccgtgcacaaccgcattccataccagtctcctgtgtcctctagcgaaagcgcccccggaacaatcatgaacggccacggcggcgggaggagccaacagaccctggactcgaaatacagcagcaagcttctgctctcctggctggtgcctactaagcagcggaaaaggatagctcatgtcatgtggaagacccccgtgggacagtggctgattagatag

SEQ ID NO: 101713 - DNA, 2559 bp, Artificial Sequence
  derived and/or modified sequence
atggacagtaagggcctcgggcgcattctctggaaaagcggacagcagaagacaggcttaaaaataattgatttggttgcgctgctgcagaaacccgtgccacacagtcaggcctcggaagctaactcttttgagacgtctcagcagcaggggtttggccaggccctcgtcttcactaactcccagcacaataatcaaatggcacctggaacgggctcttcaaccgcagtgaattcatgcagtcctcagagcctgagctccgtgctcgggagtggattcggggagcttgcaccacccaaaatggcgaacatcacatctagccagatcctcgatcagttgaaagcaccaagtctgggacaattcaccacaacaccatcgacacagcagaactcaacgagccacccgaccaccaccaccagctgggatttgaagccccctacgtcccagagttctgttctctctcatctggatttcaagagtcagcccgaacccagtcccgtgttgtctcagctgtcccagagacagcagcatcagagtcaggcggtgacggtgcctcctcccgggctggaaagttttccatcccaggcgaagttgcgggagagcacccctggcgatagcccctctactgtgaataaactccttcaacttccctccaccactattgagaacatttcagtgagcgttcaccagcctcagccaaagcatattaaattggcaaagcgacggattcccccagcgagtaaaattccagccagtgccgtggagatgccaggttccgcagacgtgactggcctaaatgtccagttcggcgccctcgagttcggtagcgagccttcccttagcgaattcggctctgctcccagcagcgaaaactccaatcagatccctatctcgttgtattcaaagtctttaagcgaacccttgaatacaagcctcagcatgacttccgccgtacagaacagtacatacactacttctgtcatcacaagttgttcacttacatcaagctctctgaacagcgcatcccctgtggctatgtcctcctcctacgatcaatcatcagtgcacaatcggatcccgtatcagagcccagtgtcctcctcagaaagtgctccaggcacaatcatgaatggccatggtgggggtcgctcccaacagacattggacaccccaaagacgactggccccccaagcgccctgccgagtgtgtcctctctaccctctaccacgagctgcacggccctcctccctagcaccagccagcacacaggagacctgacaagtagcccgttgtctcaacttagtagcagtctgtcctcacaccagtcttcactgtccgcacacgctgcattaagttctagtactagtcatactcatgccagcgtagagagtgcttcgtcgcaccagagcagcgcaactttttccactgccgctacgagcgtgtcctcctctgcttcatccggagcgagcttgtcgtcgtctatgaatactgctaatagcctgtgccttggaggcacccccgcatccgcatccagctctagtagtagagccgcaccactcgtaacaagcgggaaagctccccccaatctcccacagggtgtgcctccactcctgcacaaccagtaccttgtcggacctggaggtctcctcccggcttatccaatctacgggtatgatgagctacagatgctgcagtctcgactccccgtggactactacggcatcccgttcgctgcacctaccgccctggcctcgcgcgatggctctctagcaaataacccctaccctggggatgttactaaatttggccgtggggattccgcttcccctgcaccagcaactacacctgctcaaccacagcagtcccaatcacagacgcatcacaccgcgcaacagccgtttgttaacccggcactgcctcctggatatagttatacaggcctcccgtactacactgggatgccatcagccttccaatatggccctaccatgttcgtccctccagctagtgcaaagcagcatggcgttaatttaagtacacccacgcccccatttcagcaggcgtcaggatacggacaacatggctactcgaccggctacgatgacctcacccagggcaccgcagctggtgattactctaagggtggctacgccggatccagccaagctcccaacaagtccgctggtagcggccccggcaaaggagtttctgtgagctcaagtaccacaggattgcccgatatgactggcagcgtctacaacaaaactcagactttcgataagcagggattccatgccggaaccccgccacctttttcactcccatccgtactgggatctacagggcctctcgcgagtggcgctgctcctggttacgcccctccacctttcctccacatccttcccgcacaccaacagccccattctcaattgctgcatcatcacctgccacaggatgcccagagcggaagtgggcagaggagccagccaagttctctgcagccaaagtctcaggcctctaaaccggcatatggaaacagtccctactggactaactag

SEQ ID NO: 101714 - DNA, 978 bp, Artificial Sequence
  derived and/or modified sequence
atggccaacatcaccagcagccagatcctggaccagctgaaggcccccagcctgggccagttcaccaccacccccagcacccagcagaacagcaccagccaccccaccaccaccacctcctgggacctgaagccacccaccagccagagctctgtgctgagccacctggacttcaagagccagcctgagcccagccctgtgctgagccagctgagccagaggcagcagcaccagagccaggccgtgacagtgcccccacctggcctggagagcttccccagccaggccaagctgcgggagagcacccctggggacagccccagcacagtgaacaagctgctgcagctgcccagcaccaccatcgagaacatctctgtgtctgtgcaccagccccagcccaagcacatcaagctggccaagaggcgcatccccccagccagcaagatcccagccagcgctgtggagatgcctggcagcgcagatgtgacaggcctgaatgtgcagtttggagccctggagtttggcagcgagcccagcctgtctgaatttggaagtgcccccagcagcgagaacagcaaccagatccccatcagcctgtacagcaagagcctgtctgagcccctgaacaccagcctgtccatgaccagcgctgtgcagaacagcacctacaccaccagcgtcatcaccagctgcagcctgaccagcagcagcctgaacagcgccagccctgtggccatgagcagcagctatgaccagagctctgtgcacaaccgcatcccctaccagagccctgtgagcagcagcgagagcgcccctggcaccatcatgaatggacatggaggcggccgcagccagcagaccctggacagcaagtacagcagcaagctgctgctgtcctggctggtgcccaccaagcagaggaagagaattgcccacgtgatgtggaagacccctgtgggccagtggctgatcagatag

SEQ ID NO: 101715 - DNA, 2559 bp, Artificial Sequence
  derived and/or modified sequence
atggacagcaagggcctgggccgcatcctgtggaagagcggccagcagaagacaggcctgaagatcatcgacctggtggccctgctgcagaagcctgtgccccacagccaggccagcgaggccaacagctttgagaccagccagcagcagggcttcggccaggccctggtgttcaccaacagccagcacaacaaccagatggcccctggcaccggcagcagcacagctgtgaacagctgcagcccccagagcctgagctctgtgctgggcagcggctttggagagctggccccacccaagatggccaacatcaccagcagccagatcctggaccagctgaaggcccccagcctgggccagttcaccaccacccccagcacccagcagaacagcaccagccaccccaccaccaccacctcctgggacctgaagccacccaccagccagagctctgtgctgagccacctggacttcaagagccagcctgagcccagccctgtgctgagccagctgagccagaggcagcagcaccagagccaggccgtgacagtgcccccacctggcctggagagcttccccagccaggccaagctgcgggagagcacccctggggacagccccagcacagtgaacaagctgctgcagctgcccagcaccaccatcgagaacatctctgtgtctgtgcaccagccccagcccaagcacatcaagctggccaagaggcgcatccccccagccagcaagatcccagccagcgctgtggagatgcctggcagcgcagatgtgacaggcctgaatgtgcagtttggagccctggagtttggcagcgagcccagcctgtctgaatttggaagtgcccccagcagcgagaacagcaaccagatccccatcagcctgtacagcaagagcctgtctgagcccctgaacaccagcctgtccatgaccagcgctgtgcagaacagcacctacaccaccagcgtcatcaccagctgcagcctgaccagcagcagcctgaacagcgccagccctgtggccatgagcagcagctatgaccagagctctgtgcacaaccgcatcccctaccagagccctgtgagcagcagcgagagcgcccctggcaccatcatgaatggacatggaggcggccgcagccagcagaccctggacacccccaagaccaccggcccccccagcgccctgcccagcgtgagcagcctgcccagcaccaccagctgcacagccctgctgcccagcaccagccagcacactggagacctgaccagcagccccctgagccagctgagcagcagcctgagcagccaccagagcagcctgagcgcccatgctgccctgagcagcagcaccagccacacccacgcctctgtggagagcgccagcagccaccagagcagcgccaccttcagcacagctgccacctctgtgagcagcagcgccagcagcggggccagcctgagcagctccatgaacacagccaacagcctgtgcctgggcggcaccccagccagcgccagcagcagcagcagcagagctgcccccctggtgaccagcggcaaggccccacccaacctgccccagggcgtgccccccctgctgcacaaccagtacctggtgggccctgggggcctgctgcctgcctaccccatctacggctatgatgagctgcagatgctgcagagccggctgcctgtggactactacggcatcccctttgctgcccccacagccctggccagcagagatggcagcctggccaacaacccctacccaggagatgtgaccaagtttggccgcggggacagcgccagccctgccccagccaccaccccagcccagccccagcagagccagagccagacccaccacacagcccagcagccctttgtgaacccagccctgcccccaggctacagctacacaggcctgccctactacacaggcatgcccagcgccttccagtatggccccaccatgtttgtgcccccagccagcgccaagcagcacggcgtgaacctgagcacccccaccccacccttccagcaggccagcggctacggccagcacggctacagcacaggctatgatgacctgacccagggcacagctgctggggactacagcaagggcggctacgccggcagcagccaggcccccaacaagtctgctggcagcggccctgggaagggcgtgtctgtgagcagcagcaccaccggcctgcctgacatgactggatctgtgtacaacaagacccagacctttgacaagcagggcttccacgccggcaccccaccacccttcagcctgcccagcgtgctgggcagcacaggccccctggccagcggggccgcccctggctacgcccccccacccttcctgcacatcctgcctgcccaccagcagccccacagccagctgctgcaccaccacctgccccaggatgcccagagcggcagcggccagaggagccagcccagcagcctgcagcccaagagccaggccagcaagccagcctacggcaacagcccctactggaccaactag

SEQ ID NO: 101716 - DNA, 978 bp, Artificial Sequence
  derived and/or modified sequence
atggccaacatcaccagcagccagatcctggaccagctgaaggccccatcgctgggccagttcacaacaactccatccacccagcagaactctacctcacaccctacaaccacgactagctgggacctcaagcccccaacctctcagtctagcgtgctgagccatctcgactttaaatcacagccagagcctagtccagtcctaagccagctgagccagcgtcagcagcatcaaagccaggctgtgacggtacctccaccagggctagaaagctttccttctcaggcaaagctgagggagtcaacccccggggacagccccagcactgtgaacaagctgctccaactgccctcaactacgattgaaaacatctccgtgagtgtgcaccaacctcagccaaaacacatcaagctggctaagcgcaggattccccctgcttccaagattccagcctctgccgtggaaatgccaggcagcgccgacgtaactggcctgaacgtgcaattcggtgccctggagtttggaagtgagccatctttaagcgaatttgggtccgccccatctagtgagaactcaaaccaaataccaatttcactgtattcaaaatcactgagcgaacctctgaacacatccttgtcaatgactagtgccgtgcagaactccacttacaccactagcgtgatcacaagctgttcccttacttcctccagtcttaattccgcgagcccagttgccatgtcatctagttacgatcaatcctctgtgcacaatcgcataccgtaccagagcccagtttcctcgtccgaatctgcacccgggactattatgaacggccatggcgggggcaggtcccagcagaccttggacagcaaatattcttcaaagctactgttgtcttggctggtgcccacaaaacagcgcaaaagaatcgcacatgtgatgtggaagacaccggtaggccagtggttgatcaggtag

SEQ ID NO: 101717 - DNA, 2559 bp, Artificial Sequence
  derived and/or modified sequence
atggacagcaagggcctgggccggatcctgtggaagagcggccagcagaagactgggctgaaaatcattgacctcgtcgcgttgctgcagaagccagttccccactctcaagcgtctgaggcgaacagcttcgagacatcccagcagcagggctttggtcaagccctggtcttcacaaacagccaacacaataatcaaatggcccccggcacagggtcaagtaccgccgtcaactcttgctctcctcagtcgctcagcagcgtactcggaagcggtttcggagagttagctcctccgaagatggctaatataacctcaagtcagatcctcgaccagctgaaggcgccctccctgggacagttcaccactactccaagtacgcagcagaactctacctcccatccgaccaccactacctcctgggacctgaaacctccgacatctcagagcagcgtcctatctcatcttgactttaaatctcagcctgagccatcaccggtcttatcccagcttagccaacggcaacagcatcagtcccaggcagtcacggttccaccgccgggactggaatccttccctagtcaggccaagctccgcgagagcactccaggagacagcccctctaccgtgaacaaacttctgcagctgccgtccaccaccattgagaacatctctgtgagcgtgcatcagcctcagcccaaacacataaagctcgcgaaaaggaggataccccccgcaagcaagatacccgccagtgctgtcgagatgcccggatcggccgacgtgacaggtcttaatgtccagttcggcgccctggaattcggcagcgagccctccctgtccgaatttggatccgccccgtcttctgagaactccaatcaaataccaatatcattatacagtaaaagtctcagtgagcctcttaatacgtctttgtcgatgacgtctgccgtgcagaatagcacttacacaacctcggtgataacatcctgtagtctgacgtccagctcactgaacagcgcctccccagtggccatgtcctcctcttatgatcaaagctccgttcataatcgcataccatatcagtcacccgtcagtagctcagaatccgcccccggcacaataatgaatgggcacggagggggacgtagtcagcaaactcttgacacacctaaaaccacgggtcctccatctgcccttccatctgttagctcccttccctcaacaacttcttgcacagcactccttccatccacaagccagcacacaggcgacctcacgtcctccccccttagtcagctgtcgtcaagcctgagcagccatcagtcctcgttgtcagcccacgccgctctgagttcctcgactagtcacactcacgcctctgtcgaaagcgcaagctctcaccaatcttcagccacattctctaccgccgcaacgtctgtgtcgagcagcgcatctagtggcgcatctctgagtagctctatgaatactgccaatagcctgtgtcttgggggcacaccggctagcgcaagttctagttcaagccgcgctgcccccctcgtgacctccggaaaagcccccccaaatctgcctcagggtgtgcctcccctccttcataatcaatacctggtgggccctggaggtctcctgcccgcgtatcccatttatggttatgatgagttacagatgctgcaaagcagactgcccgtcgactactatgggatcccgttcgctgcaccaaccgccttggcgtcccgggatggctcgctagccaacaacccgtaccctggggacgtgaccaagttcggccggggagacagcgcgtcacctgcaccagccacgacacctgcgcaaccccaacagagccagagccaaactcatcataccgcccagcagcctttcgtgaacccagctttgccccccgggtactcctatactggcctgccatactatactggcatgccaagtgctttccaatacggaccaaccatgtttgtgccgccagcctccgccaagcaacacggagtcaatctttccaccccgaccccgccttttcagcaggccagcgggtatgggcagcacggctatagcaccggctacgatgatctgacacagggcactgccgctggcgattactctaaaggaggctacgcagggtcctcccaggcccccaataagtcagcaggtagcggacccggcaaaggcgtaagcgtttctagcagcacaacaggcctgcctgacatgacaggttctgtgtataacaagacccaaacattcgataaacaggggtttcatgccgggaccccccccccattcagcctgcctagtgtgcttgggagtacgggacccctggcttccggggccgccccgggctatgccccacctccattccttcacatcctgccagcccaccagcagccacattctcagctattgcaccaccatcttccacaagacgcacaaagtggatctggccaaagatctcaacccagtagcctgcagcctaagtcccaggcatcaaaaccagcttatggaaacagcccttattggaccaactag

SEQ ID NO: 101718 - DNA, 978 bp, Artificial Sequence
  derived and/or modified sequence
atggcgaacatcacatcctcacagattttggaccagctcaaagcaccttcgttagggcaattcactactacgccttccacacagcagaacagtactagtcatccaactacaacaacatcctgggatctcaaaccacctactagtcagagttccgtcctgtcacacctggacttcaagtcccagccagagccctctcctgtcctgagtcagttgagccagaggcagcagcatcagtctcaggcagtgacagtgccccctccgggtttggagtctttcccttcccaggctaagttgagggagtcaacgccaggcgacagtccctcaaccgtgaataaactcctccagttaccatccacgacaatcgaaaacatatcagttagcgttcaccagccccagcccaaacatatcaagctggccaagcgtagaattcccccagctagcaaaatacccgcatccgctgtcgaaatgccaggtagcgccgacgtaacaggtctaaatgtccaattcggtgccctggagttcggatcggaaccttcactctctgaatttggctcagctccttcatccgaaaatagtaaccagatccccatctccctgtactctaagtccctgagcgagccgttgaataccagtctgtctatgacatctgccgtgcagaactccacttacaccacttccgtgatcacctcatgctctctgacaagttcaagcctgaacagtgcctccccagtcgccatgagcagctcttatgaccagtccagtgtacacaatcgtatcccgtaccaaagcccagtttctagcagtgaatctgcgccaggcactattatgaacggccacggcggagggagaagccagcagaccctggattccaaatacagttctaaattgttgctgtcctggttagtgcccacaaaacagcgaaagagaatcgcccatgtcatgtggaagacccctgtcggtcagtggctgattcggtag

SEQ ID NO: 101719 - DNA, 2559 bp, Artificial Sequence
  derived and/or modified sequence
atggacagcaagggtttaggacgaatactgtggaagtctggtcagcaaaaaacaggactgaagataatcgacctcgtagcactcttgcaaaaaccggtcccccactctcaggcctctgaagctaattcatttgaaacttctcagcagcagggcttcggacaggcactcgtctttacaaatagccagcataacaatcagatggctccaggcacaggatcgtctacagcggtaaacagctgcagccctcagtccttatcaagcgttttaggatccggtttcggcgagcttgctcccccaaaaatggccaacataacatctagccagatcttggatcagctgaaggcacctagtctaggccagttcaccacgactcccagtacacagcaaaacagtactagccatcccacaaccaccacctcttgggacctaaaaccccctaccagccagagtagcgtattgtctcatctcgatttcaagagtcaacctgaaccatccccagtgctgagccagctaagtcagaggcaacagcatcaaagtcaggccgttacagtacccccacccggactcgagtcatttccgtcccaggccaagttgcgtgaatcaacacccggtgactctcccagtacagtcaacaagttgctgcagctcccctctaccacgatcgagaatatctctgtcagtgtgcaccagccacaacctaagcacatcaagcttgcaaagcggaggattcctccagcctcaaagatccctgcctccgccgttgaaatgcccggatcagctgatgttactggactaaacgtccagttcggcgctctcgagtttggctctgagcctagcctcagcgagttcggtagcgctcccagttccgagaattcaaaccaaattcctatttccttgtatagtaagtccctgagtgaacctctgaacacttccctttctatgacatccgccgttcaaaatagtacgtacactacgtccgttattacatcgtgcagcctgacatccagttcactgaacagcgcaagcccggtcgccatgagttctagctatgaccagagctcagtccataaccgcatcccttaccagagccccgtgagctcaagcgaaagcgctcctggaactataatgaacggccacggcggaggccgatctcaacaaaccctcgataccccaaaaacaaccgggcctcccagtgctctcccaagcgtgtcttccttacctagcactacatcgtgtacagccctcttgccaagtactagccagcacacaggtgatctcaccagctctcccttaagccaactctccagcagcctgagttcgcatcagtccagtctgtctgctcacgccgctctctcatctagtacaagtcacacacacgcttccgttgagtccgcgtctagtcaccagtcttcagcgactttctcgaccgcggctacttctgtgtcttctagcgccagctcgggtgcttctctgtccagctcgatgaatactgctaacagtttatgccttggcggtacccccgcatcagccagtagctcctcaagtagagcggcacccttagtgactagcggtaaggccccacctaacctcccacagggtgtgcctccgctgctgcataaccaatacttggtgggcccagggggactcctgcccgcttatcctatctacggctatgacgaacttcaaatgttgcaatccagattgcctgtggattactacggtattccatttgctgccccaaccgctctggcctcacgcgatggctccctggctaataacccctaccctggcgatgtaacaaaattcgggcgtggagactccgctagccctgcccctgctactacgccggcacagccacagcagtcacaaagccaaacccaccacactgctcaacagcctttcgtgaatcctgctctcccgcctggctactcttatactggcctcccgtattatactgggatgccatctgccttccaatatgggcctaccatgttcgtgccccctgctagcgctaaacagcatggagtgaatcttagcacgccaacccccccattccagcaggcctccggttacggacagcatgggtactcgaccggatacgacgatctgacacagggaacagctgccggagattactccaaggggggatatgcgggtagcagccaagccccaaataagtccgctgggtcgggccctgggaagggcgtgagcgtgagctccagtacgactggccttcctgatatgactggcagcgtatataataaaactcagaccttcgacaaacaggggttccacgctggaactcccccaccattttcgctacccagtgtcctgggttctactggccctctcgcaagtggcgcagcgccagggtacgctcccccaccatttctacatattctccccgctcaccaacagccacactcacaactactccaccatcacctccctcaagatgcccagtctggaagtggtcagagatctcagccttcatctctccagccgaaatctcaagccagtaagcctgcctacggcaactcgccatactggaccaattag

SEQ ID NO: 101720 - DNA, 1809 bp, Artificial Sequence
  derived and/or modified sequence
tctcaatctgctgacctcgtgatccgcctgaccttgtaatccacctaccttggcctcccaaagtgttgggattacaggcgtgagccaccgcgcccggccaacatcacgtttttaaaaattgatttcttcaaattcatggcaaatatttcccttccctttaacttcttatgtcagaatgaggaaggatagctgcatttatttagtcagttttcattgcatagtaatattttcatgtagtattttctaagttatattttagtaattcatatgttttagattataggttttaacatacttgtgaaaatacttgatatgttttaaagccttgggcagaaattctgtattgttgaggatttgttcttttatcccccttttaaagtcatccgtccttggctcaggatttggagagcttgcaccaccaaaaatggcaaacatcaccagctcccagattttggaccagttgaaagctccgagtttgggccagtttaccaccaccccaagtacacagcagaatagtacaagtcaccctacaactactacttcttgggacctcaagcccccaacatcccagtcctcagtcctcagtcatcttgacttcaaatctcaacctgagccatccccagttcttagccagttgagccagcgacaacagcaccagagccaggcagtcactgttcctcctcctggtttggagtcctttccttcccaggcaaaacttcgagaatcaacacctggagacagtccctccactgtgaacaagcttttgcagcttcccagcacgaccattgaaaatatctctgtgtctgtccaccagccacagcccaaacacatcaaacttgctaagcggcggatacccccagcttctaagatcccagcttctgcagtggaaatgcctggttcagcagatgtcacaggattaaatgtgcagtttggggctctggaatttgggtcagaaccttctctctctgaatttggatcagctccaagcagtgaaaatagtaatcagattcccatcagcttgtattcgaagtctttaagtgagcctttgaatacatctttatcaatgaccagtgcagtacagaactccacatatacaacttccgtcattacctcctgcagtctgacaagctcatcactgaattctgctagtccagtagcaatgtcttcctcttatgaccagagttctgtgcataacaggatcccataccaaagccctgtgagttcatcagagtcagctccaggaaccatcatgaatggacatggtggtggtcgaagtcagcagacactagacagtaagtatagcagcaagctactcttgtcatggctggtgccaaccaaacagaggaagaggatagctcacgtgatgtggaaaacaccagttggtcaatggcttattcgttaaaaagcagcccttttgcttttttgtttttggaccaggtgttggctgtggtgttattagaaatgtcttaaccacagcaagaaggaggtggtggtctcatattcttctgccctaatcagactgcaccacaagtgcagcatacagtatgcattttaaagatgcttgggccaggcggggtggctgatgcccataatcccagtgctttggggggccaaggcaggcagattgcccaagctcaggagtttgagaccaccctgggcaacatggtgaaactctgtctctactaaaatacgaaaaactagccgggtgtggtggcggcgcgtgcctgtaatcccagctacttgggaggctgaggcacaagaatcgcttgagccagcttgggctacaaagtgagactccgtctgaaaaga

SEQ ID NO: 101721 - DNA, 3460 bp, Artificial Sequence
  derived and/or modified sequence
acattggcaggtaacgagcggcggcggcggcagcgggtcttgggtcctccgagagcagcagcggcaacagctgaacagatgcgtctcgctcaagtgatctttgataagaatgattcagattttgaagctaaagttaagcagcttatggaagtgacagggaaaaatcaggatgaatgcatagtggccctacatgattgtaatggagatgtgaacaaagctatcaatatattgctggaagggaattcagacacaacttcatgggagactgtagggtgtaagaaaaagaattttgcaaaagaaaattcagaaaacaaagagaatagagagaagaaaagcgagaaagaatcgagtcgtggacgtggaaacaacaaccggaaaggaagaggcggcaatcgtggcagagaatttagaggtgaagaaaatggaattgattgcaatcaagtggacaaaccttcagatcgtggcaagcgagcccggggtagagaactggcatcaaatactcacaacatagctcaggatctgtcaaacaaaagttcttatggactcaaaggggcttggaagaattctgtggaagagtggacaacagaagactggactgaagatcattgatctggtagccttgctccagaagcctgttcctcacagtcaagcctcagaagccaactcctttgaaacttcccaacagcagggctttggccaagcccttgtcttcacaaattcgcaacacaacaatcagatggcaccagggactggcagctccactgccgtcaactcctgttctcctcagagcctgtcatccgtccttggctcaggatttggagagcttgcaccaccaaaaatggcaaacatcaccagctcccagattttggaccagttgaaagctccgagtttgggccagtttaccaccaccccaagtacacagcagaatagtacaagtcaccctacaactactacttcttgggacctcaagcccccaacatcccagtcctcagtcctcagtcatcttgacttcaaatctcaacctgagccatccccagttcttagccagttgagccagcgacaacagcaccagagccaggcagtcactgttcctcctcctggtttggagtcctttccttcccaggcaaaacttcgagaatcaacacctggagacagtccctccactgtgaacaagcttttgcagcttcccagcacgaccattgaaaatatctctgtgtctgtccaccagccacagcccaaacacatcaaacttgctaagcggcggatacccccagcttctaagatcccagcttctgcagtggaaatgcctggttcagcagatgtcacaggattaaatgtgcagtttggggctctggaatttgggtcagaaccttctctctctgaatttggatcagctccaagcagtgaaaatagtaatcagattcccatcagcttgtattcgaagtctttaagtgagcctttgaatacatctttatcaatgaccagtgcagtacagaactccacatatacaacttccgtcattacctcctgcagtctgacaagctcatcactgaattctgctagtccagtagcaatgtcttcctcttatgaccagagttctgtgcataacaggatcccataccaaagccctgtgagttcatcagagtcagctccaggaaccatcatgaatggacatggtggtggtcgaagtcagcagacactagacactccaaagacaacaggccctccctctgccctcccgtctgtgagctccctgcccagcaccacctcctgcactgcacttctgccgtccacatcccagcacactggcgacctgactagcagccctctctctcagcttagcagttcgctctccagccaccagagcagcctctctgcacatgcagccctctcctcgagcacgtcacacacacatgccagtgtggagagcgcctcttcccaccagtcctcagccaccttctccacggcagcgacctccgtctcaagttccgcatcctcaggcgccagcctgtccagtagcatgaacaccgcgaacagcctctgtctgggtgggacccccgcgagtgcatccagcagcagtagcagggccgcgcccttggtgacctcaggcaaagcacccccaaacttacctcagggggtgcctcccctgctgcacaaccagtacctcgtaggtcccggaggactgcttcctgcctacccgatctatggctatgacgagctccagatgctgcagtcacggctgccagtggactactatggaattccctttgctgcacccacagcgcttgccagccgagatgggagcctagctaataatccatatccaggtgatgtcacaaagtttggccgtggggactctgcatcccctgcacccgctaccacaccagctcagccacagcagagccaatcacagacccaccacacagcccagcagcccttcgtgaatcctgcactgccacctggctatagctacactggtcttccctactacacaggcatgcccagtgccttccagtatggccccaccatgtttgtccctccagcctcagccaagcaacatggggtgaacctcagcactcccacacctcccttccagcaggccagtggttatggccagcacggctacagtacaggttatgacgacctgacccaggggacagcagcaggagactactccaaaggtggctatgctggatcatcgcaggcaccaaacaagtctgcaggttctgggcctggcaaaggagtatcagtgtcttcaagcaccactggtctacctgatatgactggttctgtctacaataagacacagacttttgacaagcagggatttcatgcagggacgcctccacctttcagcctgccctcggtcttgggctccactgggcccctggcctcgggagcggcccctggctatgcacccccaccattcctacacatcttgccagcccaccagcagccccactcacagctgctgcaccaccaccttccgcaggatgcacagagtggctcgggtcagcgcagccagcccagctccctgcagcccaagtctcaagcctccaaacctgcctacggcaactctccatactggacaaactaaacccagaagagaggggtgggctggggcaaggcttatcctgggcaggagagaacacacgagcacgtatttgggagcccagtgccctttcctagaattcccgacatgtgtcagccatgcctctgtggggagtctgcctcccagactggctactgtatgtaatgtatttatgtatgtatttgtaaatgtgatagaagtctgggggggagttgggggatggcggcagatgttagccaggtctgccctccccattcaagccccttctccactgtagcaaaataagcacccccaccccatctgccttcaggtcttcttcacagcctgcactgcccagtgggccactaggggcagtctctggaagggctg

SEQ ID NO: 101722 - DNA, 1746 bp, Artificial Sequence
  derived and/or modified sequence
atgatgaccagcgtgagcagcgaccactgcagaggcgccagagagaagccccagatcagcgccgcccagagcacccagccccagaagcaggtggtgcaggccaccgccgagcagatgagactggcccaggtgatcttcgacaagaacgacagcgacttcgaggccaaggtgaagcagctgatggaggtgaccggcaagaaccaggacgagtgcatcgtggccctgcacgactgcaacggcgacgtgaacaaggccatcaacatcctgctggagggcaacagcgacaccaccagctgggagaccgtgggctgcaagaagaagaacttcgccaaggagaacagcgagaacaaggagaacagagagaagaagaagcacaccggcgacctgaccagcagccccctgagccagctgagcagcagcctgagcagccaccagagcagcctgagcgcccacgccgccctgagcagcagcaccagccacacccacgccagcgtggagagcgccagcagccaccagagcagcgccaccttcagcaccgccgccaccagcgtgagcagcagcgccagcagcggcgccagcctgagcagcagcatgaacaccgccaacagcctgtgcctgggcggcacccccgccagcgccagcagcagcagcagcagagccgcccccctggtgaccagcggcaaggccccccccaacctgccccagggcgtgccccccctgctgcacaaccagtacctggtgggccccggcggcctgctgcccgcctaccccatctacggctacgacgagctgcagatgctgcagagcagactgcccgtggactactacggcatccccttcgccgcccccaccgccctggccagcagagacggcagcctggccaacaacccctaccccggcgacgtgaccaagttcggcagaggcgacagcgccagccccgcccccgccaccaccagcagcgccaccgccgagcccatcaccgaccccccccacagccccgccgccctgagagagagctgcaccgccacctggagctacaccggcctgccctactacaccggcatgcccagcgccttccagtacggccccaccatgttcgtgccccccgccagcgccaagcagcacggcgtgaacctgagcacccccaccccccccttccagcaggccagcggctacggccagcacggctacagcaccggctacgacgacctgacccagggcaccgccgccggcgactacagcaagggcggctacgccggcagcagccaggcccccaacaagagcgccggcagcggccccggcaagggcgtgagcgtgagcagcagcaccaccggcctgcccgacatgaccggcagcgtgtacaacaagacccagaccttcgacaagcagggcttccacgccggcacccccccccccttcagcctgcccagcgtgctgggcagcaccggccccctggccagcggcgccgcccccggctacgcccccccccccttcctgcacatcctgcccgcccaccagcagccccacagccagctgctgcaccaccacctgccccaggacgcccagagcggcagcggccagagaagccccgccccctgcagccccagcctgaagccccccaacctgcccaccctgagcatcctggacaagctgaaccccgaggagagaggcggcctgggccagggcctgagctgggccggcgagaacaccagagccagaatctgggagcccagcgccctgagctag

SEQ ID NO: 101723 - DNA, 1077 bp, Artificial Sequence
  derived and/or modified sequence
atgaacaccgccaacagcctgtgcctgggcggcacccccgccagcgccagcagcagcagcagcagagccgcccccctggtgaccagcggcaaggccccccccaacctgccccagggcgtgccccccctgctgcacaaccagtacctggtgggccccggcggcctgctgcccgcctaccccatctacggctacgacgagctgcagatgctgcagagcagactgcccgtggactactacggcatccccttcgccgcccccaccgccctggccagcagagacggcagcctggccaacaacccctaccccggcgacgtgaccaagttcggcagaggcgacagcgccagccccgcccccgccaccacccccgcccagccccagcagagccagagccagacccaccacaccgcccagcagcccttcgtgaaccccgccctgccccccggctacagctacaccggcctgccctactacaccggcatgcccagcgccttccagtacggccccaccatgttcgtgccccccgccagcgccaagcagcacggcgtgaacctgagcacccccaccccccccttccagcaggccagcggctacggccagcacggctacagcaccggctacgacgacctgacccagggcaccgccgccggcgactacagcaagggcggctacgccggcagcagccaggcccccaacaagagcgccggcagcggccccggcaagggcgtgagcgtgagcagcagcaccaccggcctgcccgacatgaccggcagcgtgtacaacaagacccagaccttcgacaagcagggcttccacgccggcacccccccccccttcagcctgcccagcgtgctgggcagcaccggccccctggccagcggcgccgcccccggctacgcccccccccccttcctgcacatcctgcccgcccaccagcagccccacagccagctgctgcaccaccacctgccccaggacgcccagagcggcagcggccagagaagccagcccagcagcctgcagcccaagagccaggccagcaagcccgcctacggcaacagcccctactggaccaactag

SEQ ID NO: 101724 - DNA, 1746 bp, Artificial Sequence
  derived and/or modified sequence
atgatgacatcagtcagttcagatcactgtcggggggcccgagagaaacctcaaataagcgccgctcaatccacacagccccagaagcaagttgtgcaggctacagcagagcagatgaggctggctcaggtcatctttgacaaaaacgattctgatttcgaagcaaaggtcaagcagctgatggaggtcacagggaaaaaccaagatgaatgtatcgtggccctgcatgattgtaacggcgatgtcaataaagctattaatatactacttgagggaaattctgacacaacgagctgggagacagtaggatgtaagaaaaagaactttgctaaggagaactctgaaaacaaggaaaaccgggagaaaaaaaaacataccggggacttgacatcctcaccattatctcaactgagttcctctcttagctcccaccagtccagtctgtccgcgcacgcagcactgtcctcctcgacaagtcacacgcacgcgtctgtagaatctgcgtcgtcgcatcagtcttccgcaacattctctaccgccgcaacttcggtgtccagctcagcttctagtggggcttcactgtcatcctcaatgaataccgctaattctctgtgcctgggaggaaccccagcctccgccagtagtagcagcagccgagcagcccctcttgtgacgagtgggaaggctccacccaatctcccgcagggagtgccgccactcttgcacaaccagtacctcgtcggtccaggcggtctgttgccagcttatccaatctacggttacgacgagctccagatgctgcaatctcgtctacctgtggactactatggaattcccttcgctgccccgactgcattggcatccagggatggatctctggccaacaatccatatcccggcgatgtgaccaaatttggtaggggagacagtgctagccccgccccagcgacaactagcagtgctacagccgagcctataacagatcccccgcactccccagccgccctaagagaaagctgtaccgccacctggagctacacaggattgccatattacacagggatgcccagcgccttccaatacggacccacaatgttcgtcccgcctgcttctgccaagcagcatggagtcaacttgtctactcccacacctccgtttcagcaggcttctgggtacgggcagcacggttattcaacaggttatgacgacctgacccagggtacggctgctggcgattacagtaagggagggtacgccggatcaagtcaggctcccaataaatctgcaggaagtggcccagggaagggtgtgtcggtcagttcatccaccacgggcctgcctgacatgacaggctcagtgtacaataagacacagaccttcgataagcagggtttccatgctggcacaccccccccattctctctaccctcggtcctcggctccaccggccccttggccagtggcgccgccccgggatacgcaccgcctccattcttgcacattttacccgcgcaccagcagccgcattctcaactgctgcatcaccacctacctcaagacgcacagagcggaagcgggcaacgatcaccagctccgtgttccccatcattaaaacctcccaacctccccaccctttccatattggataagctgaaccctgaggaacgcggcggactggggcagggacttagttgggccggcgagaatacccgggcacgtatttgggagccatccgcattgagctag

SEQ ID NO: 101725 - DNA, 1077 bp, Artificial Sequence
  derived and/or modified sequence
atgaacacggctaattctttgtgtctgggcggaactcctgccagtgcaagctcttcgagttcccgcgcagccccactggttacttcaggaaaggctccacctaacctcccacagggcgtgcctcccttgttgcacaaccaatacttggttggtccgggggggctgctccctgcatatcctatctatgggtacgatgagctccagatgctgcagtctcggctgccagtggactactacgggatccctttcgctgctccgaccgccctcgctagtagggacgggagtttggctaataacccataccccggcgatgttacaaaatttgggcgaggagacagtgcttccccagctcctgccacaacacctgcccaaccccagcagagtcaatcccagactcaccataccgcacagcagcctttcgttaatccagctcttccaccgggctactcctatacaggtctgccatattacactggcatgcccagcgccttccaatacgggcccaccatgttcgtgccaccagccagtgctaagcaacatggggttaacctaagcacgccgactccaccttttcagcaggccagcgggtacggtcagcatggctactctactgggtatgatgacctcactcagggaaccgcagccggcgattacagtaaaggcggatacgctggcagttcccaggcacccaacaagtccgccgggtccggccctggaaagggagtctccgtgtcaagtagtacgactggcctccccgatatgaccgggagtgtgtataataaaacccagacatttgacaaacagggattccatgcaggcacacctccccctttctcgctgccatctgtgctgggaagcactggaccgctagccagtggtgctgctccaggatacgcaccccccccatttctccacatcctcccagcgcatcaacaaccccactcccagttactgcaccaccatctgccccaagacgctcagtccggcagtggccagaggagtcaaccttcttctcttcagcctaagtcccaagcatccaaacccgcatacggcaattctccgtactggaccaactag

SEQ ID NO: 101726 - DNA, 1746 bp, Artificial Sequence
  derived and/or modified sequence
atgatgacctctgtgtccagtgaccactgccgcggggcccgggagaagccccagatctctgctgcccagagcacccagccccagaagcaggtggtgcaggccacagctgagcagatgaggctggcccaggtgatctttgacaagaatgacagcgactttgaggccaaggtgaagcagctgatggaggtgacaggcaagaaccaggatgagtgcatcgtggccctgcatgactgcaatggagatgtgaacaaggccatcaacatcctgctggagggcaacagcgacaccacctcctgggagaccgtgggctgcaagaagaagaactttgccaaggagaacagcgagaacaaggagaaccgggagaagaagaagcacactggagacctgaccagcagccccctgagccagctgagcagcagcctgagcagccaccagagcagcctgagcgcccacgccgccctgagcagcagcaccagccacacccacgcctctgtggagagcgccagcagccaccagagcagcgccaccttcagcacagctgccacctctgtgagcagcagcgccagcagcggggccagcctgagcagctccatgaacacagccaacagcctgtgcctgggcggcaccccagccagcgccagcagcagcagcagccgggccgcccccctggtgaccagcggcaaggccccacccaacctgccccagggcgtgccccccctgctgcacaaccagtacctggtgggccctgggggcctgctgcctgcctaccccatctacggctatgatgagctgcagatgctgcagagccggctgcctgtggactactacggcatcccctttgctgcccccacagccctggccagcagagatggcagcctggccaacaacccctacccaggagatgtgaccaagtttggccgcggggacagcgccagccctgccccagccaccaccagcagcgccacagctgagcccatcacagatcctccccacagccctgctgccctgcgggagagctgcacagccacctggagctacacaggcctgccctactacacaggcatgcccagcgccttccagtatggccccaccatgtttgtgcccccagccagcgccaagcagcacggcgtgaacctgagcacccccaccccacccttccagcaggccagcggctacggccagcacggctacagcacaggctatgatgacctgacccagggcacagctgctggggactacagcaaaggaggctacgccggcagcagccaggcccccaacaagtctgctggcagcggccctggaaaaggagtgtctgtgagcagcagcaccaccggcctgcctgacatgacaggctctgtgtacaacaagacccagacctttgacaagcagggcttccacgccggcaccccaccacccttcagcctgcccagcgtgctgggcagcacaggccccctggccagcggggccgcccctggctacgcccccccacccttcctgcacatcctgcctgcccaccagcagccccacagccagctgctgcaccaccacctgccccaggatgcccagagcggcagcggccagaggagccctgccccctgcagccccagcctgaagccacccaacctgcccaccctgagcatcctggacaagctgaaccctgaggagcggggcggcctgggccagggcctgtcctgggccggggagaacacccgggcccgcatctgggagcccagcgccctgtcctag

SEQ ID NO: 101727 - DNA, 1077 bp, Artificial Sequence
  derived and/or modified sequence
atgaacacagccaacagcctgtgcctgggcggcaccccagccagcgccagcagcagcagcagcagagctgcccccctggtgaccagcggcaaggccccacccaacctgccccagggcgtgccccccctgctgcacaaccagtacctggtgggccctgggggcctgctgcctgcctaccccatctacggctatgatgagctgcagatgctgcagagccggctgcctgtggactactacggcatcccctttgctgcccccacagccctggccagcagagatggcagcctggccaacaacccctacccaggagatgtgaccaagtttggccgcggggacagcgccagccctgccccagccaccaccccagcccagccccagcagagccagagccagacccaccacacagcccagcagccctttgtgaacccagccctgcccccaggctacagctacacaggcctgccctactacacaggcatgcccagcgccttccagtatggccccaccatgtttgtgcccccagccagcgccaagcagcacggcgtgaacctgagcacccccaccccacccttccagcaggccagcggctacggccagcacggctacagcacaggctatgatgacctgacccagggcacagctgctggggactacagcaagggcggctacgccggcagcagccaggcccccaacaagtctgctggcagcggccctgggaagggcgtgtctgtgagcagcagcaccaccggcctgcctgacatgactggatctgtgtacaacaagacccagacctttgacaagcagggcttccacgccggcaccccaccacccttcagcctgcccagcgtgctgggcagcacaggccccctggccagcggggccgcccctggctacgcccccccacccttcctgcacatcctgcctgcccaccagcagccccacagccagctgctgcaccaccacctgccccaggatgcccagagcggcagcggccagaggagccagcccagcagcctgcagcccaagagccaggccagcaagccagcctacggcaacagcccctactggaccaactag

SEQ ID NO: 101728 - DNA, 1746 bp, Artificial Sequence
  derived and/or modified sequence
atgatgaccagcgtgagcagcgaccactgccggggcgcccgggagaaaccacagattagtgctgcgcagtccactcagccccaaaaacaggtggttcaggccacagcagaacagatgcgcttggctcaggtcattttcgacaagaacgattccgatttcgaagccaaggtgaagcaactgatggaagtcaccggaaagaatcaagacgagtgtattgtagctctccatgattgtaatggggatgtgaataaggcaatcaatatcttgctggagggcaacagcgatacaacatcatgggagacagtgggttgcaaaaaaaagaacttcgccaaagagaattccgagaataaggagaacagagagaagaagaaacacaccggggacctgacatcgagtccgctgtcccagctgtcaagctcgttaagtagccaccaatctagtttgtccgcacacgcagctttaagtagcagcacctctcatacacatgcctccgtggagagtgctagcagccaccaatcttctgcaacattttctacagcggcaactagcgtgtcatcctccgcatctagcggcgcctctctcagctcaagcatgaacactgctaacagtttatgcctcggaggtactcccgcaagcgcctcctcatcttcctcaagggcggcccctctggtcactagtgggaaagcccctccaaacctgcctcagggggtgcctcctctgttgcacaaccagtatctggtaggacctgggggcttgctgccagcttatcctatctatgggtacgacgaacttcagatgctccagtctagattgcctgtggattactatgggattccgtttgcagcaccaaccgcattggcctcacgtgacggatccctcgccaataacccgtatcccggagatgtaaccaagttcggtcggggcgacagcgcatcaccagcccccgccacaacaagcagcgccacggccgaacctattactgaccccccccactctcctgcagctttacgggaaagctgtaccgctacttggagctacaccggcttgccgtattacactggcatgcctagtgctttccagtacgggcctacgatgtttgtgcctcccgcatcagcaaagcaacacggggtgaatttgagcactcccactcccccttttcagcaagcaagtggatatggacagcatgggtactcaacaggctacgatgatctaacccaagggactgccgctggagattactccaaaggggggtatgctggatcttctcaagcacctaacaaatccgctgggagcggccccggcaaaggggtgtctgtttcttcaagcacgacaggcctccccgacatgacaggcagtgtctacaataaaacccagacctttgacaaacaaggcttccacgccgggactccccctcctttttccttgcccagcgtgctaggatccactggccccctcgcctccggtgccgccccaggttatgctccccccccgttcctccacatcctcccggcacatcagcagccacactcccagttattacatcaccacctgcctcaggatgcccaatctggctccgggcagcgtagccctgccccctgttcgccttccttgaagccacctaatttaccaacgttgagcatattggacaaactgaaccctgaggaaaggggtgggctgggccagggtttatcatgggctggagagaataccagggcccgtatctgggagccctctgccttatcatag

SEQ ID NO: 101729 - DNA, 1077 bp, Artificial Sequence
  derived and/or modified sequence
atgaacaccgccaacagcctgtgcctgggcggcacccccgccagcgccagtagctcatcaagccgagctgcgccgctcgtcacatcgggtaaagcacccccaaatctgcctcagggcgttcctcccttgctgcacaatcagtatctggtcgggcccggtggtctgctgcctgcttatcctatttacggctacgatgaactgcaaatgctgcaatctaggctgccagtggattattacggtataccttttgccgcccccactgctctagctagtagagatgggagcctggctaataatccctaccctggagatgttaccaagtttggcaggggtgattcagcatctccagctcccgccactacccccgcgcagccccaacagtcacaatcacagacgcaccacacagctcaacagccattcgtgaaccctgccctccctccaggctatagctataccgggcttccttattacacaggaatgccttcagcctttcaatatgggcccaccatgttcgttccccccgcctccgcaaagcagcacggcgtaaatttatccactcccacaccaccatttcaacaggcctcggggtacggccagcatggctactcaaccggttatgatgatctgacgcaagggaccgctgcaggtgactacagtaagggcggatatgcagggtccagccaggcacctaacaaatctgccggctcagggcccggcaagggagtctcggtgtcctctagcaccaccgggttaccagacatgaccggctctgtgtataacaaaacccagacttttgataaacagggcttccatgccggaaccccccctccgtttagcctgccctccgtcctcggaagtaccggcccattggccagcggtgcagctcccggctacgcacctccgccttttctgcacattttacctgcccaccagcaaccacacagtcagttgttgcatcatcatctcccacaggatgcccagagtggcagtggccagcgctcacaaccaagcagcctgcagccaaaatcccaggctagcaagcctgcctacggcaattctccctattggaccaactag

SEQ ID NO: 101730 - DNA, 1746 bp, Artificial Sequence
  derived and/or modified sequence
atgatgaccagcgttagctcggaccattgtaggggcgctcgagagaagccccagatctcagcggctcagagtacacagccgcagaagcaggtggtccaggcaacagcagagcagatgcggctggcccaggtaattttcgataagaacgacagcgatttcgaggcaaaagttaagcaactgatggaggtgacgggcaaaaatcaagacgagtgtatcgttgccctgcacgattgcaatggcgatgtgaataaggccatcaacattctcctggaaggcaacagcgacactacatcctgggaaacagtgggatgcaaaaagaagaattttgccaaggaaaactcagaaaataaagagaacagagagaagaagaaacacacgggcgacttgactagcagtccattgagccaactgtcgagctcactttcatcccaccaatcttcgctctccgcccatgcagccctatcaagctccacatcacacacacacgctagcgtagagagtgctagttctcaccagtcatccgccaccttttccaccgccgctacctccgtctcctctagcgcctcatcaggggcaagtttatcttccagcatgaataccgcaaacagcttgtgcttgggagggacacccgcttcggcaagttcctccagctctagagcagctcctctagttacctctggaaaggcccctccaaacctgcctcagggcgtcccaccgcttctgcacaatcagtacctagtaggtccaggtgggctccttcctgcctaccccatatatggctatgacgaactgcagatgcttcagtccagactgcctgtggattactatggcattccgtttgccgctccaactgcgctggcctctcgggacggcagtttggcgaataatccttacccaggcgacgttactaagttcggacggggtgactcagcctctcctgctccagccacaacctctagtgctactgccgagccgattaccgacccaccccatagcccagccgcactgagagagagctgcacggccacctggtcttatacaggcctaccctactacactggcatgcctagtgcattccaatacggaccaacaatgtttgtgcccccagcctccgctaagcaacatggagtgaacctgtccacccctactcccccttttcagcaggcctccggctatgggcaacacggctactccactggctacgacgatttaactcagggaacagctgcgggtgactatagcaaagggggttacgcaggctctagtcaagccccaaacaaaagtgctggcagcggtccagggaagggcgtgagtgtgtccagcagcacaacagggctgccagatatgaccggttccgtgtataacaaaactcagacttttgacaagcagggctttcacgctggcaccccaccacccttttccctcccttccgttcttggaagtaccggcccactcgccagcggggctgccccaggatacgcaccccctccattcctgcacatccttcctgcccaccagcagccacactcacagctgctccatcaccaccttccccaagatgcccagagcggtagcggccagcggtctccggctccctgcagtccctccttaaagcccccaaacctgcctactctgtccatcctggacaaattgaacccagaggaaagggggggactggggcagggcctcagctgggctggagaaaacactcgtgcgagaatttgggagcccagcgcgctgagttag

SEQ ID NO: 101731 - DNA, 1077 bp, Artificial Sequence
  derived and/or modified sequence
atgaataccgctaactctctgtgcctgggcggaaccccggctagcgccagcagcagcagctctagggccgcaccacttgtcacgagcgggaaagctccgccaaatctgccccagggcgttccgccactcctccacaatcagtacctggtgggtcccggaggcctcctgccggcataccctatatatggatacgatgaactccagatgctgcagagtcgcctcccagtcgattattacggcataccatttgccgctccgacggctttggcttcccgggacggctctctggccaataatccatacccaggtgacgtgaccaaattcggcagaggcgacagcgccagtccagcaccagcaacgacccctgctcagccacagcagtcccagagccagacccaccacaccgcgcagcagccatttgtgaacccggctctgccccctggctatagctacaccggtctgccctactatacaggaatgccctcagctttccagtacgggccaaccatgttcgttccgccagccagcgcgaaacagcacggggtcaacttaagcaccccgacaccaccctttcagcaggcttcagggtatggtcagcatggatattctaccggatatgacgaccttacgcaagggacggctgctggtgactattctaagggaggatatgccggatcctcacaggctcccaacaagagcgcgggtagtggccctggcaaaggtgtcagtgtttcctcaagcaccacaggattgcccgatatgacaggtagcgtctataataaaacacagacatttgataaacaggggtttcacgcaggtacgccccctcccttctctctgccttcagtgctgggaagcaccggcccactcgcttccggggcagctcccggttatgcccctcccccatttttgcacattctgcccgcacaccagcaacctcactctcagctcctacaccaccatttaccccaggacgcccagtctggctccggacagaggagccaacctagttctcttcagcccaagtcacaggcctccaagcctgcttatggaaattctccctattggacaaattag

SEQ ID NO: 101732 - DNA, 1848 bp, Artificial Sequence
  derived and/or modified sequence
attggcaggtaacgagcggcggcggcggcagcgggtcttgggtcctccgagagcagcagcgattttctattttgtacatacattattttgtatatactgtatatgatgacttcagtgagcagtgaccattgtcgaggtgctcgggaaaaaccacagatttcagcagcacaatcaacgcaaccacagaaacaagtggtacaggcaacagctgaacagatgcgtctcgctcaagtgatctttgataagaatgattcagattttgaagctaaagttaagcagcttatggaagtgacagggaaaaatcaggatgaatgcatagtggccctacatgattgtaatggagatgtgaacaaagctatcaatatattgctggaagggaattcagacacaacttcatgggagactgtagggtgtaagaaaaagaattttgcaaaagaaaattcagaaaacaaagagaatagagagaagaaaaaacacactggcgacctgactagcagccctctctctcagcttagcagttcgctctccagccaccagagcagcctctctgcacatgcagccctctcctcgagcacgtcacacacacatgccagtgtggagagcgcctcttcccaccagtcctcagccaccttctccacggcagcgacctccgtctcaagttccgcatcctcaggcgccagcctgtccagtagcatgaacaccgcgaacagcctctgtctgggtgggacccccgcgagtgcatccagcagcagtagcagggccgcgcccttggtgacctcaggcaaagcacccccaaacttacctcagggggtgcctcccctgctgcacaaccagtacctcgtaggtcccggaggactgcttcctgcctacccgatctatggctatgacgagctccagatgctgcagtcacggctgccagtggactactatggaattccctttgctgcacccacagcgcttgccagccgagatgggagcctagctaataatccatatccaggtgatgtcacaaagtttggccgtggggactctgcatcccctgcacccgctaccacaagctcagccacagcagagccaatcacagacccaccacacagcccagcagcccttcgtgaatcctgcactgccacctggagctacactggtcttccctactacacaggcatgcccagtgccttccagtatggccccaccatgtttgtccctccagcctcagccaagcaacatggggtgaacctcagcactcccacacctcccttccagcaggccagtggttatggccagcacggctacagtacaggttatgacgacctgacccaggggacagcagcaggagactactccaaaggtggctatgctggatcatcgcaggcaccaaacaagtctgcaggttctgggcctggcaaaggagtatcagtgtcttcaagcaccactggtctacctgatatgactggttctgtctacaataagacacagacttttgacaagcagggatttcatgcagggacgcctccacctttcagcctgccctcggtcttgggctccactgggcccctggcctcgggagcggcccctggctatgcacccccaccattcctacacatcttgccagcccaccagcagccccactcacagctgctgcaccaccaccttccgcaggatgcacagagtggctcgggtcagcgcagcccagctccctgcagcccaagtctcaagcctccaaacctgcctacgctctccatactggacaaactaaacccagaagagaggggtgggctggggcaaggcttatcctgggcaggagagaacacacgagcacgtatttgggagcccagtgccctttcctag

SEQ ID NO: 101733 - DNA, 2673 bp, Artificial Sequence
  derived and/or modified sequence
ttatatgctgctttctatgtcctggtttggagactggtctccctcttacagagcttttcttcccttttttgagacttgccttgtccacctaggtgtgccccccacctacctgctcggagcttgaagttcttcataggaccctgttgctagggttgggcagctaggcagggcttctgggactcggggctgatggagcatccgctggttcactctttcttcacaggggtaccttgtcaaacaggcataagtggcaggccatgcccttttaggtgggcactggtgaggcattggtggactgaaaggtgtcaccaggttttggagcaaaggcctctctcagcctcctgtttccagaccacagtggctgagaatcccaatagaagggaaatctccaaaagattgagacttacgctgggcttcctgtggcctgtgctcgcctcttctcagactgtttgctttgctctgaggtaggtacttgtcccatattcagatagtctgtgttcatttatgatccgaagttatcttgggatttctatgccctcattttggatgccaagcatgagcaacttgaaggatttttacagagagttgtggtcattaaagcttaatgttaatagttttgatgttcagtttatgtattgtatcctgatggctggaaccagctgctatgtgaggggccgcagtgagcactgagcacagagcctctcaccttaagggagcctgggtggttacatcattgcctgcctgctcagccttgagacttgggcccaagcgccaggccaggctctccccagcaccctcctcctctgcctccagatccatgtgtcctggcttttcttttgccagcatgccagtgtggagagcgcctcttcccaccagtcctcagccaccttctccacggcagcgacctccgtctcaagttccgcatcctcaggcgccagcctgtccagtagcatgaacaccgcgaacagcctctgtctgggtgggacccccgcgagtgcatccagcagcagtagcagggccgcgcccttggtgacctcaggcaaagcacccccaaacttacctcagggggtgcctcccctgctgcacaaccagtacctcgtaggtcccggaggactgcttcctgcctacccgatctatggctatgacgagctccagatgctgcagtcacggctgccagtggactactatggaattccctttgctgcacccacagcgcttgccagccgagatgggagcctagctaataatccatatccaggtgatgtcacaaagtttggccgtggggactctgcatcccctgcacccgctaccacaccagctcagccacagcagagccaatcacagacccaccacacagcccagcagcccttcgtgaatcctgcactgccacctggctatagctacactggtcttccctactacacaggcatgcccagtgccttccagtatggccccaccatgtttgtccctccagcctcagccaagcaacatggggtgaacctcagcactcccacacctcccttccagcaggccagtggttatggccagcacggctacagtacaggttatgacgacctgacccaggggacagcagcaggagactactccaaaggtggctatgctggatcatcgcaggcaccaaacaagtctgcaggttctgggcctggcaaaggagtatcagtgtcttcaagcaccactggtctacctgatatgactggttctgtctacaataagacacagacttttgacaagcagggatttcatgcagggacgcctccacctttcagcctgccctcggtcttgggctccactgggcccctggcctcgggagcggcccctggctatgcacccccaccattcctacacatcttgccagcccaccagcagccccactcacagctgctgcaccaccaccttccgcaggatgcacagagtggctcgggtcagcgcagccagcccagctccctgcagcccaagtctcaagcctccaaacctgcctacggcaactctccatactggacaaactaaacccagaagagaggggtgggctggggcaaggcttatcctgggcaggagagaacacacgagcacgtatttgggagcccagtgccctttcctagaattcccgacatgtgtcagccatgcctctgtggggagtctgcctcccagactggctactgtatgtaatgtatttatgtatgtatttgtaaatgtgatagaagtctgggggggagttgggggatggcggcagatgttagccaggtctgccctccccattcaagccccttctccactgtagcaaaataagcacccccaccccatctgccttcaggtcttcttcacagcctgcactgcccagtgggccactaggggcagtctctggaagggctggttcaaggctgtttgggtataggggtcaggtaccaatgaagaatcacgacttgtctcactcctttggaaattgttttctttcctgtgtaattacttcatacctctgtttttgagaaactgttccgtttgtcatctgtcatggtctccttccaccaaatcttcatctgggaatagcagcggtatccctccacccaagtatggccacctgtttgtcttcatatagaacaggggcttctggtctggtcatgtccctagagacttactagagactggctgaccatg

SEQ ID NO: 101734 - protein, 567 aa, Artificial Sequence
  derived and/or modified sequence
MWFSPRSKKVRYVVSKASVQTQPAIKKDASAQQDSYEFVSPSPPADVSERAKKASARSGKKQKKKTLAEINQKWNLEAEKEDGEFDSKEESKQKLVSFCSQPSVISSPQINGEIDLLASGSLTESECFGSLTEVSLPLAEQIESPDTKSRNEVVTPEKVCKNYLTSKKSLPLENNGKRGHHNRLSSPISKRCRTSILSTSGDFVKQTVPSENIPLPECSSPPSCKRKVGGTSGRKNSNMSDEFISLSPGTPPSTLSSSSYRRVMSSPSAMKLLPNMAVKRNHRGETLLHIASIKGDIPSVEYLLQNGSDPNVKDHAGWTPLHEACNHGHLKVVELLLQHKALVNTTGYQNDSPLHDAAKNGHVDIVKLLLSYGASRNAVNIFGLRPVDYTDDESMKSLLLLPEKNESSSASHCSVMNTGQRRDGPLVLIGSGLSSEQQKMLSELAVILKAKKYTEFDSTVTHVVVPGDAVQSTLKCMLGILNGCWILKFEWVKACLRRKVCEQEEKYEIPEGPRRSRLNREHCQSCLMDATSICGEPSNTIQRTTLLSSSLQVGARSSVESPSQTVT

SEQ ID NO: 101735 - DNA, 411 bp, Artificial Sequence
  derived and/or modified sequence
atggccgccgacatcttccccagaaagaagcccgccaacagcagcagcaccagcgtgcagcagtaccaccagcagaacctgagcaacaacaacctgatccccgcccccaactggcagggcctgtaccccaccatcagagagagaaacgccatgatgttcaacaacgacctgatggccgacgtgcacttcgtggtgggcccccccggcggcacccagagactgcccggccacaagtacgtgctggccgtgggcagcagcgtgttccacgccatgttctacggcgagctggccgaggacaaggacgagatcagaatccccgacgtggagcccgccgccttcctggccatgctgaagtacatctactgcgacgagatcgacctggccgccgacaccgtgctggccaccctgtag

SEQ ID NO: 101736 - DNA, 411 bp, Artificial Sequence
  derived and/or modified sequence
atggccgctgacatctttcccaggaaaaaacccgccaactccagctccacctccgttcagcagtaccatcaacaaaatctcagtaacaacaacctcatccccgctccaaattggcagggtctgtatccgaccattagggagcgaaacgcgatgatgttcaacaatgacctcatggcagacgtccatttcgttgtgggcccgccgggcggaacacagcggctccctggccacaagtatgtactcgcagtcggctcctccgtcttccatgctatgttctatggcgaattggccgaggacaaagacgagatccgcatccccgacgtggaacccgccgcgtttctcgctatgctgaaatacatttattgcgacgagattgacctggccgctgacactgttttggccactctctag

SEQ ID NO: 101737 - DNA, 411 bp, Artificial Sequence
  derived and/or modified sequence
atggctgctgacatcttccccaggaagaagccagccaacagcagcagcacctctgtgcagcagtaccaccagcagaacctgagcaacaacaacctgatcccagcccccaactggcagggcctgtaccccaccatccgggagagaaatgccatgatgttcaacaatgacctgatggctgatgtgcactttgtggtgggccccccaggcggcacccagaggctgcccggccacaagtatgtgctggccgtgggcagcagcgtcttccacgccatgttttatggagagctggccgaggacaaggatgagatccgcatcccagatgtggagcctgctgccttcctggccatgctgaagtacatctactgtgatgaaattgacctggccgctgacacagtgctggccaccctgtag

SEQ ID NO: 101738 - DNA, 411 bp, Artificial Sequence
  derived and/or modified sequence
atggccgccgacatcttcccccggaagaagcccgccaacagcagctccacctctgtacagcaataccaccagcagaacctatccaataacaacttgattcccgcgcctaattggcaggggttgtacccaactattcgagaacgtaatgcaatgatgttcaataacgatctcatggctgacgtgcattttgtggtgggtcctccaggaggaacccaaagactgcctggccataagtacgttctggctgtcggatcctccgtgtttcatgccatgttttatggagagctagccgaggacaaggacgagattaggatccctgatgttgagccagctgcctttctagccatgcttaaatatatttactgcgacgagatcgacttggccgccgatacagtgctggcaactttgtag

SEQ ID NO: 101739 - DNA, 411 bp, Artificial Sequence
  derived and/or modified sequence
atggccgcagatatctttccaagaaagaagccagccaatagctctagtacaagtgttcagcagtatcaccagcagaacctgagtaacaacaaccttatcccggctccgaattggcaggggctctatccaacgattcgggagagaaacgctatgatgttcaacaacgatctgatggccgatgtgcacttcgtggtgggaccgcctggtggcacacaacgcctgcctggccacaagtatgtattagcggttggcagttctgtttttcacgccatgttttacggagaattagcagaggataaggacgaaatacgtatcccagatgtggaacccgctgcctttctcgctatgctgaaatatatctactgcgatgaaattgatctggcagcagacactgtactggcaacgctgtag

SEQ ID NO: 101740 - protein, 97 aa, Artificial Sequence
  derived and/or modified sequence
MKAQTALSFFLILITSLSGSQGIFPLAFFIYVPMNEQIVIGRLDEDIILPSSFERGSEVVIHWKYQDSYKVHSYYKGSDHLESQDPRYANRTSLFYN

SEQ ID NO: 101741 - protein, 342 aa, Artificial Sequence
  derived and/or modified sequence
MASLSQLSGHLNYTCGAENSTGASQARPHAYYALSYCALILAIVFGNGLVCMAVLKERALQTTTNYLVVSLAVADLLVATLVMPWVVYLEVTGGVWNFSRICCDVFVTLDVMMCTASILNLCAISIDRYTAVVMPVHYQHGTGQSSCRRVALMITAVWVLAFAVSCPLLFGFNTTGDPTVCSISNPDFVIYSSVVSFYLPFGVTVLVYARIYVVLKQRRRKRILTRQNSQCNSVRPGFPQQTLSPDPAHLELKRYYSICQDTALGGPGFQERGGELKREEKTRNSLSATSGEEGNPNGGHCAWGLHCLLAALLLDPCSQYPLPDMPRVPRALQCHDMAGLRE

SEQ ID NO: 101742 - protein, 400 aa, Artificial Sequence
  derived and/or modified sequence
MASLSQLSGHLNYTCGAENSTGASQARPHAYYALSYCALILAIVFGNGLVCMAVLKERALQTTTNYLVVSLAVADLLVATLVMPWVVYLEVTGGVWNFSRICCDVFVTLDVMMCTASILNLCAISIDRYTAVVMPVHYQHGTGQSSCRRVALMITAVWVLAFAVSCPLLFGFNTTGDPTVCSISNPDFVIYSSVVSFYLPFGVTVLVYARIYVVLKQRRRKRILTRQNSQCNSVRPGFPQQTLSPDPAHLELKRYYSICQDTALGGPGFQERGGELKREEKTRNSLSPTIAPKLSLEVRKLSNGRLSTSLKLGPLQPRGVPLREKKATQMVAIVLGAFIVCWLPFFLTHVLNTHCQTCHVSPELYSATTWLGYVNSALNPVIYTTFNIEFRKAFLKILSC

SEQ ID NO: 101743 - DNA, 1029 bp, Artificial Sequence
  derived and/or modified sequence
atggcatccctgagccagcttagtggccatctcaactatacctgcggtgccgagaactctaccggggcgagccaagcccggcctcacgcatattacgcactgtcttattgcgccctaatcctggccatcgtgtttggaaacggactcgtctgcatggccgtcttgaaagagagagccctacagactaccactaactacctcgtagtgtcccttgcggtggctgatcttctagtcgctaccctcgtaatgccatgggttgtgtatctcgaggtaacaggtggtgtgtggaacttttcaagaatctgctgtgatgtgttcgtgacgctcgacgttatgatgtgtactgcctctatccttaacctctgcgctattagcatcgaccggtacactgcagttgtcatgcctgttcactatcagcacgggaccggacagtcttcttgtcgccgggtagctctgatgattacagccgtttgggtactggccttcgcagtgagctgcccactactcttcgggttcaacacaacaggagaccctactgtctgcagcatctcgaatcctgattttgtgatctattcctcagtggtgtctttctatctgccatttggagtcacggtgcttgtctacgcaagaatttacgttgtcttaaaacaacgccgtcgcaagcggatcttgaccaggcagaactctcagtgtaatagcgtgcgccccggatttcctcagcagaccctgtccccagatcccgcacacctcgagctgaaacgttattactccatctgccaagataccgccctcggcggacccggatttcaggaacgcggcggcgagttaaagcgggaggagaagacgcggaactcgctcagtgctacatcaggggaggagggtaaccccaatgggggacattgcgcttggggcttgcattgcctccttgctgccctcctccttgatccttgcagccagtacccactgcctgacatgcccagagtaccgagggcactgcagtgccacgatatggctggactaagggagtag

SEQ ID NO: 101744 - DNA, 1203 bp, Artificial Sequence
  derived and/or modified sequence
atggcttccctcagccagttgagcgggcatctgaactacacgtgtggtgccgagaacagcactggcgcttctcaggccaggccacacgcctactatgctttgtcgtactgtgccttaattctcgcaatcgtcttcgggaacgggcttgtttgcatggctgtcctgaaggaacgcgccctgcaaacaactactaattacctagtggtatctctggccgtggccgatcttcttgtggccaccctggttatgccatgggtggtctatctggaagtgactgggggcgtttggaattttagtcgaatctgctgcgacgttttcgtcaccctggacgttatgatgtgcacagctagcattctcaatctgtgtgcgatcagcatcgaccgctatacggccgttgtgatgcctgtgcactaccagcatggtaccgggcagagcagctgtaggcgcgtggctttgatgatcacagccgtctgggtgctcgccttcgccgtgagctgtcctctgctgtttggctttaacacaactggagaccccactgtgtgttctatttctaaccctgactttgtgatttactcaagtgtcgtgagtttctaccttccttttggcgtgactgtgctggtctatgcgaggatctatgtcgtgctgaaacaaaggcggcggaaacgcattctcacacgccaaaatagtcaatgcaacagtgttcgtcctggcttcccccagcaaacccttagtccagaccccgcccatctggagctgaaacgatactattctatctgccaggatacagcccttggcggccccgggttccaagagaggggtggggaactgaagagagaagagaagactagaaactctctgtccccaaccatcgcaccaaagctcagcctcgaggtacgaaaactcagcaatggtcggctttctacttcactgaagcttggaccgctccagccaaggggcgtgccattgcgggagaagaaggctacccagatggtggccattgtgctgggcgcctttattgtttgttggctaccttttttcctgacgcacgttttgaatacccactgccaaacgtgtcacgtgtctcctgagctctactcagcaacgacttggctcggatatgtgaacagcgccttaaatcccgtgatctatacgacattcaacatcgaatttcgcaaagccttcctcaagatcctgagttgctag

SEQ ID NO: 101745 - DNA, 1203 bp, Artificial Sequence
  derived and/or modified sequence
atggctagcctgtcacagttgagcggacaccttaactatacctgcggcgccgaaaatagcactggcgcttcgcaggccagaccgcatgcctactacgcactttcctattgcgcccttattttagccatcgtgtttgggaacggcctggtttgcatggctgttctgaaagaaagggcacttcagactactacaaactacttggtggtaagcctcgcagtagctgacttgctggttgcgactctggtgatgccgtgggtggtgtatttggaggttacaggcggcgtctggaacttctcccgcatctgttgtgatgtgtttgtgaccctagatgttatgatgtgcactgcgtccatcctaaacctctgtgcaatcagcatagaccgatacacggcggtcgtgatgcctgtgcattaccagcacggcacaggtcagagctcgtgtcgtcgagttgcccttatgattaccgccgtctgggttttggctttcgcggtaagttgtccgcttctgtttgggttcaacaccactggagacccaaccgtctgcagtattagcaacccagacttcgtcatctacagttcagtggtgtcattctacttacccttcggcgtcacagtgcttgtctacgcacgcatttatgtggtcctgaagcagaggaggagaaagaggatacttacccgccagaactcccagtgcaacagcgtaaggccagggttcccacagcaaactctaagccctgatcccgcccatttggagcttaagcgttactacagtatatgtcaagatacagctttgggtggaccgggattccaggagaggggaggggaactcaaaagagaggagaagactcgcaactccctgtctcctaccatagcgccaaagctatctctggaggtccggaaactgtctaacggaaggctctctacatcactgaaactggggccactccagcccagaggagtgccactgagggagaagaaagcgacacaaatggtggcgatcgtgctgggggcattcatagtgtgttggctgccttttttcctaacgcatgttctcaatacccattgtcagacctgccatgtatcccctgaattatattccgcaactacctggctcggttatgtcaacagcgcacttaacccagtgatttacactacattcaacattgagttccggaaggcttttctaaaaattctgtcttgttag

SEQ ID NO: 101746 - DNA, 1203 bp, Artificial Sequence
  derived and/or modified sequence
atggcctctctgagccagctttcaggtcacctcaattacacatgtggcgcagagaactctaccggcgcctcgcaggctcggccccacgcatactacgccctctcctattgcgcgttgattctggccatcgtgtttgggaacggactcgtctgtatggctgtgttgaaagaacgcgctcttcagaccacaacaaattatttggtggtatctctcgccgtggccgatctgttagtggcaacactcgtcatgccttgggtggtgtatctcgaggtgaccggcggtgtgtggaacttcagtcgcatctgttgtgatgtcttcgtcacactggacgtgatgatgtgtactgcgagcatcctgaacctttgtgcaatatctatcgaccgttacaccgcggttgtgatgcccgtgcactaccagcacgggacagggcaaagtagttgtaggagagtcgcccttatgatcacagccgtgtgggtgctggcttttgctgtttcttgccctctgctgtttggttttaatacaactggcgatccaactgtgtgtagtataagcaaccccgattttgttatttactcttcagtggtgtccttttatctgccttttggagtgacggtgctagtttatgctcgcatatacgtcgtgctcaaacagcgcaggcgaaagagaatcttaaccagacaaaattctcagtgcaatagcgtgaggccaggcttcccgcaacaaacactttccccagatcctgcacatctggagctaaaaagatattattctatatgccaggataccgcattgggggggcccggcttccaggagcggggaggggaattaaagcgcgaggaaaagactcgcaattctctaagtcctacaatcgcccctaaattatctctagaagtcaggaaactctctaacggcaggctctctactagcctgaaactcggacccttacagcctagaggggtgcccttaagagagaagaaagccacacagatggtagctattgtgctgggcgcgtttatagtgtgctggctccctttctttttgacacacgtgttgaacacacattgccagacttgtcacgtgtcacctgagctctattccgccaccacttggctaggctacgtcaattctgcactcaatcctgtaatctacaccacatttaatattgagttccggaaagccttcctgaagatacttagctgctag

SEQ ID NO: 101747 - DNA, 1029 bp, Artificial Sequence
  derived and/or modified sequence
atggccagcctgagccagctgagcggccacctgaactacacctgtggggctgagaacagcactggagccagccaggcccggccccacgcctactatgccctgagctactgtgccctgatcctggccatcgtgtttggaaatggcctggtgtgcatggctgtgctgaaggagcgggccctgcagaccaccaccaactacctggtggtgtccctggccgtggccgacctgctggtggccaccctggtgatgccctgggtggtgtacctggaggtgactggaggagtgtggaacttcagccgcatctgctgtgatgtgtttgtgaccctggatgtgatgatgtgcacagccagcatcctgaacctgtgtgccatcagcattgaccgctacacagctgtggtgatgcctgtgcactaccagcacggcaccggccagagcagctgccggcgggtggccctgatgatcacagctgtgtgggtgctggcctttgctgtgtcctgccccctgctgtttggcttcaacaccactggagaccccaccgtgtgcagcatcagcaacccagactttgtgatctacagctctgtggtgtccttctacctgccctttggagtgacagtgctggtgtatgcccgcatctacgtggtgctgaagcagaggaggaggaagaggatcctgacccggcagaacagccagtgcaacagcgtgcggcccggcttcccccagcagaccctgagcccagaccctgcccacctggagctgaagcgctactacagcatctgccaggacacagccctgggcggccctggcttccaggagcggggcggggagctgaagcgggaggagaagaccaggaacagcctgagcgccaccagcggggaggagggcaaccccaatggaggccactgtgcctggggcctgcactgcctgctggccgccctgctgctggacccctgcagccagtaccccctgcctgacatgccccgggtgccccgggccctgcagtgccacgacatggccggcctgcgggagtag

SEQ ID NO: 101748 - DNA, 1203 bp, Artificial Sequence
  derived and/or modified sequence
atggccagcctgagccagctgagcggccacctgaactacacctgtggggctgagaacagcactggagccagccaggcccggccccacgcctactatgccctgagctactgtgccctgatcctggccatcgtgtttggaaatggcctggtgtgcatggctgtgctgaaggagcgggccctgcagaccaccaccaactacctggtggtgtccctggccgtggccgacctgctggtggccaccctggtgatgccctgggtggtgtacctggaggtgactggaggagtgtggaacttcagccgcatctgctgtgatgtgtttgtgaccctggatgtgatgatgtgcacagccagcatcctgaacctgtgtgccatcagcattgaccgctacacagctgtggtgatgcctgtgcactaccagcacggcaccggccagagcagctgccggcgggtggccctgatgatcacagctgtgtgggtgctggcctttgctgtgtcctgccccctgctgtttggcttcaacaccactggagaccccaccgtgtgcagcatcagcaacccagactttgtgatctacagctctgtggtgtccttctacctgccctttggagtgacagtgctggtgtatgcccgcatctacgtggtgctgaagcagaggaggaggaagaggatcctgacccggcagaacagccagtgcaacagcgtgcggcccggcttcccccagcagaccctgagcccagaccctgcccacctggagctgaagcgctactacagcatctgccaggacacagccctgggcggccctggcttccaggagcggggcggggagctgaagcgggaggagaagaccaggaacagcctgagccccaccatcgcccccaagctgagcctggaggtgaggaagctgagcaatggccgcctgagcaccagcctgaagctgggccccctgcagccccggggcgtgcccctgcgggagaagaaggccacccagatggtggccatcgtgctgggcgccttcatcgtgtgctggctgcccttcttcctgacccacgtgctgaacacccactgccagacctgccacgtgtccccagagctgtacagcgccaccacctggctgggctacgtgaacagcgccctgaaccctgtgatctacaccaccttcaacatcgagttcaggaaggccttcctgaagatcctgagctgctag

SEQ ID NO: 101749 - DNA, 1029 bp, Artificial Sequence
  derived and/or modified sequence
atggccagcctgagccagctgagcggccacctgaactacacctgcggggcggaaaactctacaggagcctcccaagcacggccacacgcctactatgccctgagttattgtgcgcttatcctggcgattgtgttcggaaacggactcgtctgcatggctgtgctcaaggagcgagcgctgcagacaacaacaaactacttagtcgtgtcattagccgtggccgacctgctggtggcaactttagtcatgccctgggtggtctatctggaagtgactggtggggtgtggaactttagccgaatttgctgtgatgtgttcgttacgctggacgtgatgatgtgtacagcgtctatccttaacctatgtgcgatttcaattgacaggtataccgccgtggttatgcccgtgcattaccaacacgggaccggccagagctcctgccgccgcgtggccctcatgatcacggccgtatgggtcctggcctttgcagtttcctgtcctcttctattcggtttcaacaccacgggagaccctactgtgtgcagtatatcaaatcccgactttgtgatttacagttctgtagtctctttttacctgcctttcggcgtaactgttctggtttacgcaaggatatacgtggttctgaagcagcgcagacgtaaacgaatactcactcggcagaactctcagtgcaacagcgtgcggccagggtttccccagcaaaccctgagcccagatcctgcacacctggagctcaagaggtattattcgatctgtcaggacaccgccctgggagggcctggtttccaggagaggggcggggaactaaaacgagaggagaaaacacgaaattctttgtctgcaactagtggagaggaaggcaaccctaatggcggtcactgtgcctgggggctgcactgtttactggcagctctgctgctggatccttgttctcagtaccctttgcccgacatgccacgcgtccccagagctctgcagtgccacgatatggctgggctccgcgagtag

SEQ ID NO: 101750 - DNA, 1203 bp, Artificial Sequence
  derived and/or modified sequence
atggccagcctgagccagctgagcggccacctgaactacacctgcggcgctgaaaatagcactggcgcctctcaggcccgaccccacgcgtactacgccctgtcttactgcgccctgattctggccatcgtgttcggtaatggcctggtctgtatggcggtgctgaaggaacgtgctctccagaccactacaaattacttagtggtgtctctggctgtggccgacctcctcgttgctacactagtcatgccgtgggtggtctacctggaggtgactggcggcgtttggaacttttcccgtatatgctgcgatgtgttcgtgactctggacgttatgatgtgcacagcaagcatccttaatttatgtgctatcagtattgatcgctacactgcagtggtcatgcctgtccattatcaacatgggactggacaaagttcatgcagacgtgttgccctgatgatcaccgctgtgtgggtcctggcttttgctgtgtcatgccctctcctttttggattcaacactacaggggacccaacggtatgctcgatttctaaccccgatttcgtgatttatagcagcgtggtgtcattctatttaccattcggggtcacggtactggtatatgcacggatttacgtcgttctgaaacagcgtagaaggaagcggattctgacccgccagaacagtcaatgcaatagtgtgcgacctggattcccccaacagacattgtcacccgatcccgctcaccttgagctaaaaaggtattactcgatatgccaagacacagcccttggcggcccaggcttccaggaacgggggggcgagttgaaacgggaagagaagactagaaacagtctttctcccacaatcgcaccaaagctgtcattggaagtgcgcaaactatcaaacggacgcttgagcacatcacttaagctggggccgcttcaacctcgcggtgtccccttacgcgagaagaaagccacgcagatggtcgctattgtgctcggagcttttatcgtgtgctggctacccttctttcttacccacgtgcttaacacacactgtcagacctgtcatgtgtctcccgaactatactcggccaccacgtggctgggatatgtgaattccgccctgaaccccgttatttacacaacttttaacatcgagtttcgcaaggctttcctaaaaattctcagctgttag

SEQ ID NO: 101751 - DNA, 1203 bp, Artificial Sequence
  derived and/or modified sequence
atggccagcctgagccagctgagcggccacctgaactacacctgcggagccgaaaatagtactggagccagtcaggcccggccccatgcatactatgcgttgtcatattgcgccctcatcctggccattgtgtttggaaacgggctagtttgcatggccgtgctgaaggagagggccctccaaacaactaccaattacctcgttgtgagcctagcggtggcggacttactcgtcgcaaccctggtgatgccctgggtggtctacctggaggtcacaggtggcgtctggaacttctctaggatttgctgtgacgtgtttgtaacactggacgtcatgatgtgcaccgcatccattctgaacctgtgcgcgatctcaatagaccgatacacagccgtcgtcatgcccgtgcattaccagcatggaactggacagtcttcctgcagaagagttgccttaatgatcacagccgtgtgggtcctggcctttgctgtcagctgtccacttctgttcgggttcaatacaacaggtgatcccactgtctgcagcatatctaatccagatttcgttatctatagcagcgtagtgagcttttatctgcctttcggcgtcaccgtgctcgtttatgcacgaatctacgtggttctgaagcagagaagacgaaagcgaattctcacgcggcaaaattcccagtgtaactccgtcaggcccgggttcccacagcagacgctatctcctgatcctgcccacttggagttgaagcggtattactctatctgtcaggacaccgctcttggagggcctggatttcaggagaggggaggagagctgaagagagaggagaagacacgcaactccctaagccctaccattgccccaaagctgagcctcgaagtcaggaaattgagcaacgggcgcctaagtaccagcctgaaattaggccccctgcaacctagaggagtgccactgcgagaaaaaaaggccactcagatggtcgctatagtgttgggagccttcattgtctgctggctgccattttttttgacacacgtgctgaacactcactgtcagacttgccacgtgtcaccagaactgtattccgctactacttggctcggctatgtcaactccgccttgaaccctgtcatctacactactttcaatatcgaattccggaaagctttcctcaagatactctcctgttag

SEQ ID NO: 101752 - DNA, 1203 bp, Artificial Sequence
  derived and/or modified sequence
atggccagcctgagccagctgagcggccacctgaactacacctgcggggccgagaacagcacaggtgccagccaagccagacctcacgcttattacgccctatcctattgcgcactcattctagccatcgtgtttgggaacggactggtgtgtatggctgtgcttaaggagcgcgccctccaaaccactacgaactacctcgtagtgagcttggctgtcgctgatctgctggtggccaccctcgttatgccttgggtggtctacctggaagtcacgggcggcgtttggaatttttcacggatttgctgtgacgtctttgtcacccttgacgtgatgatgtgtaccgcgtcaatcctcaacctttgcgctatttccattgatcgatacacagcagttgtcatgccagtgcactatcagcacggaaccgggcaaagctcgtgcaggagggtggcactgatgatcactgcagtgtgggttctggcatttgccgtgtcatgtccactcctcttcgggttcaatacaactggagacccgactgtttgctctatctccaaccctgactttgtcatatatagctccgtcgtgtcgttttacctgccttttggggtaactgtgctggtgtacgcaaggatctatgtggtgctaaagcagcggcgcaggaaacggattctcacgagacagaatagtcaatgtaacagtgtgcggcccggattcccgcaacagacacttagccctgaccctgcccacttggagctgaagagatactatagtatctgccaagatactgccctcggtggtccaggattccaagagcgggggggagagctaaaacgcgaggaaaaaacgcggaactcacttagcccaaccatagctcctaaactatcactggaagtgcgcaaactctcgaatggcagacttagtaccagtttgaagctggggcccctgcaaccacggggcgttccattgcgcgagaagaaagccacgcagatggtcgcaattgtgctgggcgctttcatcgtttgttggctgcctttcttcctgacccacgttctcaacacacactgtcaaacgtgccatgtctctccggaactatactccgccacaacctggcttggctatgtgaattccgcccttaacccggtaatttacactacattcaacatcgaatttagaaaggcgtttcttaagatcttaagttgctag

SEQ ID NO: 101753 - DNA, 1029 bp, Artificial Sequence
  derived and/or modified sequence
atggcctccctgtcgcagctatcagggcacctaaactatacatgtggcgcagagaactcaaccggtgcttcacaggctaggccccacgcttactacgccctgtcctactgtgccctgatcctggcaatcgtttttgggaatggccttgtgtgcatggcagtcctgaaagagagggcacttcagaccactacgaactatctggtagtgagtttggccgttgccgacctgcttgtggccacactggttatgccctgggtggtgtatctagaggtgaccggcggagtttggaatttttcgagaatttgctgcgatgtctttgtgactctggacgtgatgatgtgtaccgcttcaatcttgaacctttgtgctataagtatcgaccgatacaccgcggttgtaatgcccgtgcactaccagcacggcaccgggcaaagcagttgtcgcagagtggccttgatgataactgcagtatgggtgttggccttcgccgtctcatgcccacttctgtttggcttcaacacaacaggcgatcccaccgtctgcagcatcagcaacccagacttcgtgatctatagtagtgtagttagcttttacctaccgttcggagtaactgtgctggtatacgccagaatatacgtggtgctcaaacaacggaggagaaaacgtatccttaccaggcagaattctcagtgtaactccgtgcggcctggctttccccagcaaacactcagtcctgaccctgctcatctcgagctcaaaaggtactactccatttgccaggataccgccctgggaggcccaggctttcaggagcgcggtggtgagcttaaacgcgaagaaaaaactagaaattccctgtcagctaccagtggcgaggaaggaaatcctaatggaggccattgcgcttggggattgcactgcctcctggctgcattactgttggatccatgtagccagtatccccttccagatatgcccagggtgccccgagccctccagtgtcacgacatggccggactgagggaatag

SEQ ID NO: 101754 - DNA, 1203 bp, Artificial Sequence
  derived and/or modified sequence
atggcctcgttatctcagctgtccggccacctgaattacacctgtggagccgaaaattccaccggagcctcccaggccagaccacatgcatattatgcgctttcttattgcgcgctaattctagcgatcgttttcggtaacgggctcgtttgtatggccgtcctaaaggaaagagcactccaaacgacgaccaattacctggttgtgtctctcgcagtcgccgatctgctggttgctacacttgtgatgccgtgggtcgtgtacctggaggttactggaggagtatggaacttctcacgtatctgctgtgatgtcttcgttacattggacgttatgatgtgcaccgcttcaattcttaacctctgtgccatttcaatcgaccggtacacagctgtggtgatgccggtgcactaccaacatggaactgggcaaagcagttgcagacgcgtggcgctgatgattactgccgtctgggtgctggccttcgctgtgtcgtgccccttgctctttggttttaatacaaccggcgatccaactgtttgctctattagcaacccagattttgtgatctattcgtccgtggtgtctttctatctgccttttggggtaaccgtgctggtttatgctagaatttacgtggtgcttaaacaacgacgccgtaagagaattctgactaggcagaatagccagtgtaatagtgtacggccaggatttccgcaacaaaccttgtcacctgaccctgctcatctcgagctgaagcgctattactccatctgccaggatactgcactcggcggtcccggattccaggagcgcggaggcgagctcaaacgcgaagagaaaacaaggaatagtctctctccaaccattgccccaaaattatcactagaggttcggaaactgtccaatggccgactcagtacgtctctgaagctgggccctctgcagccccgtggagtcccactgcgcgagaaaaaggccacacaaatggtggctatcgtgcttggagccttcattgtctgttggctgcccttttttctgacccatgtgttgaatacacattgtcagacctgccacgtcagcccagaattgtacagtgcaacgacttggctgggttatgtgaactccgctctcaaccctgttatttacacgacctttaatattgaattcagaaaagcattcctgaaaattttatcgtgttag

SEQ ID NO: 101755 - DNA, 1203 bp, Artificial Sequence
  derived and/or modified sequence
atggcgtccctcagccagctgagcggacacctcaattatacctgtggggctgagaatagtacaggcgcatctcaggcgaggccccacgcctactacgccctgtcgtattgtgccctgatcctagctatcgtctttgggaatggtctggtgtgcatggccgttctgaaagagagagcccttcagaccacgaccaactacctggtggtgagtctggccgtggcggacctgcttgtggcaactttggtgatgccctgggtcgtttatttggaggtcactggaggtgtatggaatttctcccgaatttgctgtgacgtcttcgtgacattggacgtgatgatgtgtaccgctagcatcctgaatctttgtgccatttcaatcgatcgatacacagccgtagtgatgcctgtgcattaccagcatggcaccgggcaaagcagctgccggagagtagcattgatgataactgccgtgtgggtgctggcctttgcagtatcctgccctctgctcttcgggtttaatacaacaggagaccctactgtgtgtagtattagtaacccggacttcgtcatctactcgtccgtcgtgagcttctacctgcctttcggcgtcaccgtactcgtgtatgctcgtatttacgtggtgttaaagcagagaaggagaaagaggatcctcacccggcagaatagtcagtgtaacagcgtaaggcctggctttcctcagcaaaccctgtctccggatcctgcgcacctggagctgaaaagatactacagcatctgtcaggacaccgcactggggggacccggattccaggagcgcggaggcgaactgaagagggaggaaaagaccagaaacagcctctctcccactatcgcgcctaaactgtccctcgaggtcaggaagcttagtaatggcagactgtcaaccagcctgaagttgggaccgctccagccacggggagtgcctctgagggagaagaaggctacccagatggtagccatcgtgctgggagctttcatagtgtgctggctgcccttcttccttacacacgtcctgaacacccactgccagacatgtcacgtcagccctgagctttacagtgccacaacctggttagggtatgtgaattccgccctgaatccagtgatctatacaacgttcaatatagaatttaggaaggctttcttaaagatcctgtcctgctag

SEQ ID NO: 101756 - DNA, 1203 bp, Artificial Sequence
  derived and/or modified sequence
atggccagtctcagccagctgtcagggcacctgaactacacttgcggtgctgaaaactctacaggagcgagccaggccaggccccatgcttattatgctctgtcttattgcgctctcatcttggccatagtttttgggaacggacttgtgtgcatggctgttctaaaagagagggctctgcagactacgacaaattatctcgtggtttcccttgccgtcgctgacctgctcgtggcaactctggtcatgccttgggttgtatatttggaagttaccggcggtgtctggaatttttctcggatctgttgtgatgtgtttgtgactctggatgtaatgatgtgcacggcctctatcctgaatctgtgcgccataagtattgatcgatacacagccgttgtcatgcctgtgcactatcagcatggaacgggacagtcctcttgtcggagggtggctctgatgatcacagctgtgtgggtactggctttcgcagtaagttgtccgctactgttcggcttcaacactaccggcgaccccacagtgtgctctatatccaatccagattttgtgatctattcctctgtggtgtctttctacttaccattcggcgttacagtgcttgtgtacgcacgtatctacgtcgtgctgaaacagcgcagaagaaagagaattctgactaggcagaactcacagtgcaattctgttcgaccgggtttcccacagcaaaccttatctccggaccctgcgcacctcgaactcaagcggtactattcgatatgtcaagacactgccctgggaggaccgggattccaagaacgcggtggcgagctaaagagagaggagaagactaggaattccctgagccctaccattgctccgaaactgtccctggaggttcgaaagctgtccaacgggaggctgtcaacttcactaaaactggggcctctccagccacgcggagtgccactccgagaaaagaaggcaactcagatggtggcaatcgttttaggagcttttatcgtttgttggctaccgttttttctgactcacgtactcaatacccattgccagacctgccacgtttcccctgaactgtattccgctacaacatggctgggctacgtgaactcagctcttaaccccgtgatttacaccaccttcaacatcgaattccggaaggcctttcttaagatactgagctgttag

SEQ ID NO: 101757 - DNA, 1029 bp, Artificial Sequence
  derived and/or modified sequence
atggccagcctgagccagctgagcggccacctgaactacacctgcggcgccgagaacagcaccggcgccagccaggccagaccccacgcctactacgccctgagctactgcgccctgatcctggccatcgtgttcggcaacggcctggtgtgcatggccgtgctgaaggagagagccctgcagaccaccaccaactacctggtggtgagcctggccgtggccgacctgctggtggccaccctggtgatgccctgggtggtgtacctggaggtgaccggcggcgtgtggaacttcagcagaatctgctgcgacgtgttcgtgaccctggacgtgatgatgtgcaccgccagcatcctgaacctgtgcgccatcagcatcgacagatacaccgccgtggtgatgcccgtgcactaccagcacggcaccggccagagcagctgcagaagagtggccctgatgatcaccgccgtgtgggtgctggccttcgccgtgagctgccccctgctgttcggcttcaacaccaccggcgaccccaccgtgtgcagcatcagcaaccccgacttcgtgatctacagcagcgtggtgagcttctacctgcccttcggcgtgaccgtgctggtgtacgccagaatctacgtggtgctgaagcagagaagaagaaagagaatcctgaccagacagaacagccagtgcaacagcgtgagacccggcttcccccagcagaccctgagccccgaccccgcccacctggagctgaagagatactacagcatctgccaggacaccgccctgggcggccccggcttccaggagagaggcggcgagctgaagagagaggagaagaccagaaacagcctgagcgccaccagcggcgaggagggcaaccccaacggcggccactgcgcctggggcctgcactgcctgctggccgccctgctgctggacccctgcagccagtaccccctgcccgacatgcccagagtgcccagagccctgcagtgccacgacatggccggcctgagagagtag

SEQ ID NO: 101758 - DNA, 1203 bp, Artificial Sequence
  derived and/or modified sequence
atggccagcctgagccagctgagcggccacctgaactacacctgcggcgccgagaacagcaccggcgccagccaggccagaccccacgcctactacgccctgagctactgcgccctgatcctggccatcgtgttcggcaacggcctggtgtgcatggccgtgctgaaggagagagccctgcagaccaccaccaactacctggtggtgagcctggccgtggccgacctgctggtggccaccctggtgatgccctgggtggtgtacctggaggtgaccggcggcgtgtggaacttcagcagaatctgctgcgacgtgttcgtgaccctggacgtgatgatgtgcaccgccagcatcctgaacctgtgcgccatcagcatcgacagatacaccgccgtggtgatgcccgtgcactaccagcacggcaccggccagagcagctgcagaagagtggccctgatgatcaccgccgtgtgggtgctggccttcgccgtgagctgccccctgctgttcggcttcaacaccaccggcgaccccaccgtgtgcagcatcagcaaccccgacttcgtgatctacagcagcgtggtgagcttctacctgcccttcggcgtgaccgtgctggtgtacgccagaatctacgtggtgctgaagcagagaagaagaaagagaatcctgaccagacagaacagccagtgcaacagcgtgagacccggcttcccccagcagaccctgagccccgaccccgcccacctggagctgaagagatactacagcatctgccaggacaccgccctgggcggccccggcttccaggagagaggcggcgagctgaagagagaggagaagaccagaaacagcctgagccccaccatcgcccccaagctgagcctggaggtgagaaagctgagcaacggcagactgagcaccagcctgaagctgggccccctgcagcccagaggcgtgcccctgagagagaagaaggccacccagatggtggccatcgtgctgggcgccttcatcgtgtgctggctgcccttcttcctgacccacgtgctgaacacccactgccagacctgccacgtgagccccgagctgtacagcgccaccacctggctgggctacgtgaacagcgccctgaaccccgtgatctacaccaccttcaacatcgagttcagaaaggccttcctgaagatcctgagctgctag

SEQ ID NO: 101759 - DNA, 1542 bp, Artificial Sequence
  derived and/or modified sequence
gatagagagacaaagaggaaaagagagcgaggtagaaaacggatactgcctatgcctactccatccctctttcagcaccaaggacagaacctctgagcggctgacccaagcaacgctcagtttagggtccctcccaaatcctctaaagaaaacggatacattcgaaagcagctatgaaacatgcactaaggtctaatagggaagctggaaaagcagcactcaagtaatttcaccttagaggcaaaaatgggtgatttctttctgttcatttcatagtttctgagtcctgagaaaggcaaagtttgctttgcttgggtatgtctgctgtcagtaaatggctgcaggagccgaagtggtaaactcctcggtctccagaaatcagaagaaaattttagggaagccccttggcatcacgcacctccctctgggctatggcatctctgagccagctgagtggccacctgaactacacctgtggggcagagaactccacaggtgccagccaggcccgcccacatgcctactatgccctctcctactgcgcgctcatcctggccatcgtcttcggcaatggcctggtgtgcatggctgtgctgaaggagcgggccctgcagactaccaccaactacttagtagtgagcctggctgtggcagacttgctggtggccaccttggtgatgccctgggtggtatacctggaggtgacaggtggagtctggaatttcagccgcatttgctgtgatgtttttgtcaccctggatgtcatgatgtgtacagccagcatccttaatctctgtgccatcagcatagacaggtacactgcagtggtcatgcccgttcactaccagcatggcacgggacagagctcctgtcggcgcgtggccctcatgatcacggccgtctgggtactggcctttgctgtgtcctgccctcttctgtttggctttaataccacaggggaccccactgtctgctccatctccaaccctgattttgtcatctactcttcagtggtgtccttctacctgccctttggagtgactgtccttgtctatgccagaatctatgtggtgctgaaacaaaggagacggaaaaggatcctcactcgacagaacagtcagtgcaacagtgtcaggcctggcttcccccagcaaaccctctctcctgacccggcacatctggagctgaagcgttactacagcatctgccaggacactgccttgggtggaccaggcttccaagaaagaggaggagagttgaaaagagaggagaagactcggaattccctgagtgccacttcgggagaagaaggcaacccaaatggtggccattgtgcttggggccttcattgtctgctggctgcccttcttcttgacccatgttctcaatacccactgccagacatgccacgtgtccccagagctttacagtgccacgacatggctgggctacgtgaatagcgccctcaaccctgtgatctataccaccttcaatatcgagttccggaaagccttcctcaagatcctgtcttgctgagggagc

SEQ ID NO: 101760 - DNA, 1640 bp, Artificial Sequence
  derived and/or modified sequence
gatagagagacaaagaggaaaagagagcgaggtagaaaacggatactgcctatgcctactccatccctctttcagcaccaaggacagaacctctgagcggctgacccaagcaacgctcagtttagggtccctcccaaatcctctaaagaaaacggatacattcgaaagcagctatgaaacatgcactaaggtctaatagggaagctggaaaagcagcactcaagtaatttcaccttagaggcaaaaatgggtgatttctttctgttcatttcatagtttctgagtcctgagaaaggcaaagtttgctttgcttgggtatgtctgctgtcagtaaatggctgcaggagccgaagtggtaaactcctcggtctccagaaatcagaagaaaattttagggaagccccttggcatcacgcacctccctctgggctatggcatctctgagccagctgagtggccacctgaactacacctgtggggcagagaactccacaggtgccagccaggcccgcccacatgcctactatgccctctcctactgcgcgctcatcctggccatcgtcttcggcaatggcctggtgtgcatggctgtgctgaaggagcgggccctgcagactaccaccaactacttagtagtgagcctggctgtggcagacttgctggtggccaccttggtgatgccctgggtggtatacctggaggtgacaggtggagtctggaatttcagccgcatttgctgtgatgtttttgtcaccctggatgtcatgatgtgtacagccagcatccttaatctctgtgccatcagcatagacaggtacactgcagtggtcatgcccgttcactaccagcatggcacgggacagagctcctgtcggcgcgtggccctcatgatcacggccgtctgggtactggcctttgctgtgtcctgccctcttctgtttggctttaataccacaggggaccccactgtctgctccatctccaaccctgattttgtcatctactcttcagtggtgtccttctacctgccctttggagtgactgtccttgtctatgccagaatctatgtggtgctgaaacaaaggagacggaaaaggatcctcactcgacagaacagtcagtgcaacagtgtcaggcctggcttcccccagcaaaccctctctcctgacccggcacatctggagctgaagcgttactacagcatctgccaggacactgccttgggtggaccaggcttccaagaaagaggaggagagttgaaaagagaggagaagactcggaattccctgagtcccaccatagcgcccaagctcagcttagaagttcgaaaactcagcaatggcagattatcgacatctttgaagctggggcccctgcaacctcggggagtgccacttcgggagaagaaggcaacccaaatggtggccattgtgcttggggccttcattgtctgctggctgcccttcttcttgacccatgttctcaatacccactgccagacatgccacgtgtccccagagctttacagtgccacgacatggctgggctacgtgaatagcgccctcaaccctgtgatctataccaccttcaatatcgagttccggaaagccttcctcaagatcctgtcttgctgagggagc

SEQ ID NO: 101761 - DNA, 1557 bp, Artificial Sequence
  derived and/or modified sequence
attataaaagcaagttcaacctcctcttgctctcaccctttcttgctcttctgccttccgccatgagatgacacagcacaaaggtctttgccagatgtctgtgccacactcttggacttcccggactccagaacttttctgagtcctgagaaaggcaaagtttgctttgcttgggtatgtctgctgtcagtaaatggctgcaggagccgaagtggtaaactcctcggtctccagaaatcagaagaaaattttagggaagccccttggcatcacgcacctccctctgggctatggcatctctgagccagctgagtggccacctgaactacacctgtggggcagagaactccacaggtgccagccaggcccgcccacatgcctactatgccctctcctactgcgcgctcatcctggccatcgtcttcggcaatggcctggtgtgcatggctgtgctgaaggagcgggccctgcagactaccaccaactacttagtagtgagcctggctgtggcagacttgctggtggccaccttggtgatgccctgggtggtatacctggaggtgacaggtggagtctggaatttcagccgcatttgctgtgatgtttttgtcaccctggatgtcatgatgtgtacagccagcatccttaatctctgtgccatcagcatagacaggtacactgcagtggtcatgcccgttcactaccagcatggcacgggacagagctcctgtcggcgcgtggccctcatgatcacggccgtctgggtactggcctttgctgtgtcctgccctcttctgtttggctttaataccacaggggaccccactgtctgctccatctccaaccctgattttgtcatctactcttcagtggtgtccttctacctgccctttggagtgactgtccttgtctatgccagaatctatgtggtgctgaaacaaaggagacggaaaaggatcctcactcgacagaacagtcagtgcaacagtgtcaggcctggcttcccccagcaaaccctctctcctgacccggcacatctggagctgaagcgttactacagcatctgccaggacactgccttgggtggaccaggcttccaagaaagaggaggagagttgaaaagagaggagaagactcggaattccctgagtcccaccatagcgcccaagctcagcttagaagttcgaaaactcagcaatggcagattatcgacatctttgaagctggggcccctgcaacctcggggagtgccacttcgggagaagaaggcaacccaaatggtggccattgtgcttggggccttcattgtctgctggctgcccttcttcttgacccatgttctcaatacccactgccagacatgccacgtgtccccagagctttacagtgccacgacatggctgggctacgtgaatagcgccctcaaccctgtgatctataccaccttcaatatcgagttccggaaagccttcctcaagatcctgtcttgctgagggagcagaagagggaacactctttgtacccatttctagctgccaggctgttggcccactcaga

SEQ ID NO: 101762 - DNA, 1554 bp, Artificial Sequence
  derived and/or modified sequence
ggtaaactcctcggtctccagaaatcagaagaaaattttaggaaagagaacaaataattaaaactctgtaagtcttaatgaggtgctaaggaggaaccccacgaatgtttcaggaagactgttattcagcactgagggattgaacatcagcaaagcaggacaaatgtcataactgatggggacctgacaactctctgttcccctgcctttttaaataggttatgcactcactctaagagatgccagaacaaactataaagaccaagataaatcaatactttgtaaggcatttaaaagctcattaaaatgtgaagccccttggcatcacgcacctccctctgggctatggcatctctgagccagctgagtggccacctgaactacacctgtggggcagagaactccacaggtgccagccaggcccgcccacatgcctactatgccctctcctactgcgcgctcatcctggccatcgtcttcggcaatggcctggtgtgcatggctgtgctgaaggagcgggccctgcagactaccaccaactacttagtagtgagcctggctgtggcagacttgctggtggccaccttggtgatgccctgggtggtatacctggaggtgacaggtggagtctggaatttcagccgcatttgctgtgatgtttttgtcaccctggatgtcatgatgtgtacagccagcatccttaatctctgtgccatcagcatagacaggtacactgcagtggtcatgcccgttcactaccagcatggcacgggacagagctcctgtcggcgcgtggccctcatgatcacggccgtctgggtactggcctttgctgtgtcctgccctcttctgtttggctttaataccacaggggaccccactgtctgctccatctccaaccctgattttgtcatctactcttcagtggtgtccttctacctgccctttggagtgactgtccttgtctatgccagaatctatgtggtgctgaaacaaaggagacggaaaaggatcctcactcgacagaacagtcagtgcaacagtgtcaggcctggcttcccccagcaaaccctctctcctgacccggcacatctggagctgaagcgttactacagcatctgccaggacactgccttgggtggaccaggcttccaagaaagaggaggagagttgaaaagagaggagaagactcggaattccctgagtcccaccatagcgcccaagctcagcttagaagttcgaaaactcagcaatggcagattatcgacatctttgaagctggggcccctgcaacctcggggagtgccacttcgggagaagaaggcaacccaaatggtggccattgtgcttggggccttcattgtctgctggctgcccttcttcttgacccatgttctcaatacccactgccagacatgccacgtgtccccagagctttacagtgccacgacatggctgggctacgtgaatagcgccctcaaccctgtgatctataccaccttcaatatcgagttccggaaagccttcctcaagatcctgtcttgctgagggagc

SEQ ID NO: 101763 - protein, 165 aa, Artificial Sequence
  derived and/or modified sequence
MAGSPTCLTLIYILWQLTGSAASGPVKELVGSVGGAVTFPLKSKVKQVDSIVWTFNTTPLVTIQPEGGTIIVTQNRNRERVDFPDGGYSLKLSKLKKNDSGIYYVGIYSSSLQQPSTQEYVLHVYENNPKGRSSKYGLLHCGNTEKDGKSPLTAHDARHTKAICL

SEQ ID NO: 101764 - DNA, 498 bp, Artificial Sequence
  derived and/or modified sequence
atggcagggtcccctacctgcctgacgctcatttacatcctgtggcagttgaccgggtctgccgccagtgggcctgtgaaagaactggtgggctccgtggggggggctgtgacgtttcctcttaagagcaaagtgaagcaggtggatagcatagtgtggacattcaacacaacccctctcgtcactattcagccagagggcgggactatcatcgtgactcagaaccggaacagggagcgggtagactttccagatgggggctatagtctaaagctctctaaacttaagaaaaacgattccgggatttattatgtgggaatttatagctcttccttacagcagccctcaacacaagaatatgtccttcacgtctacgaaaataatcctaaggggcggtctagtaaatacggcctcctccactgcgggaatacagaaaaagatggtaaatcccctttaactgctcatgacgctaggcataccaaggccatctgcctatag

SEQ ID NO: 101765 - DNA, 498 bp, Artificial Sequence
  derived and/or modified sequence
atggccggcagccccacctgcctgaccctcatctacatcctgtggcagctgaccggcagcgctgccagcggccctgtgaaggagctggtgggctctgtgggcggcgctgtgaccttccccctgaagagcaaggtgaagcaggtggacagcatcgtgtggaccttcaacaccacccccctggtgaccatccagcctgagggcggcaccatcatcgtgacccagaacagaaaccgggagcgggtggacttcccagatggcggctacagcctgaagctgagcaagctgaagaagaatgacagcggcatctactacgtgggcatctacagcagcagcctgcagcagcccagcacccaggagtatgtgctgcacgtgtatgagaacaaccccaagggccgcagcagcaaatatggcctgctgcactgcggcaacacagagaaggatggcaagagccccctgacagcccatgatgcccggcacaccaaggccatctgcctgtag

SEQ ID NO: 101766 - DNA, 498 bp, Artificial Sequence
  derived and/or modified sequence
atggccggcagccccacctgcctgaccctgatctacatcctgtggcagctgacagggagtgccgcgtccggtcccgtaaaggagcttgtggggagcgtggggggagcggtgactttccctctcaaaagtaaggttaagcaagtagatagtatcgtgtggaccttcaacactactcccctggtgacaatacaacccgaaggaggtaccattatcgtaacacagaatcggaatagagaacgagtggacttccctgatggtgggtacagtctgaaactttccaagctcaagaaaaatgattctggaatttattacgtcgggatctacagttcgtcacttcagcaaccttcgacccaggagtacgtcttgcacgtctatgaaaataatcccaagggtcgctcttcaaaatacggattattgcactgtggaaatactgagaaggacgggaaatcccccttgactgcacacgacgccaggcacaccaaggcaatctgtttgtag

SEQ ID NO: 101767 - DNA, 498 bp, Artificial Sequence
  derived and/or modified sequence
atggctgggagccccacatgcctgactctgatatatatcttatggcagttaacagggtcagccgcatctggcccagtgaaggagctagtgggatctgtggggggagccgtaacttttccactaaagagtaaagtcaagcaggtagactccattgtgtggactttcaacactactcctctggtgaccatccaacctgaagggggaaccatcatcgtcactcagaaccggaacagagaaagggtcgactttcccgatgggggatacagccttaagttgagtaagctcaagaagaatgatagtggcatatactacgtgggcatctactcttcatcactgcagcagccatccacacaagagtatgtgctccatgtttatgaaaacaacccaaagggtcgctcttccaaatacggtctgttacattgcggtaatacagaaaaagatggcaagtcacccctgacagcccacgacgcacggcacactaaagccatttgcctgtag

SEQ ID NO: 101768 - DNA, 1039 bp, Artificial Sequence
  derived and/or modified sequence
aatacctaagagggaagtggcttcatttcagtggctgacttccagagagcaatatggctggttccccaacatgcctcaccctcatctatatcctttggcagctcacagggtcagcagcctctggacccgtgaaagagctggtcggttccgttggtggggccgtgactttccccctgaagtccaaagtaaagcaagttgactctattgtctggaccttcaacacaacccctcttgtcaccatacagccagaagggggcactatcatagtgacccaaaatcgtaatagggagagagtagacttcccagatggaggctactccctgaagctcagcaaactgaagaagaatgactcagggatctactatgtggggatatacagctcatcactccagcagccctccacccaggagtacgtgctgcatgtctacgagaacaatcctaaaggaagatccagcaaatacggtttactccactgtggaaataccgaaaaagatggaaaatccccactcactgctcacgatgccagacacaccaaggctatttgcctatgagaatgttatctagacagcagtgcactcccctaagtctctgctcaaaaaaaaaacaattctcggcccaaagaaaacaatcagaagaattcactgatttgactagaaacatcaaggaagaatgaagaacgttgacttttttccaggataaattatctctgatgcttctttagatttaagagttcataattccatccactgctgagaaatctcctcaaacccagaaggtttaatcacttcatcccaaaaatgggattgtgaatgtcagcaaaccataaaaaaagtgcttagaagtattcctataaaaatgtaaatgcaaggtcacacatattaatgacagcctgttgtattaatgatggctccaggtcagtgtctggagtttcattccatcccagggcttggatgtcaggattataccaagagtcttgctaccaggagggcaagaagaccaaaacagacagacaagtccagcagaagcagatgcacctgac

SEQ ID NO: 101769 - DNA, 498 bp, Artificial Sequence
  derived and/or modified sequence
atggccggcagccccacctgcctgaccctgatctacatcctgtggcagctgaccggcagcgccgccagcggccccgtgaaggagctggtgggcagcgtgggcggcgccgtgaccttccccctgaagagcaaggtgaagcaggtggacagcatcgtgtggaccttcaacaccacccccctggtgaccatccagcccgagggcggcaccatcatcgtgacccagaacagaaacagagagagagtggacttccccgacggcggctacagcctgaagctgagcaagctgaagaagaacgacagcggcatctactacgtgggcatctacagcagcagcctgcagcagcccagcacccaggagtacgtgctgcacgtgtacgagaacaaccccaagggcagaagcagcaagtacggcctgctgcactgcggcaacaccgagaaggacggcaagagccccctgaccgcccacgacgccagacacaccaaggccatctgcctgtag

SEQ ID NO: 101770 - protein, 204 aa, Artificial Sequence
  derived and/or modified sequence
MAGSPTCLTLIYILWQLTGSAASGPVKELVGSVGGAVTFPLKSKVKQVDSIVWTFNTTPLVTIQPEGGTIIVTQNRNRERVDFPDGGYSLKLSKLKKNDSGIYYVGIYSSSLQQPSTQEYVLHVYEYIEEKKRVDICRETPNICPHSGENTEYDTIPHTNRTILKEDPANTVYSTVEIPKKMENPHSLLTMPDTPRLFAYENVI

SEQ ID NO: 101771 - DNA, 615 bp, Artificial Sequence
  derived and/or modified sequence
atggcaggttctcccacttgtctgactcttatctatatcttgtggcagcttaccgggtcggctgcttccggaccggttaaggaactcgtcggatctgtgggcggggccgtgacatttccacttaagagcaaagttaagcaggttgactccatagtctggacattcaacacaactcctctggtgacaattcagccagagggtggcacaatcatcgttacccaaaatcgaaatcgagagcgcgttgatttccctgacggaggttatagtctgaagctatccaagctgaagaaaaacgactccggaatttattacgttgggatttactccagctcccttcagcagccaagtacccaggagtacgtcctgcatgtctatgagtacattgaggagaaaaaacgcgtcgacatctgccgagagactccaaacatctgcccacatagcggagaaaacactgagtatgacactattccacacaccaaccgaacaattctcaaagaagatcccgccaatactgtgtattcaaccgttgagattcccaagaaaatggagaatcctcacagtttactgaccatgcctgatactccaagactgttcgcgtacgagaatgtgatctag

SEQ ID NO: 101772 - DNA, 615 bp, Artificial Sequence
  derived and/or modified sequence
atggccggcagccccacctgcctgaccctcatctacatcctgtggcagctgaccggcagcgctgccagcggccctgtgaaggagctggtgggctctgtgggcggcgctgtgaccttccccctgaagagcaaggtgaagcaggtggacagcatcgtgtggaccttcaacaccacccccctggtgaccatccagcctgagggcggcaccatcatcgtgacccagaacagaaaccgggagcgggtggacttcccagatggcggctacagcctgaagctgagcaagctgaagaagaatgacagcggcatctactacgtgggcatctacagcagcagcctgcagcagcccagcacccaggagtatgtgctgcacgtgtatgagtacatcgaggagaagaagagggtggacatctgccgggagacccccaacatctgcccccacagcggagaaaatacagaatatgacaccatcccccacaccaacagaaccatcctgaaggaggaccctgccaacacagtgtacagcacagtggagatccccaagaagatggagaacccccacagcctgctgaccatgccagacaccccccggctgtttgcctatgaaaatgtcatctag

SEQ ID NO: 101773 - DNA, 615 bp, Artificial Sequence
  derived and/or modified sequence
atggccggcagccccacctgcctgaccctgatctacatcctgtggcagctcactggaagcgccgcttcaggacccgtaaaggagcttgtgggatccgtcggaggcgctgtgacgtttcccctcaaatcaaaagtgaaacaagtcgattccatcgtctggacttttaacacgacgcccctggtaacaatccaacctgaggggggaactataatagttacacaaaaccgaaatcgggagagggttgacttcccagacggaggatattctctcaagttgtctaagctgaaaaagaatgattcggggatctactatgtaggtatttactcaagttccctgcagcagccatcaacacaagagtatgtactgcatgtgtatgaatatattgaggaaaagaagagggtggatatttgtcgtgagactcctaacatatgtccacattctggagagaacactgagtatgacacaatacctcataccaaccgcaccatccttaaggaggacccagccaacacagtttacagtactgtggagattccaaagaagatggagaatcctcacagcctgctgacaatgccagacactcctaggttgtttgcttacgagaatgtgatctag

SEQ ID NO: 101774 - DNA, 615 bp, Artificial Sequence
  derived and/or modified sequence
atggccggatctcctacgtgcctcactctcatttacattttgtggcagctgactgggagtgccgcttctggtcccgtgaaggagctcgtgggcagtgttggaggcgcagttacatttccactcaagtctaaggtgaaacaggtagattccatagtgtggactttcaataccactccactggtcaccatccaacccgagggcggaactatcattgtgacgcagaatcgcaaccgcgagcgcgtcgatttccccgatggaggctacagtttgaaattgtccaagcttaaaaaaaacgactcaggtatctactacgtgggaatatatagcagctccctgcagcagccgtctacacaggagtacgtcctccacgtttacgaatacatcgaggaaaaaaagcgagtagatatatgccgagagaccccgaacatttgtccccactctggcgagaatacagagtatgacacgattccccacacaaatcggaccatcctgaaggaagatccagccaatacagtgtactcaacagtggagattccgaagaaaatggaaaatccacactctctgcttacaatgccggatacacctagactgttcgcatacgaaaatgtcatctag

SEQ ID NO: 101775 - DNA, 1355 bp, Artificial Sequence
  derived and/or modified sequence
atacctaagagggaagtggcttcatttcagtggctgacttccagagagcaatatggctggttccccaacatgcctcaccctcatctatatcctttggcagctcacagggtcagcagcctctggacccgtgaaagagctggtcggttccgttggtggggccgtgactttccccctgaagtccaaagtaaagcaagttgactctattgtctggaccttcaacacaacccctcttgtcaccatacagccagaagggggcactatcatagtgacccaaaatcgtaatagggagagagtagacttcccagatggaggctactccctgaagctcagcaaactgaagaagaatgactcagggatctactatgtggggatatacagctcatcactccagcagccctccacccaggagtacgtgctgcatgtctacgagtacattgaagagaagaagagagtggacatttgtcgggaaactcctaacatatgcccccattctggagagaacacagagtacgacacaatccctcacactaatagaacaatcctaaaggaagatccagcaaatacggtttactccactgtggaaataccgaaaaagatggaaaatccccactcactgctcacgatgccagacacaccaaggctatttgcctatgagaatgttatctagacagcagtgcactcccctaagtctctgctcaaaaaaaaaacaattctcggcccaaagaaaacaatcagaagaattcactgatttgactagaaacatcaaggaagaatgaagaacgttgacttttttccaggataaattatctctgatgcttctttagatttaagagttcataattccatccactgctgagaaatctcctcaaacccagaaggtttaatcacttcatcccaaaaatgggattgtgaatgtcagcaaaccataaaaaaagtgcttagaagtattcctataaaaatgtaaatgcaaggtcacacatattaatgacagcctgttgtattaatgatggctccaggtcagtgtctggagtttcattccatcccagggcttggatgtcaggattataccaagagtcttgctaccaggagggcaagaagaccaaaacagacagacaagtccagcagaagcagatgcacctgacaaaaatggatgtattaattggctctataaactatgtgcccagcactatgctgagcttacactaattggtcagacatgctgtctgccctcatgaaattggctccaaatgaatgaactactttcatgagcagttgtagcaggcctgaccacagattcccagagggccaggtgtggatccacaggacttgaaggtcaaagttcacaaagatgaaga

SEQ ID NO: 101776 - DNA, 615 bp, Artificial Sequence
  derived and/or modified sequence
atggccggcagccccacctgcctgaccctgatctacatcctgtggcagctgaccggcagcgccgccagcggccccgtgaaggagctggtgggcagcgtgggcggcgccgtgaccttccccctgaagagcaaggtgaagcaggtggacagcatcgtgtggaccttcaacaccacccccctggtgaccatccagcccgagggcggcaccatcatcgtgacccagaacagaaacagagagagagtggacttccccgacggcggctacagcctgaagctgagcaagctgaagaagaacgacagcggcatctactacgtgggcatctacagcagcagcctgcagcagcccagcacccaggagtacgtgctgcacgtgtacgagtacatcgaggagaagaagagagtggacatctgcagagagacccccaacatctgcccccacagcggcgagaacaccgagtacgacaccatcccccacaccaacagaaccatcctgaaggaggaccccgccaacaccgtgtacagcaccgtggagatccccaagaagatggagaacccccacagcctgctgaccatgcccgacacccccagactgttcgcctacgagaacgtgatctag

SEQ ID NO: 101777 - protein, 228 aa, Artificial Sequence
  derived and/or modified sequence
MAGSPTCLTLIYILWQLTEHLSKPKVTMGLQSNKNGTCVTNLTCCMEHGEEDVIYTWKALGQAANESHNGSILPISWRWGESDMTFICVARNPVSRNFSSPILARKLCEGAADDPDSSMVLLCLLLVPLLLSLFVLGLFLWFLKRERQEEYIEEKKRVDICRETPNICPHSGENTEYDTIPHTNRTILKEDPANTVYSTVEIPKKMENPHSLLTMPDTPRLFAYENVI

SEQ ID NO: 101778 - DNA, 687 bp, Artificial Sequence
  derived and/or modified sequence
atggcagggtcccccacatgtctgacgctcatctacatcctgtggcagctcacagaacatttatccaaacctaaagtgaccatgggccttcaaagcaacaaaaatggaacgtgtgtgaccaatctaacatgttgcatggaacacggggaagaggacgtgatatacacctggaaagcacttggccaggctgccaacgaatcccacaacggttcaattctccccatttcttggcgctggggggagtcagacatgacgtttatctgcgtggcccgcaacccagtcagtcggaacttttcaagccccatactcgctaggaaactctgtgagggggcggccgacgacccagacagctccatggttctgttgtgtttactgctggtgccattacttctctctctttttgtgctcgggctgtttctctggtttctgaagcgcgagaggcaagaggagtatattgaggaaaagaaacgcgtagacatctgtcgggaaacgcctaatatctgtccacattctggtgaaaacaccgaatacgatacaatccctcatactaatcgtactatcctgaaggaagatccagccaacactgtgtacagcacagtagagatccccaaaaaaatggaaaacccccattccttgctgacaatgcccgatacgcctcgcttgttcgcctacgagaacgtgatttag

SEQ ID NO: 101779 - DNA, 687 bp, Artificial Sequence
  derived and/or modified sequence
atggccggcagccccacctgcctgaccctcatctacatcctgtggcagctgacagagcacctgagcaagcccaaggtgaccatgggcctgcagagcaacaagaatggcacctgtgtgaccaacctgacctgctgcatggagcacggggaggaggatgtgatctacacctggaaggccctgggccaggccgccaatgaaagccacaacggcagcatcctgcccatctcctggcgctggggcgagagtgacatgaccttcatctgtgtggccagaaatcctgtgtccaggaacttcagcagccccatcctggccaggaagctgtgtgagggcgctgctgatgatcctgacagctccatggtgctgctgtgcctgctgctggtgcccctgctgctgagcctgtttgtgctgggcctcttcctgtggttcctgaagcgggagcggcaggaggagtacatcgaggagaagaagagggtggacatctgccgggagacccccaacatctgcccccacagcggagaaaatacagaatatgacaccatcccccacaccaacagaaccatcctgaaggaggaccctgccaacacagtgtacagcacagtggagatccccaagaagatggagaacccccacagcctgctgaccatgccagacaccccccggctgtttgcctatgaaaatgtcatctag

SEQ ID NO: 101780 - DNA, 687 bp, Artificial Sequence
  derived and/or modified sequence
atggccggcagccccacctgcctgaccctgatctacatcctgtggcagctcaccgaacacctatctaagcctaaggtgacaatgggtttgcagtctaacaaaaatggcacgtgcgtgacaaacttaacatgttgcatggagcacggggaagaggacgtgatatatacgtggaaggcgctgggccaggccgccaacgagtcccataatggtagcattctgcccatttcttggagatggggggaaagcgacatgacattcatctgtgtcgccagaaatccagtaagtaggaacttctcctccccaattctcgctcgaaagctgtgtgagggggctgccgatgatcctgattcatcgatggttttgctgtgcctgctgctagtgccactgctgctgtccttattcgttttgggactgttcctttggttcctgaagcgtgagcgccaggaggagtatattgaggagaagaagcgagtggatatatgcagggagactccaaatatttgcccacactcaggagagaatacagaatacgacacaataccacacaccaatcgcaccattctcaaggaggaccctgccaataccgtgtactcaacagtcgagattcccaagaagatggagaatccgcacagcctgctgaccatgcccgatacccctaggctctttgcctatgagaacgtaatctag

SEQ ID NO: 101781 - DNA, 687 bp, Artificial Sequence
  derived and/or modified sequence
atggccggatcaccaacgtgcctgaccctcatttatattctgtggcagctcacagaacatttgagcaaacccaaagttactatgggtcttcagagtaacaaaaacggcacttgcgtgaccaatctaacatgctgtatggagcacggcgaggaggacgtaatatacacatggaaggccctgggacaagcagccaatgagtctcacaatgggagtatactccccattagctggaggtggggggagtctgacatgacttttatctgcgttgcgcgtaatcctgtgtcacggaatttctcatctcctatacttgcccgtaagttgtgcgaaggtgccgcagatgacccagacagttctatggtgctgctgtgtctgctgcttgtgcctctgttactgagtctttttgtgctgggcctcttcctttggttcctgaagcgagaacgccaggaagaatacatcgaagaaaaaaagagggtggatatctgccgcgagacccccaacatctgcccccacagcggcgaaaacaccgaatacgacacgatcccgcacacaaaccggacaatcttgaaagaggaccccgctaataccgtgtattcaaccgtggagatcccaaagaagatggagaatcctcactcccttttaaccatgccggatactccacggctatttgcgtacgagaacgtgatatag

SEQ ID NO: 101782 - DNA, 2365 bp, Artificial Sequence
  derived and/or modified sequence
gcttcatttcagtggctgacttccagagagcaatatggctggttccccaacatgcctcaccctcatctatatcctttggcagctcacagagcacctgtcaaagcctaaagtcaccatgggtctgcagagcaataagaatggcacctgtgtgaccaatctgacatgctgcatggaacatggggaagaggatgtgatttatacctggaaggccctggggcaagcagccaatgagtcccataatgggtccatcctccccatctcctggagatggggagaaagtgatatgaccttcatctgcgttgccaggaaccctgtcagcagaaacttctcaagccccatccttgccaggaagctctgtgaaggtgctgctgatgacccagattcctccatggtcctcctgtgtctcctgttggtgcccctcctgctcagtctctttgtactggggctatttctttggtttctgaagagagagagacaagaagagtacattgaagagaagaagagagtggacatttgtcgggaaactcctaacatatgcccccattctggagagaacacagagtacgacacaatccctcacactaatagaacaatcctaaaggaagatccagcaaatacggtttactccactgtggaaataccgaaaaagatggaaaatccccactcactgctcacgatgccagacacaccaaggctatttgcctatgagaatgttatctagacagcagtgcactcccctaagtctctgctcaaaaaaaaaacaattctcggcccaaagaaaacaatcagaagaattcactgatttgactagaaacatcaaggaagaatgaagaacgttgacttttttccaggataaattatctctgatgcttctttagatttaagagttcataattccatccactgctgagaaatctcctcaaacccagaaggtttaatcacttcatcccaaaaatgggattgtgaatgtcagcaaaccataaaaaaagtgcttagaagtattcctataaaaatgtaaatgcaaggtcacacatattaatgacagcctgttgtattaatgatggctccaggtcagtgtctggagtttcattccatcccagggcttggatgtcaggattataccaagagtcttgctaccaggagggcaagaagaccaaaacagacagacaagtccagcagaagcagatgcacctgacaaaaatggatgtattaattggctctataaactatgtgcccagcactatgctgagcttacactaattggtcagacatgctgtctgccctcatgaaattggctccaaatgaatgaactactttcatgagcagttgtagcaggcctgaccacagattcccagagggccaggtgtggatccacaggacttgaaggtcaaagttcacaaagatgaagaatcagggtagctgaccatgtttggcagatactataatggagacacagaagtgtgcatggcccaaggacaaggacctccagccaggcttcatttatgcacttgtgctgcaaaagaaaagtctaggttttaaggctgtgccagaacccatcccaataaagagaccgagtctgaagtcacattgtaaatctagtgtaggagacttggagtcaggcagtgagactggtggggcacggggggcagtgggtacttgtaaacctttaaagatggttaattcattcaatagatatttattaagaacctatgcggcccggcatggtggctcacacctgtaatcccagcactttgggaggccaaggtgggtgggtcatctgaggtcaggagttcaagaccagcctggccaacatggtgaaaccccatctctactaaagatacaaaaatttgctgagcgtggtggtgtgcacctgtaatcccagctactcgagaggccaaggcatgagaatcgcttgaacctgggaggtggaggttgcagtgagctgagatggcaccactgcactccggcctaggcaacgagagcaaaactccaatacaaacaaacaaacaaacacctgtgctaggtcagtctggcacgtaagatgaacatccctaccaatacagagctcaccatctcttatacttaagtgaaaaacatggggaaggggaaaggggaatggctgcttttgatatgttccctgacacatatcttgaatggagacctccctaccaagtgatgaaagtgttgaaaaacttaataacaaatgcttgttgggcaagaatgggattgaggattatcttctctcagaaaggcattgtgaaggaattgagccagatctctctccctactgcaaaaccctattgtagtaaaaaagtcttctttactatcttaataaaacagatattgtgagattcacatacaaaaa

SEQ ID NO: 101783 - DNA, 687 bp, Artificial Sequence
  derived and/or modified sequence
atggccggcagccccacctgcctgaccctgatctacatcctgtggcagctgaccgagcacctgagcaagcccaaggtgaccatgggcctgcagagcaacaagaacggcacctgcgtgaccaacctgacctgctgcatggagcacggcgaggaggacgtgatctacacctggaaggccctgggccaggccgccaacgagagccacaacggcagcatcctgcccatcagctggagatggggcgagagcgacatgaccttcatctgcgtggccagaaaccccgtgagcagaaacttcagcagccccatcctggccagaaagctgtgcgagggcgccgccgacgaccccgacagcagcatggtgctgctgtgcctgctgctggtgcccctgctgctgagcctgttcgtgctgggcctgttcctgtggttcctgaagagagagagacaggaggagtacatcgaggagaagaagagagtggacatctgcagagagacccccaacatctgcccccacagcggcgagaacaccgagtacgacaccatcccccacaccaacagaaccatcctgaaggaggaccccgccaacaccgtgtacagcaccgtggagatccccaagaagatggagaacccccacagcctgctgaccatgcccgacacccccagactgttcgcctacgagaacgtgatctag

SEQ ID NO: 101784 - protein, 188 aa, Artificial Sequence
  derived and/or modified sequence
MAGSPTCLTLIYILWQLTEHLSKPKVTMGLQSNKNGTCVTNLTCCMEHGEEDVIYTWKALGQAANESHNGSILPISWRWGESDMTFICVARNPVSRNFSSPILARKLCEEYIEEKKRVDICRETPNICPHSGENTEYDTIPHTNRTILKEDPANTVYSTVEIPKKMENPHSLLTMPDTPRLFAYENVI

SEQ ID NO: 101785 - DNA, 567 bp, Artificial Sequence
  derived and/or modified sequence
atggctggatctccaacctgtctgacactgatctatattctgtggcagcttactgagcatttgtccaaacccaaagtcaccatgggtctacagtctaacaaaaatggcacttgcgtgaccaatctgacctgctgcatggagcacggtgaggaagatgtaatatacacatggaaggcactaggccaggcggctaacgagagccataatggctctatcctgcccatttcgtggagatggggcgaatcagacatgacgttcatatgtgtggccaggaaccccgtgagtaggaacttctccagtcccatcctagctagaaagctctgcgaggagtacatcgaggagaagaagagggtcgatatttgccgggagactcccaacatctgcccccactccggagagaatacagagtatgacactattccgcatacaaatcggaccatcttgaaggaagaccccgcaaatactgtatacagtaccgttgagatccccaagaaaatggaaaatccccactctttactgacaatgcctgataccccccgactgtttgcctatgagaatgtcatctag

SEQ ID NO: 101786 - DNA, 567 bp, Artificial Sequence
  derived and/or modified sequence
atggccggcagccccacctgcctgaccctcatctacatcctgtggcagctgacagagcacctgagcaagcccaaggtgaccatgggcctgcagagcaacaagaatggcacctgtgtgaccaacctgacctgctgcatggagcacggggaggaggatgtgatctacacctggaaggccctgggccaggccgccaatgaaagccacaacggcagcatcctgcccatctcctggcgctggggcgagagtgacatgaccttcatctgtgtggccagaaatcctgtgtccaggaacttcagcagccccatcctggccaggaagctgtgtgaggagtacatcgaggagaagaagagggtggacatctgccgggagacccccaacatctgcccccacagcggagaaaatacagaatatgacaccatcccccacaccaacagaaccatcctgaaggaggaccctgccaacacagtgtacagcacagtggagatccccaagaagatggagaacccccacagcctgctgaccatgccagacaccccccggctgtttgcctatgaaaatgtcatctag

SEQ ID NO: 101787 - DNA, 567 bp, Artificial Sequence
  derived and/or modified sequence
atggccggcagccccacctgcctgaccctgatctacatcctgtggcagctgacagagcatctctctaagcccaaggtgacaatgggcctccaaagtaataagaatggcacctgtgtgacaaatctcacctgctgtatggaacacggcgaggaggacgttatatatacctggaaggccctggggcaagctgccaacgagagccacaacggctctattctccccattagctggcgctggggggagtctgacatgaccttcatctgcgtggcacggaaccccgtcagccgtaatttttcatctcctatacttgcaagaaagctatgcgaggaatatatagaagagaaaaagagggtagatatctgcagagaaacacccaacatttgtccccactcaggcgagaatacggagtatgacaccatcccacatacaaacagaactattctcaaggaagatccagccaatacggtgtacagtaccgtcgagataccaaaaaagatggagaacccccattctctcctaactatgccggatacaccccgactgttcgcttatgaaaacgtgatttag

SEQ ID NO: 101788 - DNA, 567 bp, Artificial Sequence
  derived and/or modified sequence
atggccggatcacctacatgtctcaccctcatctatatcctctggcaacttactgagcacctctcgaagcctaaggtgaccatgggcctgcagagcaacaagaatgggacttgtgtgactaacctgacatgctgcatggagcacggagaagaggacgtgatttacacttggaaggctcttggtcaggctgccaacgagtcccacaatggaagcatactcccaatcagttggaggtggggcgaaagtgacatgaccttcatctgcgtggcgaggaatcccgtctcccggaactttagctcaccaatccttgctaggaaattgtgcgaagagtatatcgaggagaaaaagagggttgacatctgtagagagacgccaaacatctgtccacactccggcgagaacacagaatacgacacaattcctcacaccaacagaaccattttaaaagaagacccggctaacacagtgtattcgaccgtcgagatacccaaaaaaatggagaatccgcactcactgctgaccatgccagacacacccaggctgtttgcctacgagaatgtgatatag

SEQ ID NO: 101789 - DNA, 1352 bp, Artificial Sequence
  derived and/or modified sequence
ttcatttcagtggctgacttccagagagcaatatggctggttccccaacatgcctcaccctcatctatatcctttggcagctcacagagcacctgtcaaagcctaaagtcaccatgggtctgcagagcaataagaatggcacctgtgtgaccaatctgacatgctgcatggaacatggggaagaggatgtgatttatacctggaaggccctggggcaagcagccaatgagtcccataatgggtccatcctccccatctcctggagatggggagaaagtgatatgaccttcatctgcgttgccaggaaccctgtcagcagaaacttctcaagccccatccttgccaggaagctctgtgaagagtacattgaagagaagaagagagtggacatttgtcgggaaactcctaacatatgcccccattctggagagaacacagagtacgacacaatccctcacactaatagaacaatcctaaaggaagatccagcaaatacggtttactccactgtggaaataccgaaaaagatggaaaatccccactcactgctcacgatgccagacacaccaaggctatttgcctatgagaatgttatctagacagcagtgcactcccctaagtctctgctcaaaaaaaaaacaattctcggcccaaagaaaacaatcagaagaattcactgatttgactagaaacatcaaggaagaatgaagaacgttgacttttttccaggataaattatctctgatgcttctttagatttaagagttcataattccatccactgctgagaaatctcctcaaacccagaaggtttaatcacttcatcccaaaaatgggattgtgaatgtcagcaaaccataaaaaaagtgcttagaagtattcctataaaaatgtaaatgcaaggtcacacatattaatgacagcctgttgtattaatgatggctccaggtcagtgtctggagtttcattccatcccagggcttggatgtcaggattataccaagagtcttgctaccaggagggcaagaagaccaaaacagacagacaagtccagcagaagcagatgcacctgacaaaaatggatgtattaattggctctataaactatgtgcccagcactatgctgagcttacactaattggtcagacatgctgtctgccctcatgaaattggctccaaatgaatgaactactttcatgagcagttgtagcaggcctgaccacagattcccagagggccaggtgtggatccacaggacttgaaggtcaaagttcacaaagatgaagaatcagggtagctgaccatgtttggcagatactataatggagacacagaagtgtgcatggcccaag

SEQ ID NO: 101790 - DNA, 567 bp, Artificial Sequence
  derived and/or modified sequence
atggccggcagccccacctgcctgaccctgatctacatcctgtggcagctgaccgagcacctgagcaagcccaaggtgaccatgggcctgcagagcaacaagaacggcacctgcgtgaccaacctgacctgctgcatggagcacggcgaggaggacgtgatctacacctggaaggccctgggccaggccgccaacgagagccacaacggcagcatcctgcccatcagctggagatggggcgagagcgacatgaccttcatctgcgtggccagaaaccccgtgagcagaaacttcagcagccccatcctggccagaaagctgtgcgaggagtacatcgaggagaagaagagagtggacatctgcagagagacccccaacatctgcccccacagcggcgagaacaccgagtacgacaccatcccccacaccaacagaaccatcctgaaggaggaccccgccaacaccgtgtacagcaccgtggagatccccaagaagatggagaacccccacagcctgctgaccatgcccgacacccccagactgttcgcctacgagaacgtgatctag

SEQ ID NO: 101791 - protein, 296 aa, Artificial Sequence
  derived and/or modified sequence
MAGSPTCLTLIYILWQLTGSAASGPVKELVGSVGGAVTFPLKSKVKQVDSIVWTFNTTPLVTIQPEGGTIIVTQNRNRERVDFPDGGYSLKLSKLKKNDSGIYYVGIYSSSLQQPSTQEYVLHVYEHLSKPKVTMGLQSNKNGTCVTNLTCCMEHGEEDVIYTWKALGQAANESHNGSILPISWRWGESDMTFICVARNPVSRNFSSPILARKLCEGAADDPDSSMVLLCLLLVPLLLSLFVLGLFLWFLKRERQEENNPKGRSSKYGLLHCGNTEKDGKSPLTAHDARHTKAICL

SEQ ID NO: 101792 - DNA, 891 bp, Artificial Sequence
  derived and/or modified sequence
atggcagggtcacccacttgcctgacgcttatctatattctttggcagctcacggggtctgccgccagcggccctgtcaaggagctcgtcgggtctgtgggtggggcagtaactttccccctgaagtctaaagtcaaacaggttgacagcattgtgtggacattcaacactaccccgctggtcacaatccagccagagggcggtacgatcatagttacacagaaccggaatcgagaacgagtggactttccggacggaggctactctctgaagttgtcaaaacttaaaaagaacgactccgggatctattacgtaggcatctattcatcatccctccagcaaccctcgacccaggagtatgtcctccatgtgtacgaacacctcagtaaacccaaagtaactatgggactccagagcaacaagaacggaacctgtgtgacgaacctgacctgttgcatggagcacggggaagaagatgtaatctacacttggaaagcgctgggacaggcggccaacgaaagtcataacgggagcatcctgccgattagctggcgctggggcgagagcgacatgactttcatttgtgtcgccagaaaccccgtgtctagaaatttttcgtcccctatcctagcaaggaagctgtgtgaaggagcagccgacgatcctgactcatcaatggtgcttctgtgtctacttttggtcccattattgttatcactcttcgtcctcgggttattcctgtggtttctgaagcgcgaacgccaagaggaaaacaatcccaaaggacgatcgagcaagtacggattacttcattgtggcaacaccgagaaggacggtaagtcacccctcacagctcacgacgcccggcacacaaaagctatctgcctctag

SEQ ID NO: 101793 - DNA, 891 bp, Artificial Sequence
  derived and/or modified sequence
atggccggcagccccacctgcctgaccctcatctacatcctgtggcagctgaccggcagcgctgccagcggccctgtgaaggagctggtgggctctgtgggcggcgctgtgaccttccccctgaagagcaaggtgaagcaggtggacagcatcgtgtggaccttcaacaccacccccctggtgaccatccagcctgagggcggcaccatcatcgtgacccagaacagaaaccgggagcgggtggacttcccagatggcggctacagcctgaagctgagcaagctgaagaagaatgacagcggcatctactacgtgggcatctacagcagcagcctgcagcagcccagcacccaggagtatgtgctgcacgtgtatgagcacctgagcaagcccaaggtgaccatgggcctgcagagcaacaagaatggcacctgtgtgaccaacctgacctgctgcatggagcacggggaggaggatgtgatctacacctggaaggccctgggccaggccgccaatgaaagccacaacggcagcatcctgcccatctcctggcgctggggcgagagtgacatgaccttcatctgtgtggccaggaaccctgtgtccaggaacttcagcagccccatcctggccaggaagctgtgtgagggcgctgctgatgatcctgacagctccatggtgctgctgtgcctgctgctggtgcccctgctgctgagcctgtttgtgctgggcctcttcctgtggttcctgaagcgggagcggcaggaggagaacaaccccaagggccgcagcagcaaatatggcctgctgcactgcggcaacacagagaaggatggcaagagccccctgacagcccatgatgcccggcacaccaaggccatctgcctgtag

SEQ ID NO: 101794 - DNA, 891 bp, Artificial Sequence
  derived and/or modified sequence
atggccggcagccccacctgcctgaccctgatctacatcctgtggcagctcacaggctcggcagcgagtggtccagtcaaggagctggtgggaagcgtcggtggagccgtcaccttccccctgaaatcaaaggtgaagcaggtggacagcattgtctggacttttaatacaacccccctggtgactattcaaccagaaggcggtaccatcatcgtgacccagaaccggaatcgggagagagtcgatttccccgatgggggttacagcctcaaactgagcaagctcaaaaagaacgacagcgggatctactatgttgggatctattctagttccctccagcagcctagcacccaagagtatgtgctacatgtctatgagcatctgagcaaacccaaggtgactatgggcttacagtcgaacaagaatgggacctgtgtgacgaatctgacatgttgtatggagcatggcgaggaggatgtgatatacacttggaaggccctgggacaagcagctaatgagtctcacaatgggtctatcctgcccataagctggaggtggggggagtctgatatgacattcatttgcgtggctcggaacccagtgtctcgaaactttagttccccaatcttggctcgtaaactgtgcgagggcgcagcggacgatcccgatagctccatggtcttactgtgtctgttgctcgtcccattgttgttgtcgctgtttgttttaggcctgtttctgtggtttttgaaaagggaaaggcaggaggagaacaaccctaaaggccgctcttcgaagtatggcctgctgcattgtggaaatactgagaaggatgggaagagcccattgaccgcgcacgacgcccggcatactaaggctatctgcctgtag

SEQ ID NO: 101795 - DNA, 891 bp, Artificial Sequence
  derived and/or modified sequence
atggcagggtctccgacatgcctgactctcatctacatactgtggcagctgacaggatctgccgcttccggaccggttaaggagctggttggttccgtaggcggagccgtcaccttccccttgaagtctaaagtcaaacaggtggactctatcgtctggacattcaatacaaccccgctggtgaccatccagcctgaagggggaactatcatagtgacccagaaccggaatagagagcgggtcgatttccctgatggcggatattccttgaaactttccaaactgaagaagaatgactccggtatctactacgttggcatctattctagctcgctccagcagccatctactcaggagtatgtcctccacgtgtacgagcatctcagcaaacctaaggttacaatgggcctgcagtctaacaagaacggcacatgtgtgactaaccttacatgctgcatggaacatggagaggaagacgtgatatacacgtggaaagcactcggacaggctgccaatgagtcccataatggctccattctgccaatttcgtggcggtggggcgagtccgatatgacttttatttgtgtcgcacgtaacccagtgagcagaaatttctcttcccccatactggcacgaaagttgtgtgagggcgctgccgatgatcccgattcaagtatggtgttactgtgtctcctcctcgtgccccttttactgtccctcttcgtgctgggcctgtttctgtggtttttgaagagagagagacaggaggagaacaacccaaaaggtagaagctctaagtatggcctcctccactgcggcaacacggaaaaggacggtaaaagtcctctgacagcacacgacgccaggcataccaaagccatttgtctgtag

SEQ ID NO: 101796 - DNA, 2559 bp, Artificial Sequence
  derived and/or modified sequence
cagagagcaatatggctggttccccaacatgcctcaccctcatctatatcctttggcagctcacagggtcagcagcctctggacccgtgaaagagctggtcggttccgttggtggggccgtgactttccccctgaagtccaaagtaaagcaagttgactctattgtctggaccttcaacacaacccctcttgtcaccatacagccagaagggggcactatcatagtgacccaaaatcgtaatagggagagagtagacttcccagatggaggctactccctgaagctcagcaaactgaagaagaatgactcagggatctactatgtggggatatacagctcatcactccagcagccctccacccaggagtacgtgctgcatgtctacgagcacctgtcaaagcctaaagtcaccatgggtctgcagagcaataagaatggcacctgtgtgaccaatctgacatgctgcatggaacatggggaagaggatgtgatttatacctggaaggccctggggcaagcagccaatgagtcccataatgggtccatcctccccatctcctggagatggggagaaagtgatatgaccttcatctgcgttgccaggaaccctgtcagcagaaacttctcaagccccatccttgccaggaagctctgtgaaggtgctgctgatgacccagattcctccatggtcctcctgtgtctcctgttggtgcccctcctgctcagtctctttgtactggggctatttctttggtttctgaagagagagagacaagaagagaacaatcctaaaggaagatccagcaaatacggtttactccactgtggaaataccgaaaaagatggaaaatccccactcactgctcacgatgccagacacaccaaggctatttgcctatgagaatgttatctagacagcagtgcactcccctaagtctctgctcaaaaaaaaaacaattctcggcccaaagaaaacaatcagaagaattcactgatttgactagaaacatcaaggaagaatgaagaacgttgacttttttccaggataaattatctctgatgcttctttagatttaagagttcataattccatccactgctgagaaatctcctcaaacccagaaggtttaatcacttcatcccaaaaatgggattgtgaatgtcagcaaaccataaaaaaagtgcttagaagtattcctataaaaatgtaaatgcaaggtcacacatattaatgacagcctgttgtattaatgatggctccaggtcagtgtctggagtttcattccatcccagggcttggatgtcaggattataccaagagtcttgctaccaggagggcaagaagaccaaaacagacagacaagtccagcagaagcagatgcacctgacaaaaatggatgtattaattggctctataaactatgtgcccagcactatgctgagcttacactaattggtcagacatgctgtctgccctcatgaaattggctccaaatgaatgaactactttcatgagcagttgtagcaggcctgaccacagattcccagagggccaggtgtggatccacaggacttgaaggtcaaagttcacaaagatgaagaatcagggtagctgaccatgtttggcagatactataatggagacacagaagtgtgcatggcccaaggacaaggacctccagccaggcttcatttatgcacttgtgctgcaaaagaaaagtctaggttttaaggctgtgccagaacccatcccaataaagagaccgagtctgaagtcacattgtaaatctagtgtaggagacttggagtcaggcagtgagactggtggggcacggggggcagtgggtacttgtaaacctttaaagatggttaattcattcaatagatatttattaagaacctatgcggcccggcatggtggctcacacctgtaatcccagcactttgggaggccaaggtgggtgggtcatctgaggtcaggagttcaagaccagcctggccaacatggtgaaaccccatctctactaaagatacaaaaatttgctgagcgtggtggtgtgcacctgtaatcccagctactcgagaggccaaggcatgagaatcgcttgaacctgggaggtggaggttgcagtgagctgagatggcaccactgcactccggcctaggcaacgagagcaaaactccaatacaaacaaacaaacaaacacctgtgctaggtcagtctggcacgtaagatgaacatccctaccaatacagagctcaccatctcttatacttaagtgaaaaacatggggaaggggaaaggggaatggctgcttttgatatgttccctgacacatatcttgaatggagacctccctaccaagtgatgaaagtgttgaaaaacttaataacaaatgcttgttgggcaagaatgggattgaggattatcttctctcagaaaggcattgtgaaggaattgagccagatctctctccctactgcaaaaccctattgtagtaaaaaagtcttctttactatcttaataaaacagatattgtgagattcacatacaaaaa

SEQ ID NO: 101797 - DNA, 891 bp, Artificial Sequence
  derived and/or modified sequence
atggccggcagccccacctgcctgaccctgatctacatcctgtggcagctgaccggcagcgccgccagcggccccgtgaaggagctggtgggcagcgtgggcggcgccgtgaccttccccctgaagagcaaggtgaagcaggtggacagcatcgtgtggaccttcaacaccacccccctggtgaccatccagcccgagggcggcaccatcatcgtgacccagaacagaaacagagagagagtggacttccccgacggcggctacagcctgaagctgagcaagctgaagaagaacgacagcggcatctactacgtgggcatctacagcagcagcctgcagcagcccagcacccaggagtacgtgctgcacgtgtacgagcacctgagcaagcccaaggtgaccatgggcctgcagagcaacaagaacggcacctgcgtgaccaacctgacctgctgcatggagcacggcgaggaggacgtgatctacacctggaaggccctgggccaggccgccaacgagagccacaacggcagcatcctgcccatcagctggagatggggcgagagcgacatgaccttcatctgcgtggccagaaaccccgtgagcagaaacttcagcagccccatcctggccagaaagctgtgcgagggcgccgccgacgaccccgacagcagcatggtgctgctgtgcctgctgctggtgcccctgctgctgagcctgttcgtgctgggcctgttcctgtggttcctgaagagagagagacaggaggagaacaaccccaagggcagaagcagcaagtacggcctgctgcactgcggcaacaccgagaaggacggcaagagccccctgaccgcccacgacgccagacacaccaaggccatctgcctgtag

SEQ ID NO: 101798 - protein, 149 aa, Artificial Sequence
  derived and/or modified sequence
MAGSPTCLTLIYILWQLTEHLSKPKVTMGLQSNKNGTCVTNLTCCMEHGEEDVIYTWKALGQAANESHNGSILPISWRWGESDMTFICVARNPVSRNFSSPILARKLCEENNPKGRSSKYGLLHCGNTEKDGKSPLTAHDARHTKAICL

SEQ ID NO: 101799 - DNA, 450 bp, Artificial Sequence
  derived and/or modified sequence
atggcgggttctcctacttgtctcaccctgatttacatcctgtggcagttgacagaacatctgagtaaaccaaaagtcacaatgggattacagtcgaataaaaatggcacatgcgtcaccaatcttacttgttgtatggagcatggcgaggaagacgtcatctacacttggaaggctctgggccaagcggctaacgagagtcataatgggtccatcctccccatatcctggcgctggggagaatctgatatgacctttatctgcgtggccagaaacccagtctccagaaacttttccagccccattttggcacggaaattatgcgaagagaataatcctaagggaaggtcaagtaaatacgggctgttgcactgcggaaacacagagaaagacggcaagtccccactgacggcccacgacgccaggcacactaaagccatctgtctctag

SEQ ID NO: 101800 - DNA, 450 bp, Artificial Sequence
  derived and/or modified sequence
atggccggcagccccacctgcctgaccctcatctacatcctgtggcagctgacagagcacctgagcaagcccaaggtgaccatgggcctgcagagcaacaagaatggcacctgtgtgaccaacctgacctgctgcatggagcacggggaggaggatgtgatctacacctggaaggccctgggccaggccgccaatgaaagccacaacggcagcatcctgcccatctcctggcgctggggcgagagtgacatgaccttcatctgtgtggccagaaatcctgtgtccaggaacttcagcagccccatcctggccaggaagctgtgtgaggagaacaaccccaagggccgcagcagcaaatatggcctgctgcactgcggcaacacagagaaggatggcaagagccccctgacagcccatgatgcccggcacaccaaggccatctgcctgtag

SEQ ID NO: 101801 - DNA, 450 bp, Artificial Sequence
  derived and/or modified sequence
atggccggcagccccacctgcctgaccctgatctacatcctgtggcagctgacggagcatctgtccaagccaaaagtcactatgggcctgcagagtaataagaatggcacttgtgtcacaaacctaacctgctgtatggagcatggtgaggaggatgtaatttacacatggaaggcacttggccaagctgcaaacgagagtcacaacgggagcatcttgcccatctcctggagatggggggagagcgatatgaccttcatatgcgttgcccgcaacccagtgagcagaaatttttcctctccgatccttgctcggaagctctgcgaagagaacaaccccaagggacggtcaagcaagtacggactgctgcactgcggcaatactgagaaagacggcaaaagtccgctaacagctcatgacgcacggcacacgaaagcaatttgtctctag

SEQ ID NO: 101802 - DNA, 450 bp, Artificial Sequence
  derived and/or modified sequence
atggccggtagtccgacgtgccttactcttatttacattttgtggcagttaaccgagcacctgtctaaacctaaggtgaccatgggtttgcagtcaaataaaaacggcacgtgtgtaacaaacctgacgtgctgtatggaacacggtgaagaagacgtgatttacacgtggaaagcattggggcaagctgctaatgagagccataacggtagtatactgccgatttcgtggaggtggggcgagagcgacatgacattcatctgtgtggccagaaatcccgtcagtagaaacttttcatctcctattctcgctaggaaactttgtgaagagaataatcctaaggggagaagttccaagtacggactgctccattgtggcaacacagagaaagatggaaagtctccactgacggctcacgacgctaggcataccaaggctatctgtctttag

SEQ ID NO: 101803 - DNA, 913 bp, Artificial Sequence
  derived and/or modified sequence
cagtggctgacttccagagagcaatatggctggttccccaacatgcctcaccctcatctatatcctttggcagctcacagagcacctgtcaaagcctaaagtcaccatgggtctgcagagcaataagaatggcacctgtgtgaccaatctgacatgctgcatggaacatggggaagaggatgtgatttatacctggaaggccctggggcaagcagccaatgagtcccataatgggtccatcctccccatctcctggagatggggagaaagtgatatgaccttcatctgcgttgccaggaaccctgtcagcagaaacttctcaagccccatccttgccaggaagctctgtgaagagaacaatcctaaaggaagatccagcaaatacggtttactccactgtggaaataccgaaaaagatggaaaatccccactcactgctcacgatgccagacacaccaaggctatttgcctatgagaatgttatctagacagcagtgcactcccctaagtctctgctcaaaaaaaaaacaattctcggcccaaagaaaacaatcagaagaattcactgatttgactagaaacatcaaggaagaatgaagaacgttgacttttttccaggataaattatctctgatgcttctttagatttaagagttcataattccatccactgctgagaaatctcctcaaacccagaaggtttaatcacttcatcccaaaaatgggattgtgaatgtcagcaaaccataaaaaaagtgcttagaagtattcctataaaaatgtaaatgcaaggtcacacatattaatgacagcctgttgtattaatgatggctccaggtcagtgtctggagtttcattccatcccagggcttggatgtcaggattataccaagagtcttgctaccaggagggc

SEQ ID NO: 101804 - DNA, 450 bp, Artificial Sequence
  derived and/or modified sequence
atggccggcagccccacctgcctgaccctgatctacatcctgtggcagctgaccgagcacctgagcaagcccaaggtgaccatgggcctgcagagcaacaagaacggcacctgcgtgaccaacctgacctgctgcatggagcacggcgaggaggacgtgatctacacctggaaggccctgggccaggccgccaacgagagccacaacggcagcatcctgcccatcagctggagatggggcgagagcgacatgaccttcatctgcgtggccagaaaccccgtgagcagaaacttcagcagccccatcctggccagaaagctgtgcgaggagaacaaccccaagggcagaagcagcaagtacggcctgctgcactgcggcaacaccgagaaggacggcaagagccccctgaccgcccacgacgccagacacaccaaggccatctgcctgtag

SEQ ID NO: 101805 - protein, 953 aa, Artificial Sequence
  derived and/or modified sequence
MTSATSPIILKWDPKSLEIRTLTVERLLEPLVTQVTTLVNTSNKGPSGKKKGRSKKAHVLAASVEQATQNFLEKGEQIAKESQDLKEELVAAVEDVRKQGETMRIASSEFADDPCSSVKRGTMVRAARALLSAVTRLLILADMADVMRLLSHLKIVEEALEAVKNATNEQDLANRFKEFGKEMVKLNYVAARRQQELKDPHCRDEMAAARGALKKNATMLYTASQAFLRHPDVAATRANRDYVFKQVQEAIAGISNAAQATSPTDEAKGHTGIGELAAALNEFDNKIILDPMTFSEARFRPSLEERLESIISGAALMADSSCTRDDRRERIVAECNAVRQALQDLLSEYMNNTGRKEKGDPLNIAIDKMTKKTRDLRRQLRKAVMDHISDSFLETNVPLLVLIEAAKSGNEKEVKEYAQVFREHANKLVEVANLACSISNNEEGVKLVRMAATQIDSLCPQVINAALTLAARPQSKVAQDNMDVFKDQWEKQVRVLTEAVDDITSVDDFLSVSENHILEDVNKCVIALQEGDVDTLDRTAGAIRGRAARVIHIINAEMENYEAGVYTEKVLEATKLLSETVMPRFAEQVEVAIEALSANVPQPFEENEFIDASRLVYDGVRDIRKAVLMIRTPEELEDDSDFEQEDYDVRSRTSVQTEDDQLIAGQSARAIMAQLPQEEKAKIAEQVEIFHQEKSKLDAEVAKWDDSGNDIIVLAKQMCMIMMEMTDFTRGKGPLKNTSDVINAAKKIAEAGSRMDKLARAVADQCPDSACKQDLLAYLQRIALYCHQLNICSKVKAEVQNLGGELIVSGTGVQSTFTTFYEVDCDVIDGGRASQLSTHLPTCAEGAPIGSGSSDSSMLDSATSLIQAAKNLMNAVVLTVKASYVASTKYQKVYGTAAVNSPVVSWKMKAPEKKPLVKREKPEEFQTRVRRGSQKKHISPVQALSEFKAMDSF

SEQ ID NO: 101806 - DNA, 2862 bp, Artificial Sequence
  derived and/or modified sequence
atgacatctgccacgagtcctattatcctgaaatgggacccgaagtctctggaaatcaggactctcactgtggagagactgctggaacccttggtcacacaagtcaccaccctggtcaacacatcaaacaaaggccccagcgggaagaagaagggtcgatccaagaaggcccatgtgctcgccgcgagtgtggaacaggccactcaaaactttctcgagaaaggagaacaaatagcgaaggaatcccaagatttgaaggaagagttagtggccgcagtggaggatgtgaggaaacagggtgagacgatgaggatagcaagttccgaattcgcagacgacccctgcagtagtgtaaaaaggggaaccatggtgagggcagcacgcgccctgctgagtgctgtgacccgacttctgattttagcggatatggcggacgtgatgagactcctatcccaccttaagatcgtggaagaggctctggaggctgtgaaaaacgccacaaatgaacaagacctagcaaataggttcaaagaatttggcaaagagatggtgaaactgaactacgtagcagcgcgtcgccaacaggaactgaaggatccacactgtcgcgacgagatggcagcggccaggggggctctcaagaaaaatgctactatgttgtacacagcaagtcaggccttcctacgtcatcctgacgtggccgccacccgtgccaaccgcgactacgtgttcaaacaggtccaagaagcgatcgcaggcatttcaaacgctgcacaggctacgtctcctacagatgaagcgaaaggacacaccggaattggtgagttagctgccgctctgaacgaatttgacaataaaatcatacttgatcccatgaccttcagcgaagcgcggtttagaccaagtctggaggagagactggaatctattatttccggtgcggctctcatggcagactcctcatgcacgcgggacgatagacgcgaaagaatcgtggccgaatgcaatgccgtgcgccaggccctgcaggatctgctgtccgagtacatgaataacactgggagaaaggaaaagggggaccccttgaacatcgcaatcgataaaatgacaaagaaaactagggatctccgacgacagctccggaaggcggtcatggaccacatctcagactcttttctcgaaactaacgtgccactgttggtcttgattgaggcagctaaatcagggaatgagaaggaggtcaaggagtatgctcaagtgtttcgcgaacacgcgaacaaactagtggaggtagccaacctggcttgtagcatcagcaacaatgaagaaggcgtcaaattagtgaggatggctgctacccagatagactccctttgcccgcaggtgatcaatgcagctctgacactggctgcacgaccacaaagtaaagtcgcccaagataacatggacgtgtttaaagaccagtgggagaagcaagtgcgcgttctcactgaagccgttgacgacattacaagtgttgacgactttctcagcgtttcagaaaatcatatcctcgaagacgtaaacaaatgcgtcattgccttgcaagaaggagatgtcgacaccctcgatcgcaccgcgggagctattcggggtagagctgctcgggtgattcacattatcaacgcggaaatggagaactacgaggctggagtgtacaccgaaaaagtcttggaggccacaaaactcctgagcgagacagtcatgcctcgttttgcagagcaggtggaggtggctatagaggcactatccgcgaacgtgccacagcccttcgaggaaaacgaatttattgacgcttccaggttagtttacgacggagtccgcgacattcgtaaggctgttttgatgatccggactccggaggagctggaagacgattccgactttgagcaggaggactatgatgtgcgttcccgtacatcagtccagacagaggatgaccagctgatcgccggacagagtgccagggccatcatggcccagttgcctcaggaggagaaggccaaaatcgctgaacaggtggagatattccatcaggaaaaatctaagctcgacgcagaggttgcaaagtgggatgatagcggtaacgacattatcgtcttagcaaaacaaatgtgtatgataatgatggaaatgactgacttcacaagagggaagggccccctgaaaaatacctctgacgttattaacgctgccaaaaaaattgctgaagcgggtagcagaatggacaagctcgcccgcgcggtggcagaccagtgccctgattcagcatgtaagcaagacttgttagcctacctgcaacgaatcgccctctattgccatcagctcaacatttgttccaaggtaaaggccgaagtccagaacttaggaggagagctgattgtcagtggtactggtgtccagagtaccttcactactttctatgaagtcgactgtgacgtgatcgatggtgggcgagcgtcgcaactctcaacacacttgccaacatgcgcagaaggggctccaatcggttctggttcatccgatagttccatgctcgattccgccacaagtctcattcaagccgcgaaaaatctgatgaacgctgtcgtgctcaccgtaaaggccagttacgttgcctcaacaaagtatcagaaggtctacgggaccgctgcggtcaatagcccagttgtgtcatggaagatgaaagcccccgagaaaaagccgctcgtgaagcgcgagaagcctgaagaatttcagactagggttcgcagaggcagtcagaagaaacacatatcaccggtacaggctctatccgaatttaaggctatggactccttttag

SEQ ID NO: 101807 - DNA, 2862 bp, Artificial Sequence
  derived and/or modified sequence
atgaccagcgccaccagccccatcatcctgaagtgggaccccaagagcctggagatccgcaccctgactgtggagcggctgctggagcccctggtgacccaggtgaccaccctggtgaacaccagcaacaagggccccagcggcaagaagaagggccgcagcaagaaggcccacgtgctggccgcctctgtggagcaggccacccagaacttcctggagaagggggagcagatcgccaaggagagccaggacctgaaggaggagctggtggccgctgtggaggatgtgaggaagcagggcgagaccatgagaattgccagcagcgagtttgctgatgacccctgcagctctgtgaagaggggcaccatggtgcgggccgcccgggccctgctgtctgctgtgacccggctgctgatcctggccgacatggctgatgtgatgaggctgctgagccacctgaagatcgtggaggaggccctggaggccgtgaagaatgccaccaatgagcaggacctggccaaccgcttcaaggagtttgggaaggagatggtgaagctgaactacgtggccgcccggcggcagcaggagctgaaggacccccactgcagagatgagatggccgccgcccggggggccctgaagaagaatgccaccatgctgtacacagccagccaggccttcctgcggcacccagatgtggccgccacccgggccaacagagattatgtgttcaagcaggtgcaggaggccatcgccggcatcagcaatgctgcccaggccaccagccccacagatgaggccaagggccacactggaattggagagctggccgccgccctgaatgaatttgacaacaagatcatcctggaccccatgaccttcagcgaggcccgcttccggcccagcctggaggagcggctggagagcatcatcagcggggccgccctgatggctgacagcagctgcaccagagatgacagaagagaaagaattgtggccgagtgcaatgctgtgcggcaggccctgcaggacctgctgtctgagtacatgaacaacacaggcaggaaggagaagggggaccccctgaacatcgccatcgacaagatgaccaagaagacccgggacctgcggcggcagctgaggaaggctgtgatggaccacatcagtgacagcttcctggagaccaacgtgcccctgctggtgctgattgaagctgccaagtctggaaatgagaaggaggtgaaggagtatgcccaggtgttccgggagcacgccaacaagctggtggaggtggccaacctggcctgcagcatcagcaacaatgaggagggcgtgaagctggtgaggatggccgccacccagattgacagcctgtgcccccaggtgatcaatgctgccctgaccctggccgcccggccccagagcaaggtggcccaggacaacatggatgtgttcaaggaccagtgggagaagcaggtgcgggtgctgacagaagctgtggatgacatcacctctgtggatgacttcctgtctgtgtctgagaaccacatcctggaggatgtgaacaagtgtgtgattgccctgcaggagggagatgtggacaccctggacagaacagctggggccatccggggccgggccgcccgggtcatccacatcatcaatgctgagatggagaactatgaagctggggtgtacacagagaaggtgctggaggccaccaagctgctgtctgagaccgtgatgcccaggtttgctgagcaggtggaggtggccatcgaggccctgagcgccaacgtgccccagccctttgaggagaatgagttcattgatgccagccggctggtgtatgatggagtgcgggacatcaggaaggctgtgctgatgatccgcaccccagaggagctggaggatgacagcgactttgagcaggaggactatgatgtgcgcagcaggacctctgtgcagacagaagatgaccagctgattgctggccagagcgcccgggccatcatggcccagctgccccaggaggagaaggccaagattgctgagcaggtggagatcttccaccaggagaagagcaagctggatgctgaggtggccaagtgggatgattctggaaatgacatcatcgtgctggccaagcagatgtgcatgatcatgatggagatgacagacttcacccggggcaagggccccctgaagaacaccagtgatgtgatcaatgctgccaagaagattgctgaggccggcagcaggatggacaagctggcccgggctgtggccgaccagtgcccagattctgcctgcaagcaggacctgctggcctacctgcagagaattgccctgtactgccaccagctgaacatctgcagcaaggtgaaggccgaggtgcagaacctgggcggggagctgattgtgtctggaactggagtgcagagcaccttcaccaccttctatgaggtggactgtgatgtgattgatggcggccgggccagccagctgagcacccacctgcccacctgtgccgagggcgcccccatcggcagcggcagcagtgacagctccatgctggacagcgccaccagcctcatccaggccgccaagaacctgatgaatgctgtggtgctgactgtgaaggccagctatgtggccagcaccaagtaccagaaggtgtatggaacagctgctgtgaacagccctgtggtgtcctggaagatgaaggcccctgagaagaagcccctggtgaagcgggagaagccagaggagttccagaccagggtgcggcggggcagccagaagaagcacatcagccctgtgcaggccctgtctgagttcaaggccatggacagcttctag

SEQ ID NO: 101808 - DNA, 2862 bp, Artificial Sequence
  derived and/or modified sequence
atgaccagcgccaccagccccatcatcctgaagtgggaccccaagagtctggaaattaggaccctgacggtggaaagactgctagagcccctcgtcacacaagtaacgactctcgtgaatacgtcaaacaaggggccgagcggcaaaaagaaaggcaggtcaaagaaagcacatgttctggccgcctcagttgaacaggcgacccaaaactttctggagaaaggggagcagattgccaaggagagccaggacctgaaagaagagctggttgccgctgtagaggacgtccggaagcagggagaaacaatgcgcattgcctcctctgaattcgcagatgatccttgcagcagtgtcaaaagaggaacaatggtcagggcggccagagccctgctttctgccgtaactagattgcttattctggcagatatggccgatgtcatgaggctccttagccatctgaaaattgtcgaggaggctctcgaggctgtgaaaaacgctaccaacgaacaggacctcgctaaccgtttcaaagaattcgggaaggaaatggttaaacttaattacgttgctgccaggcgccagcaggagcttaaggatccacactgtcgggacgaaatggcagcagcccggggggcactgaaaaaaaacgcaacaatgctgtacaccgctagtcaggcattcttacgccatcctgacgttgccgctacaagggcaaaccgggactatgtcttcaagcaggtgcaggaggccatagcggggatctctaatgccgcccaggcaacgtctccaaccgacgaggcaaaaggccataccggtattggagaacttgccgctgccctgaacgaattcgacaacaagattatactcgaccctatgacattctctgaagctaggttccggcctagcctggaagagagacttgagtcaatcatctcaggagccgccttgatggccgactcgtcgtgtaccagagacgatcgccgggagaggattgtcgctgaatgcaatgccgtgagacaggcccttcaagaccttctgtctgagtacatgaataacaccggacgaaaggaaaagggcgaccccctaaatattgcaatcgataagatgacgaagaagaccagagatctcaggagacaactgcgaaaggcagtgatggaccacatctctgactccttcctggagacaaatgtcccactgcttgttttaatcgaggcggcgaagagcggtaatgagaaagaagtcaaggaatacgcccaggtctttcgagagcacgctaacaaactggttgaagtggctaatcttgcttgttctatttccaataacgaggagggcgtaaaactggtacggatggccgccacgcagattgattcactctgcccacaggtgatcaacgccgcgctcacgctggccgctcgacctcagagtaaggtggctcaggacaacatggatgtcttcaaggaccaatgggagaagcaggtgcgggtgctgacagaagctgtggatgatatcacatccgtggacgacttcttaagcgtgtctgaaaaccacatcctggaggacgttaataaatgtgttattgcgctgcaggaaggtgatgttgatacactagatcgcaccgctggagctatccggggcagggccgccagggtgatccacattatcaacgccgaaatggaaaactacgaggccggtgtttataccgagaaggtgctggaggcaaccaagttgctgagcgagaccgtaatgcctcgctttgctgaacaggtggaggtggccatcgaggctctcagcgccaatgtgccccagccattcgaagaaaatgagtttattgacgcgtctaggttagtgtatgacggcgtccgtgacattcgaaaggctgtgctcatgatccgcacccccgaagagctcgaggatgattccgattttgagcaggaggactacgacgtgcgctctaggacctctgtgcaaactgaggacgatcagctgattgcaggtcaatccgccagagctatcatggcccaactgccccaagaagagaaggcaaaaatagctgagcaagttgaaatctttcaccaagagaagtccaaactcgacgccgaagttgccaagtgggacgatagcggaaacgacattattgtgttggcaaaacagatgtgcatgatcatgatggaaatgactgattttacacgtggaaagggccccctcaaaaacacctcggatgtgataaacgccgctaaaaagatcgctgaggccggatccagaatggataaactcgccagggcagtcgctgatcagtgtccagacagcgcttgtaagcaagatttactcgcttatctgcagcggattgctctgtattgtcaccaactaaatatatgttctaaagtgaaggccgaggtccagaacttgggaggcgaactgatcgtgagtggtacaggagtccaaagtacctttactaccttctacgaagtagattgcgacgtgattgatggaggccgtgctagccagcttagcacacacctcccaacatgcgccgaaggagcccccattggaagcggatcctctgacagttcaatgctggactctgctacttcgctcatccaagctgctaaaaatctgatgaatgcagtagttttaacagtcaaggcaagctatgtggcatcaactaaatatcagaaggtttatggcaccgcggcagtgaattcgccagtcgtgtcttggaaaatgaaggctccggagaagaagccattagtgaaaagagagaaaccggaggagttccagacccgtgtaagacggggctctcagaagaaacacattagtcccgttcaggccctgtcagaatttaaagcgatggatagcttttag

SEQ ID NO: 101809 - DNA, 2862 bp, Artificial Sequence
  derived and/or modified sequence
atgacttcggcaacgagccctatcattctcaagtgggatcccaaaagcctagaaatcaggacactcacagtggaaagactgttagagccattagtgacacaggtgacaacgcttgtgaatacttctaataagggcccatctggcaaaaagaaggggcgttccaaaaaggcacacgtgttggccgcttccgtggaacaggcaacacaaaatttcctagagaagggcgagcagatcgctaaagaatcacaggacctaaaggaggagcttgtagctgctgtggaagatgttagaaaacaaggcgaaacgatgagaatagcctcatcagaattcgccgatgacccttgctctagcgtgaagagaggcaccatggtcagggctgctcgcgcactcttgtcagctgttacccgcttattaatattggccgacatggccgacgtgatgagactgctttctcacctcaaaatagtcgaggaggctttggaggccgtgaagaatgcgaccaacgaacaagacctggctaaccgctttaaagagttcggaaaggagatggtgaagcttaactacgttgctgcgcgtcggcagcaggaactgaaggaccctcattgtagagatgaaatggccgcagctagaggcgctctcaaaaaaaatgctactatgctgtacactgcatcacaggctttcctgcgccatcctgacgttgcagctacccgggcaaaccgggattatgtatttaaacaggtgcaggaggcgatcgctggaataagcaacgccgcacaggcgacatcgccgaccgatgaagcgaaaggacataccggaatcggcgaattggccgcagcgctgaacgaatttgataacaagataatactagaccccatgacattctctgaggccaggttcaggcctagtctcgaggaaagactggagagcatcatctccggcgcagctctgatggccgacagttcctgtactcgcgacgatcgaagagaaagaattgttgccgaatgtaatgcagtgcgtcaggcccttcaagatctgttatctgaatacatgaataataccgggcgaaaggaaaaaggagacccccttaacattgcaatcgacaaaatgacaaaaaagactagggacctgaggcgccagctccgtaaagcagtaatggatcatatttctgatagctttctagagaccaacgtaccattgcttgttctcatcgaggcggctaaatcgggtaatgagaaagaggtgaaggagtacgcccaggtgtttcgtgagcacgccaacaaactggtagaagttgctaatctagcttgtagtataagtaataacgaagaaggcgtgaagctcgtccggatggcagccactcaaattgactccttgtgtcctcaagtgattaacgcggcactgactttggccgctcggcctcagagtaaggtggcccaagataatatggacgtctttaaggatcaatgggaaaaacaggtaagagtactgaccgaggctgtcgatgacataacgtccgtggacgatttcctctctgttagcgagaaccacatcctcgaagatgttaacaaatgtgtgatcgctttacaggagggcgatgtggacacgctggatcggaccgctggggctattcgcggacgagctgcccgagttatccacataattaacgcagagatggagaattatgaggctggagtgtacacagaaaaagtgctggaggccacaaagctactcagtgagactgtgatgcccaggttcgccgaacaggtggaggttgcgatcgaagcgttgagtgccaatgtgcctcagccattcgaagaaaatgaattcatcgatgcctcccgactggtctatgatggtgttcgcgatatacgaaaagctgtgttgatgattcgaaccccagaagagttggaagatgacagcgactttgaacaggaggactacgacgtcagaagccgtacatcggtgcaaactgaggacgaccagctcattgcagggcaaagcgctcgagccatcatggcacagttaccacaggaggaaaaagctaagatcgcagagcaggtggagatattccaccaggaaaaatcgaagttggatgccgaggtggctaaatgggacgacagcggaaatgatatcattgttctggcaaaacagatgtgcatgataatgatggagatgactgacttcacacgtggtaagggcccactgaagaacacttctgacgttatcaatgccgctaagaaaatagccgaggcgggtagtcgcatggacaagctggctcgcgcagtagcggatcaatgtcccgattccgcctgcaaacaggacctcctcgcgtacctgcaacggatcgctctatattgccaccagcttaatatatgcagcaaggttaaggccgaggtgcaaaacttgggaggtgagttgatcgtgtctggcaccggcgtgcaaagcactttcacgacattttacgaggtcgattgtgatgtcattgatggtgggagagcatctcagctcagcacacatctgccgacctgtgccgagggggctccgatcgggagcggaagctccgactcctctatgctcgactccgccacatcactgattcaggccgcaaagaatctgatgaacgctgtcgtgctgactgtcaaagcaagctacgttgcctccacaaagtaccaaaaagtatacggcacagccgcagttaattcccctgttgtgtcatggaagatgaaagctcctgagaagaagccgttagtgaagcgggagaagcccgaagagtttcagacacgagtacggcgaggctcgcagaagaaacacatatcccctgtgcaagccctgtcagagttcaaagcaatggacagcttctag

SEQ ID NO: 101810 - DNA, 3684 bp, Artificial Sequence
  derived and/or modified sequence
ggagcatgacttcggcaacttcacctatcattctgaaatgggaccccaaaagtttggaaatccggacgctaacagtggaaaggctgttggagccacttgttacacaggtgactacacttgtcaacacaagcaacaaaggcccatctggtaaaaagaaagggaggtcaaagaaagcccatgtactagctgcctctgtagagcaagccactcagaatttcctggaaaagggtgaacagatcgctaaggagagtcaagatctcaaagaagagttggtggctgctgtagaggatgtgcgcaaacaaggtgagacgatgcggatcgcctcctccgagtttgcagatgacccttgctcgtcggtaaagcgcggcaccatggtacgggcggcaagggctttgctctccgcggtgacacgcttactcatcctggcggacatggcagatgtcatgagacttttatcccatctgaaaattgtggaagaggccctggaagctgtcaaaaatgctacaaatgagcaagaccttgcaaaccgttttaaagagtttgggaaagagatggtgaaacttaactatgtagcagcaagaagacaacaggagctgaaggatcctcactgtcgggatgagatggcagccgcccgaggggctctgaagaagaatgccacaatgctgtacacggcctctcaagcatttctccgccacccagatgtcgccgctacgagagccaaccgagattatgtgttcaaacaagtccaggaggccatcgccggcatctccaatgctgctcaagctacctcgcccactgacgaagccaagggccacacgggcatcggcgagctggctgcggctcttaatgagtttgacaataagattatcctggaccccatgacgttcagcgaggccaggttccggccgtccctggaggagaggctggagagcatcatcagcggcgcagcgctgatggccgactcctcctgcacgcgagacgaccggcgcgagaggatcgtggcggagtgcaacgccgtgcggcaggcgctccaggacctgctcagcgagtacatgaataatactggaaggaaagaaaaaggagatcctctcaacattgcgattgataagatgactaagaaaacaagagatctaaggagacagcttcggaaagcagtgatggatcacatatctgactctttcctggaaaccaatgttcctttgctagttctcattgaggctgcaaagagcggaaatgaaaaggaagtgaaagaatatgcccaagttttccgtgagcatgccaacaaactggtagaggttgccaatttggcctgttccatctccaacaatgaagaaggggtgaaattagttcggatggcagccacccagattgacagcctgtgtccccaggtcatcaatgccgctctgacactggctgcccggccacagagcaaagttgctcaggataacatggacgtcttcaaagaccagtgggagaagcaggtccgagtgttgacagaggccgtggatgacatcacctcagtggatgacttcctctctgtctcagaaaatcacatcttggaggatgtgaacaagtgtgtgatagccctccaagagggcgatgtggacactctggaccggactgcaggggccatcaggggccgggcagctcgagtcatacacatcatcaatgctgagatggagaactatgaagctggggtttatactgagaaggtgttggaagctacaaaattgctttctgaaacagtgatgccacgcttcgctgaacaagtagaggttgccattgaagccctgagtgccaacgttcctcaaccgtttgaggagaatgagttcatcgatgcctctcgcctggtgtatgatggcgttcgggacatcagaaaggctgtgctgatgatcaggaccccagaagaactagaggatgattctgactttgagcaggaagattatgatgtgcgtagcaggacaagtgttcagactgaggatgaccagctcattgcagggcagagcgcacgggccatcatggcgcaactaccgcaggaggagaaggcaaaaatagctgagcaggtggagatattccatcaagagaaaagcaagctggatgcagaagtggccaaatgggacgacagcggcaatgatatcattgtactggccaagcagatgtgtatgatcatgatggaaatgacagacttcacaagaggcaaaggcccattgaaaaatacatctgatgtcattaatgctgccaagaaaattgccgaagcaggttctcgaatggacaaattagctcgtgctgtggctgatcagtgtcctgattcagcatgtaagcaggatttattagcctaccttcaacgaattgccttgtattgccatcagcttaatatctgcagcaaggtgaaggcagaagtgcagaatctgggaggagagctcattgtgtcagggacaggagttcagagcactttcactaccttttatgaggtagattgtgatgtcatagatgggggcagggctagtcaactttctacccacctcccaacctgtgctgagggagctccgatcgggagtggaagcagtgattcctccatgctggacagtgccacatcgcttatccaggcagctaaaaacctgatgaatgctgttgtcctcacggtgaaagcatcctatgtggcctcaaccaaataccagaaggtctatgggacagcagctgtcaactcacctgttgtgtcttggaagatgaaggctccagagaagaagccccttgtgaagagagaaaagcctgaagaattccagacacgagttcgacgaggttctcagaagaaacacatttcgcctgtacaggctttaagtgaattcaaagcaatggattccttctaggacgataggttttaacaagaaagctttttctttcttttctttctttctttttctttttaattccatttttgtatgcatacctgccagctcgtatgcctctggcatggggaaattaagggaacagtgtctgtttgcatgtaagatgagatgagatcaatactactgatccatctgtagcctgggaaggagacaggacattcctgtactaaggtggcacagagctgtcctttgcaacattctcataaaattgggcacagagttcgcattggcgcaatatttatgggagtgggagggatggggaaaataaacttaactctacaaaagcaaactctaatgcatgcaagaatcattaggttggcaggtatatgcataagtgaaaaatctggaagtgtaatggtagaacataaaacttgtattgcttctgtttcagtgcaaaaatgtactagccaatacgcttaagtgtgtggcccatgaattgaacaatttaaccttgaagtctatatccgtgatattatgtcgatttttaactgaggggaaattaactagtccagcctaaaatgcttcttttaatctgcattctgtttcctcttctagttgtgccattactagtgatcatgtttttttcccccctttaatgaaaacaataaacatctatttgagacaattaaaatccttctgggggcactggaagcacaatacggtgaccaatcttgctttcatttttttttctttttaatttgaaccatgattttgctagaaatagaaggcccagtggtggaatattagagggaaggaaactgacaacgtgtgaaagtta

SEQ ID NO: 101811 - DNA, 2862 bp, Artificial Sequence
  derived and/or modified sequence
atgaccagcgccaccagccccatcatcctgaagtgggaccccaagagcctggagatcagaaccctgaccgtggagagactgctggagcccctggtgacccaggtgaccaccctggtgaacaccagcaacaagggccccagcggcaagaagaagggcagaagcaagaaggcccacgtgctggccgccagcgtggagcaggccacccagaacttcctggagaagggcgagcagatcgccaaggagagccaggacctgaaggaggagctggtggccgccgtggaggacgtgagaaagcagggcgagaccatgagaatcgccagcagcgagttcgccgacgacccctgcagcagcgtgaagagaggcaccatggtgagagccgccagagccctgctgagcgccgtgaccagactgctgatcctggccgacatggccgacgtgatgagactgctgagccacctgaagatcgtggaggaggccctggaggccgtgaagaacgccaccaacgagcaggacctggccaacagattcaaggagttcggcaaggagatggtgaagctgaactacgtggccgccagaagacagcaggagctgaaggacccccactgcagagacgagatggccgccgccagaggcgccctgaagaagaacgccaccatgctgtacaccgccagccaggccttcctgagacaccccgacgtggccgccaccagagccaacagagactacgtgttcaagcaggtgcaggaggccatcgccggcatcagcaacgccgcccaggccaccagccccaccgacgaggccaagggccacaccggcatcggcgagctggccgccgccctgaacgagttcgacaacaagatcatcctggaccccatgaccttcagcgaggccagattcagacccagcctggaggagagactggagagcatcatcagcggcgccgccctgatggccgacagcagctgcaccagagacgacagaagagagagaatcgtggccgagtgcaacgccgtgagacaggccctgcaggacctgctgagcgagtacatgaacaacaccggcagaaaggagaagggcgaccccctgaacatcgccatcgacaagatgaccaagaagaccagagacctgagaagacagctgagaaaggccgtgatggaccacatcagcgacagcttcctggagaccaacgtgcccctgctggtgctgatcgaggccgccaagagcggcaacgagaaggaggtgaaggagtacgcccaggtgttcagagagcacgccaacaagctggtggaggtggccaacctggcctgcagcatcagcaacaacgaggagggcgtgaagctggtgagaatggccgccacccagatcgacagcctgtgcccccaggtgatcaacgccgccctgaccctggccgccagaccccagagcaaggtggcccaggacaacatggacgtgttcaaggaccagtgggagaagcaggtgagagtgctgaccgaggccgtggacgacatcaccagcgtggacgacttcctgagcgtgagcgagaaccacatcctggaggacgtgaacaagtgcgtgatcgccctgcaggagggcgacgtggacaccctggacagaaccgccggcgccatcagaggcagagccgccagagtgatccacatcatcaacgccgagatggagaactacgaggccggcgtgtacaccgagaaggtgctggaggccaccaagctgctgagcgagaccgtgatgcccagattcgccgagcaggtggaggtggccatcgaggccctgagcgccaacgtgccccagcccttcgaggagaacgagttcatcgacgccagcagactggtgtacgacggcgtgagagacatcagaaaggccgtgctgatgatcagaacccccgaggagctggaggacgacagcgacttcgagcaggaggactacgacgtgagaagcagaaccagcgtgcagaccgaggacgaccagctgatcgccggccagagcgccagagccatcatggcccagctgccccaggaggagaaggccaagatcgccgagcaggtggagatcttccaccaggagaagagcaagctggacgccgaggtggccaagtgggacgacagcggcaacgacatcatcgtgctggccaagcagatgtgcatgatcatgatggagatgaccgacttcaccagaggcaagggccccctgaagaacaccagcgacgtgatcaacgccgccaagaagatcgccgaggccggcagcagaatggacaagctggccagagccgtggccgaccagtgccccgacagcgcctgcaagcaggacctgctggcctacctgcagagaatcgccctgtactgccaccagctgaacatctgcagcaaggtgaaggccgaggtgcagaacctgggcggcgagctgatcgtgagcggcaccggcgtgcagagcaccttcaccaccttctacgaggtggactgcgacgtgatcgacggcggcagagccagccagctgagcacccacctgcccacctgcgccgagggcgcccccatcggcagcggcagcagcgacagcagcatgctggacagcgccaccagcctgatccaggccgccaagaacctgatgaacgccgtggtgctgaccgtgaaggccagctacgtggccagcaccaagtaccagaaggtgtacggcaccgccgccgtgaacagccccgtggtgagctggaagatgaaggcccccgagaagaagcccctggtgaagagagagaagcccgaggagttccagaccagagtgagaagaggcagccagaagaagcacatcagccccgtgcaggccctgagcgagttcaaggccatggacagcttctag

SEQ ID NO: 101812 - protein, 939 aa, Artificial Sequence
  derived and/or modified sequence
MSGLICLQYGLWHGQKIDFGGPRRLLQRNRGEGSMTSATSPIILKWDPKSLEIRTLTVERLLEPLVTQVTTLVNTSNKGPSGKKKGRSKKAHVLAASVEQATQNFLEKGEQIAKESQDLKEELVAAVEDVRKQGETMRIASSEFADDPCSSVKRGTMVRAARALLSAVTRLLILADMADVMRLLSHLKIVEEALEAVKNATNEQDLANRFKEFGKEMVKLNYVAARRQQELKDPHCRDEMAAARGALKKNATMLYTASQAFLRHPDVAATRANRDYVFKQVQEAIAGISNAAQATSPTDEAKGHTGIGELAAALNEFDNKIILDPMTFSEARFRPSLEERLESIISGAALMADSSCTRDDRRERIVAECNAVRQALQDLLSEYMNNTGRKEKGDPLNIAIDKMTKKTRDLRRQLRKAVMDHISDSFLETNVPLLVLIEAAKSGNEKEVKEYAQVFREHANKLVEVANLACSISNNEEGVKLVRMAATQIDSLCPQVINAALTLAARPQSKVAQDNMDVFKDQWEKQVRVLTEAVDDITSVDDFLSVSENHILEDVNKCVIALQEGDVDTLDRTAGAIRGRAARVIHIINAEMENYEAGVYTEKVLEATKLLSETVMPRFAEQVEVAIEALSANVPQPFEENEFIDASRLVYDGVRDIRKAVLMIRTPEELEDDSDFEQEDYDVRSRTSVQTEDDQLIAGQSARAIMAQLPQEEKAKIAEQVEIFHQEKSKLDAEVAKWDDSGNDIIVLAKQMCMIMMEMTDFTRGKGPLKNTSDVINAAKKIAEAGSRMDKLARAVADQCPDSACKQDLLAYLQRIALYCHQLNICSKVKAEVQNLGGELIVSGLDSATSLIQAAKNLMNAVVLTVKASYVASTKYQKVYGTAAVNSPVVSWKMKAPEKKPLVKREKPEEFQTRVRRGSQKKHISPVQALSEFKAMDSF

SEQ ID NO: 101813 - DNA, 2820 bp, Artificial Sequence
  derived and/or modified sequence
atgagcggactcatatgcctgcagtacgggctgtggcacgggcagaaaatcgatttcgggggacctcgtagactcctgcaacgtaaccggggagagggctctatgactagcgctacgagtcctattatattgaaatgggaccctaagtcgctggagattaggacgcttacagtggaaaggctgctggagcccctggtcacacaggtgaccacgctggtgaacacttctaacaagggtccatccggcaaaaagaagggccggtcaaagaaggctcatgtgctggccgcgtcagtcgagcaagcaacccaaaacttcctcgagaagggcgagcagattgctaaagagtcacaggaccttaaggaggagcttgttgcagccgttgaggacgtgaggaaacaaggcgagaccatgagaattgcctcatctgaatttgccgatgatccttgctcaagcgtgaagcgcggcactatggtcagagccgctagggctttactgtccgccgtgacccggctcctaatcctcgctgacatggcagatgtcatgcgcctcctgagtcatctgaaaattgtggaggaggctctagaggctgtgaaaaatgctacaaatgagcaggacctggccaacagattcaaggagttcggtaaagagatggtaaagctaaactacgtcgccgccagaagacaacaggaactgaaagacccccactgtcgtgacgaaatggctgctgctagaggagcattgaaaaaaaatgccacaatgttgtacaccgcctcacaggcttttctccgccatcctgatgtggcagccacaagagcaaaccgggattacgtgttcaagcaagtccaggaggcgatcgctggcatcagcaacgccgctcaggcgacgtctcctacagacgaagccaaagggcataccggaatcggcgagttggccgcagccctgaatgaattcgataacaagataattctggatcctatgacgttttccgaggccagattccgccccagcctggaggagcgtctggagtccattatcagcggtgctgctctgatggcagacagttcctgtacccgggatgacagacgcgaacgcatcgtagcagaatgtaacgcggtcaggcaggcgctccaggatttgctatctgaatatatgaataacaccgggcgcaaagagaaaggcgatcccttgaacatagctatcgataagatgacaaagaaaacacgcgacctgcgacgtcagctgcgcaaagcggtcatggatcacataagcgacagctttttggaaacaaatgtgccgttactcgtgctgatcgaggccgcaaaaagcggcaacgaaaaggaggtgaaggaatatgcacaggtgtttagggaacacgcgaataagcttgtcgaagtggcgaacctcgcctgtagcatctctaacaatgaggaaggcgtgaaactggtgaggatggccgccactcagattgactctttgtgtccacaggtgattaacgccgctttgacactagcagcccggccacagagcaaagttgcccaggataatatggatgtctttaaggaccagtgggagaagcaggtgagagtgctgaccgaggcggtcgacgatatcacctccgtggatgactttttgagtgtaagcgagaaccacattctggaagacgtaaataagtgtgtcatagccctccaggagggcgatgtggacactttggaccggaccgccggtgcaattcgcggtcgagcagcccgggtgatccacatcatcaacgccgaaatggaaaattatgaagctggcgtttataccgagaaggtgttagaagctaccaagttgctgagcgagactgtgatgccacggtttgctgaacaggtggaagtcgctatcgaggctctgagtgccaacgtgccccagccctttgaagagaatgaatttatcgatgcctcaaggctggtctacgacggtgtccgcgatatccggaaagccgtacttatgattcggacgccggaggagctggaggacgacagcgacttcgaacaggaggactacgatgtgcgttctcgtacctctgtacagactgaagatgaccagctaattgctggtcagagtgcgcgcgccattatggctcaactgcctcaggaagagaaggctaaaattgccgaacaggttgagattttccaccaggaaaagagcaaattggacgccgaggtggccaagtgggacgatagtggcaacgacattatcgttctcgccaagcagatgtgcatgattatgatggagatgaccgatttcactaggggtaaaggtccactgaagaatacatctgacgtgatcaatgcagcaaagaagattgccgaggcaggttcccggatggacaagctcgccagagccgttgcagaccaatgtcctgattctgcgtgcaagcaggatctcttagcatacttgcaacggatcgccttatactgtcaccagttgaatatatgttccaaagtcaaggccgaggttcagaatctcggaggagagctcattgtaagcgggcttgacagtgccacttcgctgatccaggccgctaagaacttaatgaacgcggtggtgctaaccgtcaaagcgtcatacgtggcctccacaaagtaccaaaaggtgtacggtacagcagccgtgaatagtcctgtggtgtcatggaaaatgaaagccccagagaagaaacccctggtaaaacgggaaaaaccagaggaattccagacacgagtacggcgaggatcccaaaaaaaacatatctctcctgtccaggcactctctgagttcaaagccatggactcattctag

SEQ ID NO: 101814 - DNA, 2820 bp, Artificial Sequence
  derived and/or modified sequence
atgagcggcctcatctgcctgcagtatggcctgtggcacggccagaagattgactttggaggcccccggcggctgctgcagaggaacagaggagagggctccatgaccagcgccaccagccccatcatcctgaagtgggaccccaagagcctggagatccgcaccctgactgtggagcggctgctggagcccctggtgacccaggtgaccaccctggtgaacaccagcaacaagggccccagcggcaagaagaagggccgcagcaagaaggcccacgtgctggccgcctctgtggagcaggccacccagaacttcctggagaagggggagcagatcgccaaggagagccaggacctgaaggaggagctggtggccgctgtggaggatgtgaggaagcagggcgagaccatgagaattgccagcagcgagtttgctgatgacccctgcagctctgtgaagaggggcaccatggtgcgggccgcccgggccctgctgtctgctgtgacccggctgctgatcctggccgacatggctgatgtgatgaggctgctgagccacctgaagatcgtggaggaggccctggaggccgtgaagaatgccaccaatgagcaggacctggccaaccgcttcaaggagtttgggaaggagatggtgaagctgaactacgtggccgcccggcggcagcaggagctgaaggacccccactgcagagatgagatggccgccgcccggggggccctgaagaagaatgccaccatgctgtacacagccagccaggccttcctgcggcacccagatgtggccgccacccgggccaacagagattatgtgttcaagcaggtgcaggaggccatcgccggcatcagcaatgctgcccaggccaccagccccacagatgaggccaagggccacactggaattggagagctggccgccgccctgaatgaatttgacaacaagatcatcctggaccccatgaccttcagcgaggcccgcttccggcccagcctggaggagcggctggagagcatcatcagcggggccgccctgatggctgacagcagctgcaccagagatgacagaagagaaagaattgtggccgagtgcaatgctgtgcggcaggccctgcaggacctgctgtctgagtacatgaacaacacaggcaggaaggagaagggggaccccctgaacatcgccatcgacaagatgaccaagaagacccgggacctgcggcggcagctgaggaaggctgtgatggaccacatcagtgacagcttcctggagaccaacgtgcccctgctggtgctgattgaagctgccaagtctggaaatgagaaggaggtgaaggagtatgcccaggtgttccgggagcacgccaacaagctggtggaggtggccaacctggcctgcagcatcagcaacaatgaggagggcgtgaagctggtgaggatggccgccacccagattgacagcctgtgcccccaggtgatcaatgctgccctgaccctggccgcccggccccagagcaaggtggcccaggacaacatggatgtgttcaaggaccagtgggagaagcaggtgcgggtgctgacagaagctgtggatgacatcacctctgtggatgacttcctgtctgtgtctgagaaccacatcctggaggatgtgaacaagtgtgtgattgccctgcaggagggagatgtggacaccctggacagaacagctggggccatccggggccgggccgcccgggtcatccacatcatcaatgctgagatggagaactatgaagctggggtgtacacagagaaggtgctggaggccaccaagctgctgtctgagaccgtgatgcccaggtttgctgagcaggtggaggtggccatcgaggccctgagcgccaacgtgccccagccctttgaggagaatgagttcattgatgccagccggctggtgtatgatggagtgcgggacatcaggaaggctgtgctgatgatccgcaccccagaggagctggaggatgacagcgactttgagcaggaggactatgatgtgcgcagcaggacctctgtgcagacagaagatgaccagctgattgctggccagagcgcccgggccatcatggcccagctgccccaggaggagaaggccaagattgctgagcaggtggagatcttccaccaggagaagagcaagctggatgctgaggtggccaagtgggatgattctggaaatgacatcatcgtgctggccaagcagatgtgcatgatcatgatggagatgacagacttcacccggggcaagggccccctgaagaacaccagtgatgtgatcaatgctgccaagaagattgctgaggccggcagcaggatggacaagctggcccgggctgtggccgaccagtgcccagattctgcctgcaagcaggacctgctggcctacctgcagagaattgccctgtactgccaccagctgaacatctgcagcaaggtgaaggccgaggtgcagaacctgggcggggagctgattgtgtctggcctggacagcgccaccagcctcatccaggccgccaagaacctgatgaatgctgtggtgctgactgtgaaggccagctatgtggccagcaccaagtaccagaaggtgtatggaacagctgctgtgaacagccctgtggtgtcctggaagatgaaggcccctgagaagaagcccctggtgaagcgggagaagccagaggagttccagaccagggtgcggcggggcagccagaagaagcacatcagccctgtgcaggccctgtctgagttcaaggccatggacagcttctag

SEQ ID NO: 101815 - DNA, 2820 bp, Artificial Sequence
  derived and/or modified sequence
atgagcggcctgatctgcctgcagtacggcctgtggcacggccagaagattgatttcggggggccaagacgcctgctgcagaggaacagaggtgaagggtctatgacaagtgccacttcaccaattatcctgaagtgggatcctaagagcctggaaattcggaccctgactgtggagcgattactggagcctctggttactcaggtaacaaccctggtgaacacatcgaataagggcccttctggtaagaaaaagggaaggtctaaaaaggcgcacgttctggctgctagtgtagaacaggccacccagaatttcttggaaaaaggggaacaaattgctaaagagtcccaggaccttaaagaggagctggtagcagccgtcgaagatgtccggaagcagggggagactatgagaatcgccagctctgaattcgcagacgacccgtgttcaagtgtcaaaaggggtaccatggtgcgtgctgcacgtgcactgctgtctgcagtcaccagattattgatactggctgacatggccgatgtaatgcgcctgctcagccatctgaaaattgtggaggaagctctagaagcagtgaagaatgccactaatgaacaggatcttgctaatcggttcaaggagttcgggaaagagatggtgaaactaaactacgtcgcagcccgccgccagcaggaattaaaggaccctcattgcagggacgagatggctgccgcgaggggagccctgaaaaagaacgccaccatgctgtatacagcaagccaggcgttcctgcgtcacccagacgtggcggccacacgggctaaccgggattatgtgttcaaacaggtgcaagaggcaatagccgggatctccaatgccgcacaggcgacaagtccaactgacgaggccaaggggcatacagggatcggagagctggccgccgccttgaatgagtttgataacaagatcattctggacccaatgacctttagcgaggcaagattcaggccgtcgctcgaggagcgcctggaaagtattatttcaggggcagcactgatggccgacagctcttgtacgcgggatgataggcgcgaacgcattgtagccgagtgcaatgccgttcggcaagcccttcaagatctgctgagcgaatatatgaataacaccggacgaaaggagaagggtgatcccctgaacatagctatcgacaagatgaccaaaaagacacgcgacctgcgaagacagctgaggaaggccgttatggatcacattagcgattcattcttagaaacgaatgtccctttgcttgtgctcatcgaggctgcgaagtccggcaatgaaaaagaggtgaaggagtacgcccaagttttccgcgagcacgctaacaagttggtggaggtagccaacttggcatgtagcattagcaacaacgaggagggcgtgaaactggttaggatggctgctacacagatagattccctgtgcccccaggtgattaatgctgctctgaccctggcagcacgtccgcagtcaaaggtcgcacaggacaacatggatgtgttcaaagatcagtgggagaaacaagttcgggtccttaccgaggccgtcgacgatattacatccgttgacgactttctgagtgtgtccgaaaaccatattcttgaggatgtaaataaatgcgtcattgcattgcaagagggagatgtcgacactctcgaccggacagcgggtgccatacgcggcagggccgcccgggtgatccacatcattaatgccgaaatggaaaactatgaggccggtgtgtataccgagaaggttcttgaggccacgaaactattaagcgagacggtaatgcctcgattcgctgagcaggttgaagtggcaatcgaggcactgtccgccaatgtcccacagccctttgaggaaaacgaattcatcgatgctagccgcctagtgtatgacggggtcagggatatccgcaaggccgttctcatgattcgaaccccagaggaactcgaggatgacagcgattttgagcaggaagactatgatgtgagaagccggactagcgtacagacggaggatgaccagctgatagctggacaaagtgcacgcgccatcatggcacagctgccccaagaagagaaagccaagatcgccgaacaggtggagatttttcatcaagaaaagagtaagctcgatgccgaagtcgccaagtgggatgattctggtaacgacatcatcgtgcttgctaaacagatgtgtatgattatgatggagatgacagacttcacaaggggaaaggggccacttaagaacacaagcgacgttatcaacgccgccaaaaagatcgcagaggccggaagcagaatggacaagctggcccgagcggtcgcagaccaatgccccgacagcgcgtgcaagcaggacctattggcgtatctccagcggatagcactctattgtcaccaactgaacatctgtagcaaagtaaaggcagaagtccagaatctggggggtgaattaattgtgagcggactggactccgctacatctcttatccaggccgccaagaatctgatgaacgctgtagttctgactgtcaaagccagctacgtggcctccactaagtaccaaaaggtctatggcactgcagcggtaaactcacctgttgtatcctggaaaatgaaagcccccgaaaagaagcccctggtgaagcgggaaaagccagaggagtttcaaactcgggttcgccgcgggtcacagaagaagcatatcagccctgttcaggccctatccgagttcaaggccatggattctttctag

SEQ ID NO: 101816 - DNA, 2820 bp, Artificial Sequence
  derived and/or modified sequence
atgagcgggctgatttgtctacagtacggactgtggcatggccagaagatcgactttggaggccctagaaggctgctgcagcggaatcgtggcgaaggctcaatgaccagcgccacctcaccaattatcctgaagtgggacccaaagtcacttgaaataagaacacttactgtggaaaggttgctggagcctctagtcacccaagttacaacactcgttaatactagcaacaaaggacctagtggcaaaaagaaaggacggagcaagaaagctcatgtgctggccgcttctgtcgaacaggctacgcagaattttctggaaaaaggagagcaaatcgctaaggaaagtcaagatctgaaggaggagctggtggcagccgtagaggatgttcgcaagcagggcgagacgatgaggatagcctctagcgagtttgccgatgatccatgcagttctgtgaaaagggggacaatggtcagggcggctagggccctactgtccgctgtgacccgcttgcttatcctcgctgatatggccgatgttatgcggttgctctcccacctcaagatcgtagaggaggccctcgaagccgtgaagaacgcaactaacgagcaggatctagcgaatcggttcaaggaattcgggaaggagatggtgaaactgaactacgtcgccgcacggcgacaacaggaactcaaggatcctcactgccgtgacgaaatggccgcagctcggggtgctttaaaaaagaacgctactatgctttatactgcttcccaggcattcctgcgacacccagatgtggcggctacacgagctaatagagactacgtttttaagcaggtccaggaagccatcgctggcatatcaaacgcagcacaggcaacaagtccgacagatgaggccaagggccacaccggcattggggagctagccgctgctctaaatgaattcgataacaaaattattcttgatccaatgacattctcagaggccagattccgtccatcacttgaggaaagactcgagagtattattagcggtgccgctctcatggccgactcgagttgcactcgagatgacaggagggaacgcattgtggccgaatgtaacgccgtgcgacaggcccttcaggacctcctttccgagtacatgaacaatacaggccgaaaagagaagggcgatcccctgaatatcgctattgacaagatgaccaaaaaaactcgggacttgagacgtcagctccgaaaagcagtcatggatcacatttccgattcattcctggaaacaaacgttcccctcttagtgctcatcgaggctgccaaaagcggcaacgagaaagaagtgaaggaatacgcacaggtgtttcgtgagcatgcaaacaagttggttgaagtagccaacctggcttgctcaatctccaacaacgaagaaggcgttaagctggtgcggatggccgctactcagattgacagcttgtgcccccaggtaattaatgcagcactcaccttagccgcacggcctcaaagcaaggttgcccaggataatatggacgttttcaaagaccaatgggaaaagcaagtcagggtccttacggaggcggtggacgatataaccagtgtggatgactttctgtctgtatccgaaaatcatatccttgaagacgtgaataaatgcgtgatcgcccttcaagaaggcgacgtggataccctcgaccggactgctggggctatccgcggacgagccgcacgcgttatccatataatcaatgcagagatggagaactacgaggcgggagtatacactgagaaagtgctcgaggctactaagcttcttagtgaaacagtcatgccgaggttcgctgagcaggtcgaggtcgctatcgaggctctgtctgccaatgtgccacagccttttgaggaaaatgagtttattgatgcttccaggctggtgtacgatggagtacgggatattcgtaaggccgtgctcatgattcgaactccagaagaactcgaggacgactccgactttgaacaggaagactatgatgtccggtcaagaacaagcgtacagaccgaggacgatcaactgatagctggccaaagcgctagggcaattatggcacaactcccacaggaagagaaggccaagattgccgaacaggtcgagatctttcatcaggagaagtctaaactggacgcagaagttgcgaagtgggacgactcaggaaatgacattattgtattagcaaagcagatgtgcatgattatgatggaaatgaccgacttcacaagggggaaaggtccactgaagaatacaagcgatgtaattaatgccgctaaaaaaatcgccgaggcgggatctagaatggataagttagcccgagccgtggcagatcagtgtcccgattctgcttgtaaacaggacctgctcgcgtacctccagcgcattgccttgtactgccaccagctgaacatctgttccaaagtcaaagctgaggtgcagaatctcggcggtgagctaatcgtgtccggattggacagtgcgacttctctaatccaggctgccaaaaacctcatgaacgccgtcgtgctgaccgtgaaggcgtcttatgtggcttcaaccaagtaccaaaaggtgtatgggaccgctgctgtaaactcacccgtcgtgagctggaagatgaaggcgccagagaaaaaacctctggtgaagcgcgaaaagccggaagagttccagacacgggtccgacgtggaagccagaagaagcacatctcccccgtccaggccctcagtgagtttaaggccatggactcgttttag

SEQ ID NO: 101817 - DNA, 2820 bp, Artificial Sequence
  derived and/or modified sequence
atgtctgggttgatctgccttcaatatgggctgtggcatgggcagaagattgattttgggggccccaggagactgcttcaaagaaatagaggtgaagggagcatgacttcggcaacttcacctatcattctgaaatgggaccccaaaagtttggaaatccggacgctaacagtggaaaggctgttggagccacttgttacacaggtgactacacttgtcaacacaagcaacaaaggcccatctggtaaaaagaaagggaggtcaaagaaagcccatgtactagctgcctctgtagagcaagccactcagaatttcctggaaaagggtgaacagatcgctaaggagagtcaagatctcaaagaagagttggtggctgctgtagaggatgtgcgcaaacaaggtgagacgatgcggatcgcctcctccgagtttgcagatgacccttgctcgtcggtaaagcgcggcaccatggtacgggcggcaagggctttgctctccgcggtgacacgcttactcatcctggcggacatggcagatgtcatgagacttttatcccatctgaaaattgtggaagaggccctggaagctgtcaaaaatgctacaaatgagcaagaccttgcaaaccgttttaaagagtttgggaaagagatggtgaaacttaactatgtagcagcaagaagacaacaggagctgaaggatcctcactgtcgggatgagatggcagccgcccgaggggctctgaagaagaatgccacaatgctgtacacggcctctcaagcatttctccgccacccagatgtcgccgctacgagagccaaccgagattatgtgttcaaacaagtccaggaggccatcgccggcatctccaatgctgctcaagctacctcgcccactgacgaagccaagggccacacgggcatcggcgagctggctgcggctcttaatgagtttgacaataagattatcctggaccccatgacgttcagcgaggccaggttccggccgtccctggaggagaggctggagagcatcatcagcggcgcagcgctgatggccgactcctcctgcacgcgagacgaccggcgcgagaggatcgtggcggagtgcaacgccgtgcggcaggcgctccaggacctgctcagcgagtacatgaataatactggaaggaaagaaaaaggagatcctctcaacattgcgattgataagatgactaagaaaacaagagatctaaggagacagcttcggaaagcagtgatggatcacatatctgactctttcctggaaaccaatgttcctttgctagttctcattgaggctgcaaagagcggaaatgaaaaggaagtgaaagaatatgcccaagttttccgtgagcatgccaacaaactggtagaggttgccaatttggcctgttccatctccaacaatgaagaaggggtgaaattagttcggatggcagccacccagattgacagcctgtgtccccaggtcatcaatgccgctctgacactggctgcccggccacagagcaaagttgctcaggataacatggacgtcttcaaagaccagtgggagaagcaggtccgagtgttgacagaggccgtggatgacatcacctcagtggatgacttcctctctgtctcagaaaatcacatcttggaggatgtgaacaagtgtgtgatagccctccaagagggcgatgtggacactctggaccggactgcaggggccatcaggggccgggcagctcgagtcatacacatcatcaatgctgagatggagaactatgaagctggggtttatactgagaaggtgttggaagctacaaaattgctttctgaaacagtgatgccacgcttcgctgaacaagtagaggttgccattgaagccctgagtgccaacgttcctcaaccgtttgaggagaatgagttcatcgatgcctctcgcctggtgtatgatggcgttcgggacatcagaaaggctgtgctgatgatcaggaccccagaagaactagaggatgattctgactttgagcaggaagattatgatgtgcgtagcaggacaagtgttcagactgaggatgaccagctcattgcagggcagagcgcacgggccatcatggcgcaactaccgcaggaggagaaggcaaaaatagctgagcaggtggagatattccatcaagagaaaagcaagctggatgcagaagtggccaaatgggacgacagcggcaatgatatcattgtactggccaagcagatgtgtatgatcatgatggaaatgacagacttcacaagaggcaaaggcccattgaaaaatacatctgatgtcattaatgctgccaagaaaattgccgaagcaggttctcgaatggacaaattagctcgtgctgtggctgatcagtgtcctgattcagcatgtaagcaggatttattagcctaccttcaacgaattgccttgtattgccatcagcttaatatctgcagcaaggtgaaggcagaagtgcagaatctgggaggagagctcattgtgtcagggctggacagtgccacatcgcttatccaggcagctaaaaacctgatgaatgctgttgtcctcacggtgaaagcatcctatgtggcctcaaccaaataccagaaggtctatgggacagcagctgtcaactcacctgttgtgtcttggaagatgaaggctccagagaagaagccccttgtgaagagagaaaagcctgaagaattccagacacgagttcgacgaggttctcagaagaaacacatttcgcctgtacaggctttaagtgaattcaaagcaatggattccttctag

SEQ ID NO: 101818 - DNA, 541 bp, Artificial Sequence
  derived and/or modified sequence
tttttacatggcgggacagccatgcctcagaatgtttagcatatttatcatctcagaagggtccaacagtatttagtgtgaatgagacactgttcagattggaaatacactgtctatactgtactccagacacacctattttgcttttaaaattattctcaatatctgtcttttccatagtaacggagcatgacttcggcaacttcacctatcattctgaaatgggaccccaaaagtttggaaatccggacgctaacagtggaaaggctgttggagccacttgttacacaggtgactacacttgtcaacacaagcaacaaaggcccatctggtaaaaagaaagggaggtcaaagaaagcccatgtactagctgcctctgtagagcaagccactcagaatttcctggaaaagggtgaacagatcgctaaggagagtcaagatctcaaagaagagttggtggctgctgtagaggatgtgcgcaaacaaggtgagacgatgcggatcgcctcctccgagtttgcagatgacccttgctcgtcgg

SEQ ID NO: 101819 - DNA, 521 bp, Artificial Sequence
  derived and/or modified sequence
gacccaggcgggcgggcagagcaggcggcaccgcacctcggccagaggcggctgcagcagctgctgcccttgtccctgccgccgcctctccagtcccttctgtgattaccactccagctgctgggaacgggcgagaaagaggaggaggcgagaaactcccaccgacccacagagctagtcaaaggaagcgtttcattccacctatctttggtcagaggagagggaggagtgtagaccagcattctacccactgacgacaggtcatctgtctctattattgaagaaccattgcagagcctatgctcaccttctgcgagggagcatgacttcggcaacttcacctatcattctgaaatgggaccccaaaagtttggaaatccggacgctaacagtggaaaggctgttggagccacttgttacacaggtgactacacttgtcaacacaagcaacaaaggcccatctggtaaaaagaaagggaggtcaaagaaagcccatgtactagctgcctctgtagagcaag

SEQ ID NO: 101820 - DNA, 4349 bp, Artificial Sequence
  derived and/or modified sequence
gctgaaggaagctacaatcatccaagtgggaagtaatgtctaccgatgttctgatttaagtgaatgaaggtcttctttccacctcgggaaatcttgagggttatgtaacagcagctttgaaaggcttgtgagatgtactttgtgctagtccatctcaaatcttcaccggctgtaccaagaacagaaaaaaaaaggaatttgagacgggatctcagcatgtttgccaggatggtctcagtctcttgacctcgtgatccgcctaccttggcctcccaaagtgttggaattacaggtgtgagccactgcgcccagccatcagaacaaaatatacagctggatgtttgtcacaattctaatgtccctgcaaagatgagatgcatgaatcacacagcaatctcatcaaaaagataagaaaattgagactcagagcatttaagcagccagcctggagtcacagagatttaagtctcagagccagcactcaggatgagtgccaatggaagcctgtccttggagtccagaatgaacgtcagaagcaacccagccacagcaggagactgtccatgaatgtcatctggctgaacctaaagcacctctggatttagatgcactccttcaaggaccatgggttctgcaacagtaccccctctccattgttccagctctgactcagatgggccctccttgatggcactcccagcagcacagccttagcactgggagcatgacttcggcaacttcacctatcattctgaaatgggaccccaaaagtttggaaatccggacgctaacagtggaaaggctgttggagccacttgttacacaggtgactacacttgtcaacacaagcaacaaaggcccatctggtaaaaagaaagggaggtcaaagaaagcccatgtactagctgcctctgtagagcaagccactcagaatttcctggaaaagggtgaacagatcgctaaggagagtcaagatctcaaagaagagttggtggctgctgtagaggatgtgcgcaaacaaggtgagacgatgcggatcgcctcctccgagtttgcagatgacccttgctcgtcggtaaagcgcggcaccatggtacgggcggcaagggctttgctctccgcggtgacacgcttactcatcctggcggacatggcagatgtcatgagacttttatcccatctgaaaattgtggaagaggccctggaagctgtcaaaaatgctacaaatgagcaagaccttgcaaaccgttttaaagagtttgggaaagagatggtgaaacttaactatgtagcagcaagaagacaacaggagctgaaggatcctcactgtcgggatgagatggcagccgcccgaggggctctgaagaagaatgccacaatgctgtacacggcctctcaagcatttctccgccacccagatgtcgccgctacgagagccaaccgagattatgtgttcaaacaagtccaggaggccatcgccggcatctccaatgctgctcaagctacctcgcccactgacgaagccaagggccacacgggcatcggcgagctggctgcggctcttaatgagtttgacaataagattatcctggaccccatgacgttcagcgaggccaggttccggccgtccctggaggagaggctggagagcatcatcagcggcgcagcgctgatggccgactcctcctgcacgcgagacgaccggcgcgagaggatcgtggcggagtgcaacgccgtgcggcaggcgctccaggacctgctcagcgagtacatgaataatactggaaggaaagaaaaaggagatcctctcaacattgcgattgataagatgactaagaaaacaagagatctaaggagacagcttcggaaagcagtgatggatcacatatctgactctttcctggaaaccaatgttcctttgctagttctcattgaggctgcaaagagcggaaatgaaaaggaagtgaaagaatatgcccaagttttccgtgagcatgccaacaaactggtagaggttgccaatttggcctgttccatctccaacaatgaagaaggggtgaaattagttcggatggcagccacccagattgacagcctgtgtccccaggtcatcaatgccgctctgacactggctgcccggccacagagcaaagttgctcaggataacatggacgtcttcaaagaccagtgggagaagcaggtccgagtgttgacagaggccgtggatgacatcacctcagtggatgacttcctctctgtctcagaaaatcacatcttggaggatgtgaacaagtgtgtgatagccctccaagagggcgatgtggacactctggaccggactgcaggggccatcaggggccgggcagctcgagtcatacacatcatcaatgctgagatggagaactatgaagctggggtttatactgagaaggtgttggaagctacaaaattgctttctgaaacagtgatgccacgcttcgctgaacaagtagaggttgccattgaagccctgagtgccaacgttcctcaaccgtttgaggagaatgagttcatcgatgcctctcgcctggtgtatgatggcgttcgggacatcagaaaggctgtgctgatgatcaggaccccagaagaactagaggatgattctgactttgagcaggaagattatgatgtgcgtagcaggacaagtgttcagactgaggatgaccagctcattgcagggcagagcgcacgggccatcatggcgcaactaccgcaggaggagaaggcaaaaatagctgagcaggtggagatattccatcaagagaaaagcaagctggatgcagaagtggccaaatgggacgacagcggcaatgatatcattgtactggccaagcagatgtgtatgatcatgatggaaatgacagacttcacaagaggcaaaggcccattgaaaaatacatctgatgtcattaatgctgccaagaaaattgccgaagcaggttctcgaatggacaaattagctcgtgctgtggctgatcagtgtcctgattcagcatgtaagcaggatttattagcctaccttcaacgaattgccttgtattgccatcagcttaatatctgcagcaaggtgaaggcagaagtgcagaatctgggaggagagctcattgtgtcagggctggacagtgccacatcgcttatccaggcagctaaaaacctgatgaatgctgttgtcctcacggtgaaagcatcctatgtggcctcaaccaaataccagaaggtctatgggacagcagctgtcaactcacctgttgtgtcttggaagatgaaggctccagagaagaagccccttgtgaagagagaaaagcctgaagaattccagacacgagttcgacgaggttctcagaagaaacacatttcgcctgtacaggctttaagtgaattcaaagcaatggattccttctaggacgataggttttaacaagaaagctttttctttcttttctttctttctttttctttttaattccatttttgtatgcatacctgccagctcgtatgcctctggcatggggaaattaagggaacagtgtctgtttgcatgtaagatgagatgagatcaatactactgatccatctgtagcctgggaaggagacaggacattcctgtactaaggtggcacagagctgtcctttgcaacattctcataaaattgggcacagagttcgcattggcgcaatatttatgggagtgggagggatggggaaaataaacttaactctacaaaagcaaactctaatgcatgcaagaatcattaggttggcaggtatatgcataagtgaaaaatctggaagtgtaatggtagaacataaaacttgtattgcttctgtttcagtgcaaaaatgtactagccaatacgcttaagtgtgtggcccatgaattgaacaatttaaccttgaagtctatatccgtgatattatgtcgatttttaactgaggggaaattaactagtccagcctaaaatgcttcttttaatctgcattctgtttcctcttctagttgtgccattactagtgatcatgtttttttcccccctttaatgaaaacaataaacatctatttgagacaattaaaatccttctgggggcactggaagcacaatacggtgaccaatcttgctttcatttttttttctttttaatttgaaccatgattttgctagaaatagaaggcccagtggtggaatattagagggaaggaaactgacaacgtgtgaaagttagaggcaaatacataggtgtagcttggagtgctggtatctaatataccattgtattcactaactaactcaaaataaacacatttaatcttg

SEQ ID NO: 101821 - DNA, 3839 bp, Artificial Sequence
  derived and/or modified sequence
gagcggcttcgcttccagccccgagtgaggcggagacccaggcgggcgggcagagcaggcggcaccgcacctcggccagaggcggctgcagcagctgctgcccttgtccctgccgccgcctctccagtcccttctgtgattaccactccagctgctgggaacgggcgagaaagaggaggaggcgagaaactcccaccgacccacagagggagcatgacttcggcaacttcacctatcattctgaaatgggaccccaaaagtttggaaatccggacgctaacagtggaaaggctgttggagccacttgttacacaggtgactacacttgtcaacacaagcaacaaaggcccatctggtaaaaagaaagggaggtcaaagaaagcccatgtactagctgcctctgtagagcaagccactcagaatttcctggaaaagggtgaacagatcgctaaggagagtcaagatctcaaagaagagttggtggctgctgtagaggatgtgcgcaaacaaggtgagacgatgcggatcgcctcctccgagtttgcagatgacccttgctcgtcggtaaagcgcggcaccatggtacgggcggcaagggctttgctctccgcggtgacacgcttactcatcctggcggacatggcagatgtcatgagacttttatcccatctgaaaattgtggaagaggccctggaagctgtcaaaaatgctacaaatgagcaagaccttgcaaaccgttttaaagagtttgggaaagagatggtgaaacttaactatgtagcagcaagaagacaacaggagctgaaggatcctcactgtcgggatgagatggcagccgcccgaggggctctgaagaagaatgccacaatgctgtacacggcctctcaagcatttctccgccacccagatgtcgccgctacgagagccaaccgagattatgtgttcaaacaagtccaggaggccatcgccggcatctccaatgctgctcaagctacctcgcccactgacgaagccaagggccacacgggcatcggcgagctggctgcggctcttaatgagtttgacaataagattatcctggaccccatgacgttcagcgaggccaggttccggccgtccctggaggagaggctggagagcatcatcagcggcgcagcgctgatggccgactcctcctgcacgcgagacgaccggcgcgagaggatcgtggcggagtgcaacgccgtgcggcaggcgctccaggacctgctcagcgagtacatgaataatactggaaggaaagaaaaaggagatcctctcaacattgcgattgataagatgactaagaaaacaagagatctaaggagacagcttcggaaagcagtgatggatcacatatctgactctttcctggaaaccaatgttcctttgctagttctcattgaggctgcaaagagcggaaatgaaaaggaagtgaaagaatatgcccaagttttccgtgagcatgccaacaaactggtagaggttgccaatttggcctgttccatctccaacaatgaagaaggggtgaaattagttcggatggcagccacccagattgacagcctgtgtccccaggtcatcaatgccgctctgacactggctgcccggccacagagcaaagttgctcaggataacatggacgtcttcaaagaccagtgggagaagcaggtccgagtgttgacagaggccgtggatgacatcacctcagtggatgacttcctctctgtctcagaaaatcacatcttggaggatgtgaacaagtgtgtgatagccctccaagagggcgatgtggacactctggaccggactgcaggggccatcaggggccgggcagctcgagtcatacacatcatcaatgctgagatggagaactatgaagctggggtttatactgagaaggtgttggaagctacaaaattgctttctgaaacagtgatgccacgcttcgctgaacaagtagaggttgccattgaagccctgagtgccaacgttcctcaaccgtttgaggagaatgagttcatcgatgcctctcgcctggtgtatgatggcgttcgggacatcagaaaggctgtgctgatgatcaggaccccagaagaactagaggatgattctgactttgagcaggaagattatgatgtgcgtagcaggacaagtgttcagactgaggatgaccagctcattgcagggcagagcgcacgggccatcatggcgcaactaccgcaggaggagaaggcaaaaatagctgagcaggtggagatattccatcaagagaaaagcaagctggatgcagaagtggccaaatgggacgacagcggcaatgatatcattgtactggccaagcagatgtgtatgatcatgatggaaatgacagacttcacaagaggcaaaggcccattgaaaaatacatctgatgtcattaatgctgccaagaaaattgccgaagcaggttctcgaatggacaaattagctcgtgctgtggctgatcagtgtcctgattcagcatgtaagcaggatttattagcctaccttcaacgaattgccttgtattgccatcagcttaatatctgcagcaaggtgaaggcagaagtgcagaatctgggaggagagctcattgtgtcagggctggacagtgccacatcgcttatccaggcagctaaaaacctgatgaatgctgttgtcctcacggtgaaagcatcctatgtggcctcaaccaaataccagaaggtctatgggacagcagctgtcaactcacctgttgtgtcttggaagatgaaggctccagagaagaagccccttgtgaagagagaaaagcctgaagaattccagacacgagttcgacgaggttctcagaagaaacacatttcgcctgtacaggctttaagtgaattcaaagcaatggattccttctaggacgataggttttaacaagaaagctttttctttcttttctttctttctttttctttttaattccatttttgtatgcatacctgccagctcgtatgcctctggcatggggaaattaagggaacagtgtctgtttgcatgtaagatgagatgagatcaatactactgatccatctgtagcctgggaaggagacaggacattcctgtactaaggtggcacagagctgtcctttgcaacattctcataaaattgggcacagagttcgcattggcgcaatatttatgggagtgggagggatggggaaaataaacttaactctacaaaagcaaactctaatgcatgcaagaatcattaggttggcaggtatatgcataagtgaaaaatctggaagtgtaatggtagaacataaaacttgtattgcttctgtttcagtgcaaaaatgtactagccaatacgcttaagtgtgtggcccatgaattgaacaatttaaccttgaagtctatatccgtgatattatgtcgatttttaactgaggggaaattaactagtccagcctaaaatgcttcttttaatctgcattctgtttcctcttctagttgtgccattactagtgatcatgtttttttcccccctttaatgaaaacaataaacatctatttgagacaattaaaatccttctgggggcactggaagcacaatacggtgaccaatcttgctttcatttttttttctttttaatttgaaccatgattttgctagaaatagaaggcccagtggtggaatattagagggaaggaaactgacaacgtgtgaaagttagaggcaaatacataggtgtagcttggagtgctggtatctaatataccattgtattcactaactaactcaaaataaacacatttaatcttga

SEQ ID NO: 101822 - DNA, 2820 bp, Artificial Sequence
  derived and/or modified sequence
atgagcggcctgatctgcctgcagtacggcctgtggcacggccagaagatcgacttcggcggccccagaagactgctgcagagaaacagaggcgagggcagcatgaccagcgccaccagccccatcatcctgaagtgggaccccaagagcctggagatcagaaccctgaccgtggagagactgctggagcccctggtgacccaggtgaccaccctggtgaacaccagcaacaagggccccagcggcaagaagaagggcagaagcaagaaggcccacgtgctggccgccagcgtggagcaggccacccagaacttcctggagaagggcgagcagatcgccaaggagagccaggacctgaaggaggagctggtggccgccgtggaggacgtgagaaagcagggcgagaccatgagaatcgccagcagcgagttcgccgacgacccctgcagcagcgtgaagagaggcaccatggtgagagccgccagagccctgctgagcgccgtgaccagactgctgatcctggccgacatggccgacgtgatgagactgctgagccacctgaagatcgtggaggaggccctggaggccgtgaagaacgccaccaacgagcaggacctggccaacagattcaaggagttcggcaaggagatggtgaagctgaactacgtggccgccagaagacagcaggagctgaaggacccccactgcagagacgagatggccgccgccagaggcgccctgaagaagaacgccaccatgctgtacaccgccagccaggccttcctgagacaccccgacgtggccgccaccagagccaacagagactacgtgttcaagcaggtgcaggaggccatcgccggcatcagcaacgccgcccaggccaccagccccaccgacgaggccaagggccacaccggcatcggcgagctggccgccgccctgaacgagttcgacaacaagatcatcctggaccccatgaccttcagcgaggccagattcagacccagcctggaggagagactggagagcatcatcagcggcgccgccctgatggccgacagcagctgcaccagagacgacagaagagagagaatcgtggccgagtgcaacgccgtgagacaggccctgcaggacctgctgagcgagtacatgaacaacaccggcagaaaggagaagggcgaccccctgaacatcgccatcgacaagatgaccaagaagaccagagacctgagaagacagctgagaaaggccgtgatggaccacatcagcgacagcttcctggagaccaacgtgcccctgctggtgctgatcgaggccgccaagagcggcaacgagaaggaggtgaaggagtacgcccaggtgttcagagagcacgccaacaagctggtggaggtggccaacctggcctgcagcatcagcaacaacgaggagggcgtgaagctggtgagaatggccgccacccagatcgacagcctgtgcccccaggtgatcaacgccgccctgaccctggccgccagaccccagagcaaggtggcccaggacaacatggacgtgttcaaggaccagtgggagaagcaggtgagagtgctgaccgaggccgtggacgacatcaccagcgtggacgacttcctgagcgtgagcgagaaccacatcctggaggacgtgaacaagtgcgtgatcgccctgcaggagggcgacgtggacaccctggacagaaccgccggcgccatcagaggcagagccgccagagtgatccacatcatcaacgccgagatggagaactacgaggccggcgtgtacaccgagaaggtgctggaggccaccaagctgctgagcgagaccgtgatgcccagattcgccgagcaggtggaggtggccatcgaggccctgagcgccaacgtgccccagcccttcgaggagaacgagttcatcgacgccagcagactggtgtacgacggcgtgagagacatcagaaaggccgtgctgatgatcagaacccccgaggagctggaggacgacagcgacttcgagcaggaggactacgacgtgagaagcagaaccagcgtgcagaccgaggacgaccagctgatcgccggccagagcgccagagccatcatggcccagctgccccaggaggagaaggccaagatcgccgagcaggtggagatcttccaccaggagaagagcaagctggacgccgaggtggccaagtgggacgacagcggcaacgacatcatcgtgctggccaagcagatgtgcatgatcatgatggagatgaccgacttcaccagaggcaagggccccctgaagaacaccagcgacgtgatcaacgccgccaagaagatcgccgaggccggcagcagaatggacaagctggccagagccgtggccgaccagtgccccgacagcgcctgcaagcaggacctgctggcctacctgcagagaatcgccctgtactgccaccagctgaacatctgcagcaaggtgaaggccgaggtgcagaacctgggcggcgagctgatcgtgagcggcctggacagcgccaccagcctgatccaggccgccaagaacctgatgaacgccgtggtgctgaccgtgaaggccagctacgtggccagcaccaagtaccagaaggtgtacggcaccgccgccgtgaacagccccgtggtgagctggaagatgaaggcccccgagaagaagcccctggtgaagagagagaagcccgaggagttccagaccagagtgagaagaggcagccagaagaagcacatcagccccgtgcaggccctgagcgagttcaaggccatggacagcttctag

SEQ ID NO: 101823 - protein, 584 aa, Artificial Sequence
  derived and/or modified sequence
MDGWRRPLQSVGKVCEKNMKTSEMHTMSGAQTGRKEKGDPLNIAIDKMTKKTRDLRRQLRKAVMDHISDSFLETNVPLLVLIEAAKSGNEKEVKEYAQVFREHANKLVEVANLACSISNNEEGVKLVRMAATQIDSLCPQVINAALTLAARPQSKVAQDNMDVFKDQWEKQVRVLTEAVDDITSVDDFLSVSENHILEDVNKCVIALQEGDVDTLDRTAGAIRGRAARVIHIINAEMENYEAGVYTEKVLEATKLLSETVMPRFAEQVEVAIEALSANVPQPFEENEFIDASRLVYDGVRDIRKAVLMIRTPEELEDDSDFEQEDYDVRSRTSVQTEDDQLIAGQSARAIMAQLPQEEKAKIAEQVEIFHQEKSKLDAEVAKWDDSGNDIIVLAKQMCMIMMEMTDFTRGKGPLKNTSDVINAAKKIAEAGSRMDKLARAVADQCPDSACKQDLLAYLQRIALYCHQLNICSKVKAEVQNLGGELIVSGLDSATSLIQAAKNLMNAVVLTVKASYVASTKYQKVYGTAAVNSPVVSWKMKAPEKKPLVKREKPEEFQTRVRRGSQKKHISPVQALSEFKAMDSF

SEQ ID NO: 101824 - DNA, 1755 bp, Artificial Sequence
  derived and/or modified sequence
atggatggctggcgcaggccactccagtcagtcggcaaagtgtgcgaaaaaaacatgaagacgagtgagatgcacacaatgtctggagcacagacaggaagaaaagagaagggggacccactgaatatagctatcgacaagatgacaaagaagactagagacctgcgccgccagttgcgcaaagcagtcatggaccacatcagcgactcattcctcgagactaacgtgcctttactcgtgcttatagaggctgctaagtcaggtaacgagaaagaagtaaaggagtatgcccaagtgtttcgcgagcatgcgaacaagcttgtggaggtagcaaatctggcctgttctataagcaacaatgaggagggcgttaaactggtgcgaatggccgctacgcaaattgactccctctgtccacaggtcattaacgcagccctgacactagccgcccgcccacagtccaaggttgcacaggataacatggacgtgtttaaggatcagtgggagaaacaggttcgagtattaactgaggctgttgatgatattacatcagtggacgatttcctctccgtgagtgagaatcacatccttgaggatgtaaacaaatgcgtgattgctctccaagaaggcgacgtagatacgctggaccgaacggctggcgccataaggggcagggctgcccgtgtgattcatatcataaacgctgaaatggaaaactatgaagccggagtgtacactgagaaggttcttgaagccaccaagctgttaagcgaaactgtgatgcctagatttgcagaacaagtggaggttgcaatcgaggctctatcagccaatgtgccgcagccgtttgaggaaaacgaatttattgatgccagtcgcctcgtttatgacggggttcgcgacatccgcaaagcagtgctaatgatacgcactcccgaagaactcgaggatgatagcgacttcgaacaggaagactacgacgttcgctcccggaccagcgttcagacagaagatgaccagctcatcgccggccagtctgcgcgtgccattatggctcagctgcctcaggaagagaaagcaaaaatcgccgaacaggtcgagattttccaccaggagaagtcaaagttggatgccgaggtcgccaagtgggacgacagcgggaatgacatcatagttcttgctaagcagatgtgcatgattatgatggaaatgacagacttcacaagaggtaagggtccgctgaaaaatacctctgatgtgatcaatgcagccaagaagattgccgaggccgggagccgaatggacaagctcgctcgggctgtggccgatcagtgtcccgactcagcgtgtaagcaggatctgcttgcgtatttacagcgtatcgccttgtactgtcatcagttaaacatatgctcaaaggttaaagctgaggtccagaacctaggaggcgagctgattgtgtcgggacttgactccgccacaagtctgatacaggcagccaaaaacctgatgaacgccgttgtcctaaccgtgaaggcgtcctacgtcgctagcacaaaataccagaaggtatatggcacggccgcggtgaactccccagtggtgtcctggaaaatgaaagctcccgagaagaagcccctggtaaagagagaaaaaccagaagagtttcagacacgggtaagacgcgggagccagaagaaacacatctcgccagtgcaagcgctctccgaattcaaagctatggactcattttag

SEQ ID NO: 101825 - DNA, 1755 bp, Artificial Sequence
  derived and/or modified sequence
atggatggctggaggcggcccctgcagagcgtgggcaaggtgtgtgagaagaacatgaagaccagcgagatgcacaccatgtctggggcccagacaggcaggaaggagaagggggaccccctgaacatcgccatcgacaagatgaccaagaagacccgggacctgcggcggcagctgaggaaggctgtgatggaccacatcagtgacagcttcctggagaccaacgtgcccctgctggtgctgattgaggccgccaagtctggaaatgagaaggaggtgaaggagtatgcccaggtgttccgggagcacgccaacaagctggtggaggtggccaacctggcctgcagcatcagcaacaatgaggagggcgtgaagctggtgaggatggccgccacccagattgacagcctgtgcccccaggtgatcaatgctgccctgaccctggccgcccggccccagagcaaggtggcccaggacaacatggatgtgttcaaggaccagtgggagaagcaggtgcgggtgctgacagaggccgtggatgacatcacctctgtggatgacttcctgtctgtgtctgagaaccacatcctggaggatgtgaacaagtgtgtgattgccctgcaggagggagatgtggacaccctggacagaacagctggggccatccggggccgggccgcccgggtcatccacatcatcaatgctgagatggagaactatgaggccggcgtgtacacagagaaggtgctggaggccaccaagctgctgtctgaaacagtgatgcccaggtttgctgagcaggtggaggtggccatcgaggccctgagcgccaacgtgccccagccctttgaagaaaatgagttcattgatgccagccggctggtgtatgatggagtgcgggacatcaggaaggctgtgctgatgatccgcaccccagaggagctggaggatgacagcgactttgagcaggaggactatgatgtgcgcagcaggacctctgtgcagacagaagatgaccagctgattgctggccagagcgcccgggccatcatggcccagctgccccaggaggagaaggccaagattgctgagcaggtggagatcttccaccaggagaagagcaagctggatgctgaggtggccaagtgggatgacagcggaaatgacatcatcgtgctggccaagcagatgtgcatgatcatgatggagatgacagacttcacccggggcaagggccccctgaagaacaccagtgatgtgatcaatgctgccaagaagattgctgaggccggcagcaggatggacaagctggcccgggctgtggccgaccagtgcccagacagcgcctgcaagcaggacctgctggcctacctgcagagaattgccctgtactgccaccagctgaacatctgcagcaaggtgaaggccgaggtgcagaacctgggcggggagctgattgtgtctggcctggacagcgccaccagcctcatccaggccgccaagaacctgatgaatgctgtggtgctgactgtgaaggccagctatgtggccagcaccaagtaccagaaggtgtatggaacagctgctgtgaacagccctgtggtgtcctggaagatgaaggcccctgagaagaagcccctggtgaagcgggagaagccagaggagttccagaccagggtgagaagaggcagccagaagaagcacatcagccctgtgcaggccctgtctgagttcaaggccatggacagcttctag

SEQ ID NO: 101826 - DNA, 1755 bp, Artificial Sequence
  derived and/or modified sequence
atggacggctggcggcggcccctgcagagcgtgggcaaggtgtgcgaaaagaacatgaaaacctctgagatgcatacaatgagtggggcccaaacagggagaaaagaaaaaggagaccctctcaacatcgcaatagataaaatgacaaagaagactagggatttgcggcgccaactgcgtaaggctgttatggatcacattagcgatagctttcttgagactaacgttcctctactggtgctgatcgaagctgcaaagtcgggcaatgaaaaagaggtcaaggagtatgcccaggtgttccgagagcacgctaacaaactggtggaagtcgccaaccttgcctgttctatctcaaacaatgaggaaggcgttaaacttgtaagaatggccgctacccagatagatagcctctgccctcaggtcatcaatgctgcgctcaccctggcagcacgaccacagagtaaggtggctcaagataatatggatgtctttaaggaccagtgggaaaagcaggtcagggtgttgactgaggctgtggatgacattacctccgttgatgacttcctgtcagtgtccgagaaccacatattagaagacgtgaataaatgcgtgatagctctccaggaaggggatgtggacacactggatcgaacggctggagccattaggggtagggcagctcgggtgattcatatcattaacgctgagatggaaaattatgaggccggcgtgtacaccgaaaaagttctggaggccacgaaactgttatccgagacagtgatgcctagattcgccgagcaggtggaagtcgctatagaagcattgtccgccaatgtccctcagccctttgaagagaatgagtttattgacgccagtagactagtgtacgacggtgtccgcgatatcaggaaggctgttctcatgatccggacgccggaagagcttgaagacgattccgattttgaacaggaggactacgacgtgcggagtaggacgtccgtacagaccgaggatgatcagctcatcgctggccagtctgccagagccattatggcacagcttccccaggaggagaaagccaagatcgccgagcaggtcgagatattccatcaggagaagtcaaagttagacgctgaggtggctaagtgggatgacagcggtaatgacatcattgttctcgctaagcagatgtgtatgatcatgatggaaatgacagactttacaagggggaaggggcccttaaagaatacctcagatgtcattaatgcagcaaagaaaatcgcagaggccggcagtcgcatggataaattggccagagcagtggccgaccagtgtccggactccgcttgtaagcaggatctgttggcatacttacagagaattgcgctgtactgtcaccagctgaacatctgcagtaaagtaaaggctgaggttcagaatttggggggggaacttattgttagtggcctggattcggccacaagcctgatccaagcggcaaagaatctcatgaatgccgtggttcttactgtgaaggcttcttatgtagcctcaaccaagtaccagaaggtgtatggaaccgcagctgttaacagcccagttgttagctggaagatgaaagcccctgagaagaagccgctggtgaagcgagagaaacctgaggagttccagacccgtgtgaggaggggctcacagaagaaacatatttcgcccgtgcaggccctgagcgaattcaaggcaatggactccttttag

SEQ ID NO: 101827 - DNA, 1755 bp, Artificial Sequence
  derived and/or modified sequence
atggatgggtggcggagacccttgcagagtgtcggaaaggtttgcgaaaagaatatgaagacatcagagatgcacacaatgtccggcgcacaaaccggcaggaaggaaaagggagatccgctgaatatcgcaatcgataaaatgacaaagaaaacaagagatttgcgacggcagcttagaaaagctgtgatggatcacatctctgatagcttcttggagaccaatgtgccgctcctcgttttgatcgaagccgcaaagagtgggaacgagaaagaggtgaaggagtatgcacaggtgttccgggaacacgccaataaattggtcgaagtcgccaacctggcctgctccatctccaacaatgaggagggcgtcaagttggtgcgcatggctgcgacacagattgatagcttatgtccacaagtgattaatgctgcactgactctcgctgcacgccctcagtccaaggtggcacaggacaacatggatgtattcaaggatcagtgggaaaaacaagtaagggtgctgacagaggccgtggacgacattacatctgtagatgacttcctttccgtcagcgagaaccatatcctggaggatgtgaacaaatgcgttattgccctccaggagggagatgtggatacacttgatcgaacggcaggggcaattcggggacgggcagcccgtgtgattcatatcatcaacgccgagatggaaaattacgaggccggagtctacaccgagaaagttcttgaggcaaccaagctgttgtccgaaactgtgatgcccagattcgccgagcaggttgaagtggctatcgaggcactatcggctaatgtaccacaacccttcgaggaaaacgagttcattgatgcctccagactggtctatgacggagttagagacatcagaaaagcggtgctcatgatccgcacacccgaggaacttgaagatgactccgatttcgaacaagaggattacgacgtgagatctaggacttccgttcagaccgaggacgaccagttgatcgcagggcagagtgccagggctatcatggcccagctcccccaagaagaaaaagcgaagatagccgaacaagtggagatcttccaccaggaaaagagcaagcttgacgccgaagtggccaagtgggacgattccggaaacgatatcatcgtgctagccaagcaaatgtgtatgattatgatggagatgacggattttacacgaggcaagggccctctgaagaacactagcgatgtgatcaatgcggctaaaaagatagctgaagccggtagtaggatggacaagttggccagggcggtggctgatcaatgcccagactctgcctgcaagcaggatctgctggcgtatctacagcgcatcgcgctctattgccaccagctaaatatttgtagcaaggtgaaggccgaggttcagaatttgggcggagaattaattgtctctggactggactcagccaccagcctgattcaggctgcgaagaacctaatgaatgcagtggtcctcactgtaaaggcctcttacgtggctagcacaaagtaccagaaggtatacgggacagctgccgtgaactcacctgtggtgtcttggaagatgaaagccccagagaaaaaaccattggtgaaaagggagaaaccagaggagtttcagactcgcgtgagacggggaagtcaaaaaaaacacatatctcccgtacaggcgctttcggagtttaaggctatggactcattctag

SEQ ID NO: 101828 - DNA, 2846 bp, Artificial Sequence
  derived and/or modified sequence
agaagcagagttagataaaatgtggtgcctaccctgtgtgttcacagttctggagtggagatgatgagtaacaaaccaatattattcatgctatggcagagatgtaaacaagagctgtggttgaagagatttttctagctaattgagcaagaccaggtagaggaaggaagacgaattgaccagatggatggatggagaaggccactccagtcagtaggcaaagtctgtgaaaaaaatatgaagacttctgagatgcataccatgtctggagcacagactggaaggaaagaaaaaggagatcctctcaacattgcgattgataagatgactaagaaaacaagagatctaaggagacagcttcggaaagcagtgatggatcacatatctgactctttcctggaaaccaatgttcctttgctagttctcattgaggctgcaaagagcggaaatgaaaaggaagtgaaagaatatgcccaagttttccgtgagcatgccaacaaactggtagaggttgccaatttggcctgttccatctccaacaatgaagaaggggtgaaattagttcggatggcagccacccagattgacagcctgtgtccccaggtcatcaatgccgctctgacactggctgcccggccacagagcaaagttgctcaggataacatggacgtcttcaaagaccagtgggagaagcaggtccgagtgttgacagaggccgtggatgacatcacctcagtggatgacttcctctctgtctcagaaaatcacatcttggaggatgtgaacaagtgtgtgatagccctccaagagggcgatgtggacactctggaccggactgcaggggccatcaggggccgggcagctcgagtcatacacatcatcaatgctgagatggagaactatgaagctggggtttatactgagaaggtgttggaagctacaaaattgctttctgaaacagtgatgccacgcttcgctgaacaagtagaggttgccattgaagccctgagtgccaacgttcctcaaccgtttgaggagaatgagttcatcgatgcctctcgcctggtgtatgatggcgttcgggacatcagaaaggctgtgctgatgatcaggaccccagaagaactagaggatgattctgactttgagcaggaagattatgatgtgcgtagcaggacaagtgttcagactgaggatgaccagctcattgcagggcagagcgcacgggccatcatggcgcaactaccgcaggaggagaaggcaaaaatagctgagcaggtggagatattccatcaagagaaaagcaagctggatgcagaagtggccaaatgggacgacagcggcaatgatatcattgtactggccaagcagatgtgtatgatcatgatggaaatgacagacttcacaagaggcaaaggcccattgaaaaatacatctgatgtcattaatgctgccaagaaaattgccgaagcaggttctcgaatggacaaattagctcgtgctgtggctgatcagtgtcctgattcagcatgtaagcaggatttattagcctaccttcaacgaattgccttgtattgccatcagcttaatatctgcagcaaggtgaaggcagaagtgcagaatctgggaggagagctcattgtgtcagggctggacagtgccacatcgcttatccaggcagctaaaaacctgatgaatgctgttgtcctcacggtgaaagcatcctatgtggcctcaaccaaataccagaaggtctatgggacagcagctgtcaactcacctgttgtgtcttggaagatgaaggctccagagaagaagccccttgtgaagagagaaaagcctgaagaattccagacacgagttcgacgaggttctcagaagaaacacatttcgcctgtacaggctttaagtgaattcaaagcaatggattccttctaggacgataggttttaacaagaaagctttttctttcttttctttctttctttttctttttaattccatttttgtatgcatacctgccagctcgtatgcctctggcatggggaaattaagggaacagtgtctgtttgcatgtaagatgagatgagatcaatactactgatccatctgtagcctgggaaggagacaggacattcctgtactaaggtggcacagagctgtcctttgcaacattctcataaaattgggcacagagttcgcattggcgcaatatttatgggagtgggagggatggggaaaataaacttaactctacaaaagcaaactctaatgcatgcaagaatcattaggttggcaggtatatgcataagtgaaaaatctggaagtgtaatggtagaacataaaacttgtattgcttctgtttcagtgcaaaaatgtactagccaatacgcttaagtgtgtggcccatgaattgaacaatttaaccttgaagtctatatccgtgatattatgtcgatttttaactgaggggaaattaactagtccagcctaaaatgcttcttttaatctgcattctgtttcctcttctagttgtgccattactagtgatcatgtttttttcccccctttaatgaaaacaataaacatctatttgagacaattaaaatccttctgggggcactggaagcacaatacggtgaccaatcttgctttcatttttttttctttttaatttgaaccatgattttgctagaaatagaaggcccagtggtggaatattagagggaaggaaactgacaacgtgtgaaagttagaggcaaatacataggtgtagcttggagtgctggtatctaatataccattgtattcactaactaactcaaaataaacacatttaatcttga

SEQ ID NO: 101829 - DNA, 1755 bp, Artificial Sequence
  derived and/or modified sequence
atggacggctggagaagacccctgcagagcgtgggcaaggtgtgcgagaagaacatgaagaccagcgagatgcacaccatgagcggcgcccagaccggcagaaaggagaagggcgaccccctgaacatcgccatcgacaagatgaccaagaagaccagagacctgagaagacagctgagaaaggccgtgatggaccacatcagcgacagcttcctggagaccaacgtgcccctgctggtgctgatcgaggccgccaagagcggcaacgagaaggaggtgaaggagtacgcccaggtgttcagagagcacgccaacaagctggtggaggtggccaacctggcctgcagcatcagcaacaacgaggagggcgtgaagctggtgagaatggccgccacccagatcgacagcctgtgcccccaggtgatcaacgccgccctgaccctggccgccagaccccagagcaaggtggcccaggacaacatggacgtgttcaaggaccagtgggagaagcaggtgagagtgctgaccgaggccgtggacgacatcaccagcgtggacgacttcctgagcgtgagcgagaaccacatcctggaggacgtgaacaagtgcgtgatcgccctgcaggagggcgacgtggacaccctggacagaaccgccggcgccatcagaggcagagccgccagagtgatccacatcatcaacgccgagatggagaactacgaggccggcgtgtacaccgagaaggtgctggaggccaccaagctgctgagcgagaccgtgatgcccagattcgccgagcaggtggaggtggccatcgaggccctgagcgccaacgtgccccagcccttcgaggagaacgagttcatcgacgccagcagactggtgtacgacggcgtgagagacatcagaaaggccgtgctgatgatcagaacccccgaggagctggaggacgacagcgacttcgagcaggaggactacgacgtgagaagcagaaccagcgtgcagaccgaggacgaccagctgatcgccggccagagcgccagagccatcatggcccagctgccccaggaggagaaggccaagatcgccgagcaggtggagatcttccaccaggagaagagcaagctggacgccgaggtggccaagtgggacgacagcggcaacgacatcatcgtgctggccaagcagatgtgcatgatcatgatggagatgaccgacttcaccagaggcaagggccccctgaagaacaccagcgacgtgatcaacgccgccaagaagatcgccgaggccggcagcagaatggacaagctggccagagccgtggccgaccagtgccccgacagcgcctgcaagcaggacctgctggcctacctgcagagaatcgccctgtactgccaccagctgaacatctgcagcaaggtgaaggccgaggtgcagaacctgggcggcgagctgatcgtgagcggcctggacagcgccaccagcctgatccaggccgccaagaacctgatgaacgccgtggtgctgaccgtgaaggccagctacgtggccagcaccaagtaccagaaggtgtacggcaccgccgccgtgaacagccccgtggtgagctggaagatgaaggcccccgagaagaagcccctggtgaagagagagaagcccgaggagttccagaccagagtgagaagaggcagccagaagaagcacatcagccccgtgcaggccctgagcgagttcaaggccatggacagcttctag

SEQ ID NO: 101830 - protein, 283 aa, Artificial Sequence
  derived and/or modified sequence
MADRPPVPSLSIEDDFNYGSSVASATVHIRMVLQRDCTFSKQYMRIPSAPSATLNIIRFFHLRQSGRSGMVNIFYKGPTFLRKVYSILSLQVLLTTVTSTVFLYFESVRTFVHESPALILLFALGSLGLIFALILNRHKYPLNLYLLFGFTLLEALTVAVVVTFYDVYIILQAFILTTTVFFGLTVYTLQSKKDFSKFGAGLFALLWILCLSGLEVFFYSEIMELVLAAAGALLFCGFIIYDTHSLMHKLSPEEYVLAAISLYLDIINLFLHLLRFLEAVNKK

SEQ ID NO: 101831 - DNA, 852 bp, Artificial Sequence
  derived and/or modified sequence
atggccgacagaccccccgtgcccagcctgagcatcgaggacgacttcaactacggcagcagcgtggccagcgccaccgtgcacatcagaatggtgctgcagagagactgcaccttcagcaagcagtacatgagaatccccagcgcccccagcgccaccctgaacatcatcagattcttccacctgagacagagcggcagaagcggcatggtgaacatcttctacaagggccccaccttcctgagaaaggtgtacagcatcctgagcctgcaggtgctgctgaccaccgtgaccagcaccgtgttcctgtacttcgagagcgtgagaaccttcgtgcacgagagccccgccctgatcctgctgttcgccctgggcagcctgggcctgatcttcgccctgatcctgaacagacacaagtaccccctgaacctgtacctgctgttcggcttcaccctgctggaggccctgaccgtggccgtggtggtgaccttctacgacgtgtacatcatcctgcaggccttcatcctgaccaccaccgtgttcttcggcctgaccgtgtacaccctgcagagcaagaaggacttcagcaagttcggcgccggcctgttcgccctgctgtggatcctgtgcctgagcggcctggaggtgttcttctacagcgagatcatggagctggtgctggccgccgccggcgccctgctgttctgcggcttcatcatctacgacacccacagcctgatgcacaagctgagccccgaggagtacgtgctggccgccatcagcctgtacctggacatcatcaacctgttcctgcacctgctgagattcctggaggccgtgaacaagaagtag

SEQ ID NO: 101832 - DNA, 852 bp, Artificial Sequence
  derived and/or modified sequence
atggcggaccgcccacctgtgccaagcttatcaatcgaagacgattttaactacggaagctcagtggcctcagcaaccgtgcacatccgaatggtgctgcaacgggactgcaccttctccaagcagtacatgcgaatcccgtcagcgccctccgctacacttaatatcatccggtttttccacctcaggcagtccggacggtcgggtatggtaaacattttctataagggacctactttccttcggaaagtgtactctatcctatccctgcaggtattactcactaccgtgaccagtaccgtgttcctatatttcgagagcgttaggacttttgttcacgagagtcccgcccttattctactgttcgcactgggtagtctgggccttatctttgctttgattctgaaccgccacaaatatcccctaaatctctatctcttatttggattcacattgctggaagcgctgactgtggccgtggttgttacattctatgacgtgtatatcatcctgcaagcctttattctgaccactaccgtcttcttcggtctgaccgtctacactcttcagtcgaagaaggacttttccaagttcggcgcaggcctcttcgctctgctgtggatcctttgcttgtcgggattggaggtgttcttttatagtgaaataatggagttggtcctggccgccgcgggggcattactgttctgcggtttcatcatctacgatacccatagtttaatgcacaagctgtctccggaggaatacgtgctggccgccataagtttatacctcgatattattaatctgttcttgcatctgcttaggttcttagaggccgtgaacaaaaagtag

SEQ ID NO: 101833 - DNA, 852 bp, Artificial Sequence
  derived and/or modified sequence
atggctgacaggcctcctgtgcccagcctgagcattgaagatgacttcaactacggcagctctgtggccagcgccaccgtgcacatccgcatggtgctgcagagggactgcaccttcagcaagcagtacatgaggatccccagcgcccccagcgccaccctgaacatcatccgcttcttccacctgcggcagagcggccgcagcggcatggtgaacatcttctacaagggccccaccttcctgaggaaggtgtacagcatcctgagcctgcaggtgctgctgaccaccgtgaccagcaccgtcttcctgtactttgaatctgtgaggacctttgtgcatgagagccctgccctgatcctgctgtttgccctgggcagcctgggcctcatctttgccctgatcctgaacagacacaagtaccccctgaacctgtacctgctgtttggcttcaccctgctggaggccctgactgtggccgtggtggtgaccttctatgatgtgtacatcatcctgcaggccttcatcctgaccaccaccgtcttcttcggcctgactgtgtacaccctgcagagcaagaaggacttcagcaagtttggagctggcctgtttgccctgctgtggatcctgtgcctgagcggcctggaggtgttcttctacagcgagatcatggagctggtgctggccgccgccggggccctgctcttctgtggcttcatcatctatgacacccacagcctgatgcacaagctgagccctgaggagtatgtgctggccgccatcagcctgtacctggacatcatcaacctcttcctgcacctgctgcgcttcctggaggccgtgaacaagaagtag

SEQ ID NO: 101834 - DNA, 852 bp, Artificial Sequence
  derived and/or modified sequence
atggccgaccggccccccgtgcccagcctgagcatcgaggacgacttcaattacggatctagcgttgctagcgcaacagtccacatcagaatggtgctgcaacgtgactgcacattctccaaacagtacatgcggattccaagtgccccgtccgccaccctgaatatcatccgcttcttccatctgcgtcagagcggacggtccggaatggtcaatatcttttataaggggcctacattcctgcggaaggtttactcaatcttgagcctccaggtgctgttgaccaccgtgacctctaccgtatttctgtacttcgagagtgtaaggacttttgttcatgagagccccgcgctgatccttctgttcgccctaggatctttaggactcatcttcgcgctgatcctgaaccgtcacaaataccctttgaacctgtacctgctgtttggttttacacttctggaagcactgacagttgccgtggtggttactttttacgacgtgtacattattctgcaggccttcatcctcaccaccaccgttttcttcggactgacagtgtacacactgcagagcaagaaagatttttctaagttcggagctgggctgtttgcactgctctggatcctgtgcctgagtgggctagaagtgttcttctattctgagatcatggaactcgtccttgccgcagctggtgcattgctgttctgcggattcatcatatatgacactcatagcctcatgcacaaactgagtcccgaggagtatgtcctcgctgccatatctctctaccttgacattattaacctctttttgcatctcctacggtttctggaagccgtgaataagaaatag

SEQ ID NO: 101835 - DNA, 852 bp, Artificial Sequence
  derived and/or modified sequence
atggctgacagacctcctgtgccctcgctgagcatagaggatgactttaactacggtagcagtgtggcttccgcaactgtccacatccggatggttctccagcgggattgtacgttttctaagcagtatatgcgcatcccatctgccccatctgccaccttaaacattatacgttttttccaccttcggcagagcgggaggagcgggatggtcaatattttctacaaagggccaactttcttacgcaaagtttactctatactttccctgcaggtgttgctgacgacagtgacctcaacagtgttcctctattttgagtcagtcaggacctttgtgcatgagagtcccgcattaatcctcctgttcgcgctcggcagcctcgggctgatctttgcactcatattaaacagacataagtatcctttaaacctctacctgctctttggttttactttgctggaggccctgacggtagctgttgtagtgaccttctacgacgtttacatcatcctgcaggctttcatattgaccacgactgtgttctttggacttactgtctataccctccaaagtaagaaggacttctcgaagttcggtgccggactgttcgccctgttatggattctgtgtttgtccggcctcgaagtctttttctattctgaaatcatggagctggtgctcgctgcagccggagctctgctgttttgcggtttcatcatctatgacacccactcactgatgcacaagctgtcgcccgaagaatacgtgctggctgctattagtctgtaccttgatattattaatctctttcttcacctcctgagattcttggaagcagtcaataagaaatag

SEQ ID NO: 101836 - DNA, 986 bp, Artificial Sequence
  derived and/or modified sequence
ctgttgccatcatggctgaccgacccccggtaccctcgctctcgatcgaggacgacttcaactatggcagcagcgtggcctccgccaccgtgcacatccgaatggttctccagagagattgtaccttcagcaaacaatatatgaggataccttctgcaccctcagccacactgaatatcatcagattttttcatctccggcaatctggtagatcagggatggtgaacattttctacaaagggccaacctttctgagaaaagtctacagcattctttctctgcaggttctcttaactacagtgacttcaacagtttttttatactttgagtctgtacggacatttgtacatgagagtcctgccttaattttgctgtttgccctcggatctctgggtttgatttttgcgttgattttaaacagacataagtatccccttaacctgtacctactttttggatttacgctgttggaagctctgactgtggcagttgttgttactttctatgatgtatatattattctgcaagctttcatactgactactacagtattttttggtttgactgtgtatactctacaatctaagaaggatttcagcaaatttggagcagggctgtttgctcttttgtggatattgtgcctgtcaggacttgaagtttttttttatagtgagataatggagttggtcttagccgctgcaggagcccttcttttctgtggattcatcatctatgacacacactcactgatgcataaactgtcacctgaagagtacgtattagctgccatcagcctctacttggatatcatcaatctattcctgcacctgttacggtttctggaagcagttaataaaaagtaattaaaagtatctcagctcaactgaagaacaacaaaaaaaatttaatgagaaaaaaggattaaagtaattggaagcagtatatagaaactgtttcattaagtaataaagtttgaaacaatgatt

SEQ ID NO: 101837 - DNA, 507 bp, Artificial Sequence
  derived and/or modified sequence
atggccgaccccgaccccagataccccagaagcagcatcgaggacgacttcaactacggcagcagcgtggccagcgccaccgtgcacatcagaatggccttcctgagaaaggtgtacagcatcctgagcctgcaggtgctgctgaccaccgtgaccagcaccgtgttcctgtacttcgagagcgtgagaaccttcgtgcacgagagccccgccctgatcctgctgttcgccctgggcagcctgggcctgatcttcgccctgatcctgaacagacacaagtaccccctgaacctgtacctgctgttcggcttcaccctgctggaggccctgaccgtggccgtggtggtgaccttctacgacgtgtacatcatcctgcaggccttcatcctgaccaccaccgtgttcttcggcctgaccgtgtacaccctgcagagcaagaaggacttcagcaagttcggcgccggcagatgcagaagccccagcttcctgtggatccaccacctgtag

SEQ ID NO: 101838 - DNA, 507 bp, Artificial Sequence
  derived and/or modified sequence
atggcagacccggacccacggtatcctcggagctcaattgaagacgatttcaactacggatcttcagtggcctccgcaacggtgcacatccgcatggcattcctacggaaggtgtatagcatcctgagcctgcaggttcttctgaccacggtgacctctaccgtgtttctctatttcgagtcagtgaggacattcgtgcatgagtcaccggccttaatactgctctttgcgctgggctccctgggactcatctttgccctaatcttgaacagacacaagtatccacttaacctctacttgctttttgggtttacgctcctagaggccctcacggttgccgttgtggtaactttttacgatgtgtatatcatactgcaggcattcatcctcaccaccacagtttttttcggcctcaccgtgtatacactccaatccaaaaaggatttttctaaatttggcgcagggagatgcaggagcccgtctttcttgtggatacaccacttatag

SEQ ID NO: 101839 - DNA, 507 bp, Artificial Sequence
  derived and/or modified sequence
atggctgaccctgacccccgctaccccaggagcagcattgaagatgacttcaactacggcagctctgtggccagcgccaccgtgcacatccgcatggccttcctgaggaaggtgtacagcatcctgagcctgcaggtgctgctgaccaccgtgaccagcaccgtcttcctgtactttgaatctgtgaggacctttgtgcatgagagccctgccctgatcctgctgtttgccctgggcagcctgggcctcatctttgccctgatcctgaacagacacaagtaccccctgaacctgtacctgctgtttggcttcaccctgctggaggccctgactgtggccgtggtggtgaccttctatgatgtgtacatcatcctgcaggccttcatcctgaccaccaccgtcttcttcggcctgactgtgtacaccctgcagagcaagaaggacttcagcaagtttggagctggccgctgccgcagccccagcttcctgtggatccaccacctgtag

SEQ ID NO: 101840 - DNA, 507 bp, Artificial Sequence
  derived and/or modified sequence
atggccgaccccgacccccggtacccccggagcagcatcgaggacgactttaattacgggagcagtgtggcatctgctaccgtgcatatcaggatggcattcctacgcaaggtatacagcatactgtcgctgcaggttttgctaactaccgtcacaagcacggtattcctgtatttcgagtctgttagaacattcgtacatgagtcccccgcgcttatcctgctgtttgctctgggttccctggggctaatcttcgcccttatactcaacagacataagtatcctttgaacctgtaccttctttttggatttaccttgctggaggctctgacagtcgccgtagttgtcaccttttatgacgtttacatcatactccaggcctttattctcacgacaactgtgttttttggcctcactgtctataccctccaatcaaaaaaggatttctcgaaattcggtgcgggcaggtgtagaagcccctcttttctgtggattcatcatttgtag

SEQ ID NO: 101841 - DNA, 507 bp, Artificial Sequence
  derived and/or modified sequence
atggcggaccccgatccccgataccctaggtcttctatcgaagacgacttcaactacggatcaagcgtagctagcgcaactgttcatattcggatggccttcttgcgcaaagtgtacagcatcctgtccttgcaggtcctgttgactacagtaacttccacggtctttctttattttgagtccgtgagaaccttcgtgcatgagtcgcccgcactcattctcctgttcgcactgggatcactggggctgattttcgccctgatcctcaatcggcacaagtatcccctgaatctgtacctgctgtttgggttcaccctactagaggctctgaccgtggcagtcgtggtcactttctatgatgtttacattatactccaggcctttatacttactacaactgtgttctttgggctaaccgtgtacacactacagagtaagaaggattttagcaagtttggggcaggaagatgtcgctcgcctagttttctgtggatccatcacctatag

SEQ ID NO: 101842 - protein, 485 aa, Artificial Sequence
  derived and/or modified sequence
MSVPLLKIGVVLSTMAMITNWMSQTLPSLVGLNTTKLSAAGGGTLDRSTGVLPTNPEESWQVYSSAQDSEGRCICTVVAPQQTMCSRDARTKQLRQLLEKVQNMSQSIEVLDRRTQRDLQYVEKMENQMKGLESKFKQVEESHKQHLARQFKAIKAKMDELRPLIPVLEEYKADAKLVLQFKEEVQNLTSVLNELQEEIGAYDYDELQSRVSNLEERLRACMQKLACGKLTGISDPVTVKTSGSRFGSWMTDPLAPEGDNRVWYMDGYHNNRFVREYKSMVDFMNTDNFTSHRLPHPWSGTGQVVYNGSIYFNKFQSHIIIRFDLKTETILKTRSLDYAGYNNMYHYAWGGHSDIDLMVDESGLWAVYATNQNAGNIVVSRLDPVSLQTLQTWNTSYPKRSAGEAFIICGTLYVTNGYSGGTKVHYAYQTNASTYEYIDIPFQNKYSHISMLDYNPKDRALYAWNNGHQILYNVTLFHVIRSDEL

SEQ ID NO: 101843 - protein, 153 aa, Artificial Sequence
  derived and/or modified sequence
MSVPLLKIGVVLSTMAMITNWMSQTLPSLVGLNTTKLSAAGGGTLDRSTGVLPTNPEESWQVYSSAQDSEGRCICTVVAPQQTMCSRDARTKQLRQLLEKVQNMSQSIEVLDRRTQRDLQYVEKMENQMKGLESKFKQVEESHKQHLARQFKG

SEQ ID NO: 101844 - DNA, 1458 bp, Artificial Sequence
  derived and/or modified sequence
atgagtgtgcccctactcaagattggcgtggttttatctaccatggccatgatcacaaactggatgagccagactctgccaagcttggtgggtttgaataccacgaagctttccgcggcggggggtggcacgctcgatcgaagcactggagtccttcctactaacccagaagagtcctggcaggtgtatagctctgcacaggactccgaaggccgttgtatttgtaccgtggtggcgcctcaacagacgatgtgcagccgcgacgcaagaacaaagcaactgcgacagctcttggaaaaagttcagaacatgagccagagcatagaagtcctcgataggcggactcagcgcgatcttcagtacgtcgagaagatggagaaccagatgaaaggactagagtccaagttcaagcaagtagaggaatcgcataaacagcacctggcccggcagttcaaggccattaaagctaaaatggatgagctgcgtcctttgatacccgtgctggaggaatacaaagccgacgccaaacttgtgctccagttcaaagaagaggttcagaatctgacatccgtgctgaacgagcttcaggaagagataggtgcctacgactacgatgagttacaatcccgagtgtctaatttggaggagagactgagagcctgcatgcagaaactggcttgcggtaaactaacgggcatatcggatcccgtgactgtgaagacctctggaagccgctttgggtcctggatgactgatccactggccccagagggcgacaatcgtgtgtggtacatggacggataccacaataacagattcgtgagagagtacaagagcatggtggatttcatgaataccgacaattttactagtcacagactccctcacccttggagcgggaccgggcaggtggtgtataacggctccatttatttcaataaattccaaagccacatcattattagattcgacctgaagacagagactatcttaaaaacacggagcctggactatgctggctacaataacatgtatcactatgcatggggagggcactctgatattgacctgatggtggacgagagtggtctgtgggctgtctatgcaaccaatcagaatgcaggcaacatcgtggtttcccgtctagaccccgtctcgctccagaccctgcagacttggaacacatcctaccccaagcggtcggctggggaagcattcattatatgtggtactctctatgtgacaaatgggtacagtggcggcacaaaggtgcattatgcgtaccaaactaacgcttcaacctacgaatacatcgacatccctttccagaataagtactcccacatctcaatgctggattacaatccaaaagaccgggccctatacgcctggaacaacggacatcagattctatacaacgtgaccctgtttcacgtgatcagatcagacgaactatag

SEQ ID NO: 101845 - DNA, 462 bp, Artificial Sequence
  derived and/or modified sequence
atgtcggttcccctgctcaagatcggcgtggtcctgtccacgatggcgatgatcacaaattggatgagccagacccttccatcactggtgggcctcaatacaacgaagctgagcgccgcggggggtggaaccttagataggtctaccggtgtcctgcctactaaccctgaggaatcgtggcaggtgtattcttcggcacaggatagcgaaggccggtgtatctgcacagtggtggctccacagcagacaatgtgttcacgcgacgcacggacgaagcagctgcgacaactccttgaaaaggtacaaaatatgtctcagagtatagaggtactggaccggcgcacacaacgagacctgcagtatgttgagaagatggagaatcagatgaaaggtctggagtcaaagttcaagcaagtggaagagtcacataagcagcacttagcccgccagttcaagggctag

SEQ ID NO: 101846 - DNA, 1458 bp, Artificial Sequence
  derived and/or modified sequence
atgtctgtgcccctgctgaagattggagtggtgctgagcaccatggccatgatcaccaactggatgagccagaccctgcccagcctggtgggcctgaacaccaccaagctgtctgctgctgggggcggcaccctggacaggagcactggagtgctgcccaccaaccctgaggagagctggcaggtgtacagcagcgcccaggacagcgagggccgctgcatctgcaccgtggtggccccccagcagaccatgtgcagcagagatgcccggaccaagcagctgcggcagctgctggagaaggtgcagaacatgagccagagcattgaggtgctggacaggaggacccagagggacctgcagtatgtggagaagatggagaaccagatgaagggcctggagagcaagttcaagcaggtggaggagagccacaagcagcacctggcccggcagttcaaggccatcaaggccaagatggatgagctgcggcccctcatccctgtgctggaggagtacaaggcagatgccaagctggtgctgcagttcaaggaggaggtgcagaacctgacctctgtgctgaatgagctgcaggaggagattggagcctatgactatgatgagctgcagagccgggtgagcaacctggaggagcggctgcgggcctgcatgcagaagctggcctgtgggaagctgaccggcatcagtgaccctgtgacagtgaagaccagcggcagccgcttcggctcctggatgacagaccccctggcccctgagggggacaacagagtgtggtacatggatggctaccacaacaacagatttgtgcgggagtacaagtccatggtggacttcatgaacacagacaacttcaccagccaccggctgccccacccctggagcggcaccggccaggtggtgtacaacggcagcatctacttcaacaagttccagagccacatcatcatccgctttgacctgaagacagagaccatcctgaagaccaggagcctggactatgccggctacaacaacatgtaccactacgcctggggcggccacagcgacatcgacctgatggtggatgagagcggcctgtgggccgtgtatgccaccaaccagaatgccggcaacatcgtggtgtcccggctggaccctgtgtccctgcagaccctgcagacctggaacaccagctaccccaagaggtctgctggggaggccttcatcatctgtggcaccctgtatgtgaccaacggctacagcggcggcaccaaggtgcactacgcctaccagaccaatgccagcacctatgagtacatcgacatccccttccagaacaagtacagccacatctccatgctggactacaaccccaaggaccgggccctgtatgcctggaacaacggccaccagatcctgtacaacgtgaccctcttccacgtgatccgcagtgatgagctgtag

SEQ ID NO: 101847 - DNA, 462 bp, Artificial Sequence
  derived and/or modified sequence
atgtctgtgcccctgctgaagattggagtggtgctgagcaccatggccatgatcaccaactggatgagccagaccctgcccagcctggtgggcctgaacaccaccaagctgtctgctgctgggggcggcaccctggacaggagcactggagtgctgcccaccaaccctgaggagagctggcaggtgtacagcagcgcccaggacagcgagggccgctgcatctgcaccgtggtggccccccagcagaccatgtgcagcagagatgcccggaccaagcagctgcggcagctgctggagaaggtgcagaacatgagccagagcattgaggtgctggacaggaggacccagagggacctgcagtatgtggagaagatggagaaccagatgaagggcctggagagcaagttcaagcaggtggaggagagccacaagcagcacctggcccggcagttcaagggctag

SEQ ID NO: 101848 - DNA, 1458 bp, Artificial Sequence
  derived and/or modified sequence
atgagcgtgcccctgctgaagatcggcgtggtgctgagcaccatggccatgatcactaactggatgtcacagacgctacccagcctggtggggttgaatactactaaattgtccgccgccggcgggggcaccttagataggtcaactggggtgctccctacaaaccccgaggaatcctggcaggtgtatagctccgcgcaggactctgaaggtagatgtatttgcacagtcgtggcccctcagcaaaccatgtgttctcgcgacgccaggaccaaacagctccgccagcttctcgagaaagtccagaacatgagccagtcgatcgaggtgttggatcgccgcacacaaagggatctccagtacgtggagaaaatggaaaatcagatgaaggggctagagtctaaatttaaacaagtcgaagaaagccataagcaacatctggcaagacaatttaaggctataaaagcaaaaatggatgaacttcgccctttgattcctgtccttgaggaatacaaggccgacgccaagttagtgttacagtttaaagaagaagtgcagaacctgacaagcgtactgaacgagttgcaggaggaaatcggcgcatacgactacgacgaactccaatcccgcgtcagcaacctcgaagagcgccttagagcctgtatgcagaagctggcctgcggtaaacttaccggaataagcgaccccgtaacagtgaagacttctggcagcagatttgggtcgtggatgactgatcccttggctcctgaaggtgacaatagagtgtggtatatggacggttaccacaataataggtttgtgcgggagtacaaatcaatggttgatttcatgaacacagacaatttcaccagccatcggctgccacatccatggagcggaacgggccaggttgtttacaacggcagtatttattttaacaaatttcagtcacacattataattcgctttgacctgaaaaccgaaacgatcctcaagactaggagccttgactatgccggctacaataatatgtatcactacgcctgggggggacattctgatattgatctgatggtcgacgagtcaggcctgtgggccgtgtacgctaccaatcagaatgctggaaacattgtggtgtctcgcctcgatcctgtgagcctgcaaactctccaaacgtggaatactagctacccaaaacggtcggcgggggaggcctttatcatctgtggcacactctacgtgacaaatggttacagcggcgggactaaggtacactacgcctaccagacaaatgcctcaacatatgagtacattgatatcccttttcagaacaagtacagccatatctctatgctggattataaccccaaagatcgcgcgctgtatgcttggaacaacgggcaccagatactgtacaatgtcaccctgtttcacgtgatcaggtccgatgagctctag

SEQ ID NO: 101849 - DNA, 462 bp, Artificial Sequence
  derived and/or modified sequence
atgagcgtgcccctgctgaagatcggcgtggtgctgagcaccatggctatgatcacgaattggatgagccagacactcccaagcctggttgggcttaacaccacaaagttgagcgcggccggcggcggcaccttggaccggtccacaggcgtgctgcccaccaatcccgaggagtcatggcaggtgtactcctccgcgcaggatagcgaagggcgctgtatatgcaccgtcgttgctccacaacaaaccatgtgctcacgtgatgccagaacaaagcagctcaggcagcttctggagaaggttcagaatatgtcccagtctatagaagtgcttgataggcgcacccagcgagacctccagtacgtggagaaaatggaaaatcagatgaaggggctggaatccaagtttaaacaggtcgaggagtcacacaagcagcatctggctcgacagttcaagggctag

SEQ ID NO: 101850 - DNA, 2444 bp, Artificial Sequence
  derived and/or modified sequence
ggcgggcggcgcgaggcgcagggcgcggcgggcagaggccacctggccaccttccctggcgcccggggaaggcgcggcgatggccggggcgcgcggggcggcggcggcggcgggcgggcggcggcgggccgagggggcgcggggacacagccaggcgcccctgcccgccgcggtgcccgccgcctgaaggccgcctgggcgcgggagccggtgccagctcggagcgggcgctggaggcagctcgaggcgcgatgtcggtgccgctgctcaagatcggggtcgtgctgagcaccatggccatgatcactaactggatgtcccagacgctgccctcgctggtgggcctcaacaccaccaagctctcggcggccggcggcgggacgctggaccgcagcaccggcgtgctgcccaccaaccctgaggagagctggcaggtgtacagctctgcccaggacagcgagggcaggtgtatctgcacagtggtcgctccacagcagaccatgtgttcacgggatgcccgcacaaaacagctgaggcagctactggagaaggtgcagaacatgtctcaatccatagaggtcttggacaggcggacccagagagacttgcagtacgtggagaagatggagaaccaaatgaaaggactggagtccaagttcaaacaggtggaggagagtcataagcaacacctggccaggcagtttaaggcgataaaagcgaaaatggatgaacttaggcctttgatacctgtgttggaagagtacaaggccgatgccaaattggtattgcagtttaaagaggaggtccagaatctgacgtcagtgcttaacgagctgcaagaggaaattggcgcctatgactacgatgaacttcagagcagagtgtccaatcttgaagaaaggctccgtgcatgcatgcaaaaactagcttgcgggaagttgacgggcatcagtgaccccgtgactgtcaagacctccggctcgaggttcggatcctggatgacagaccctctcgcccctgaaggcgataaccgggtgtggtacatggacggctatcacaacaaccgcttcgtacgtgagtacaagtccatggttgacttcatgaacacggacaatttcacctcccaccgtctcccccacccctggtcgggcacggggcaggtggtctacaacggttctatctacttcaacaagttccagagccacatcatcatcaggtttgacctgaagacagagaccatcctcaagacccgcagcctggactatgccggttacaacaacatgtaccactacgcctggggtggccactcggacatcgacctcatggtggacgagagcgggctgtgggccgtgtacgccaccaaccagaacgctggcaacatcgtggtcagtaggctggaccccgtgtccctgcagaccctgcagacctggaacacgagctaccccaagcgcagcgccggggaggccttcatcatctgcggcacgctgtacgtcaccaacggctactcagggggtaccaaggtccactatgcataccagaccaatgcctccacctatgaatacatcgacatcccattccagaacaaatactcccacatctccatgctggactacaaccccaaggaccgggccctgtatgcctggaacaacggccaccagatcctctacaacgtgaccctcttccacgtcatccgctccgacgagttgtagctccctcctcctggaagccaagggcccacgtcctcaccacaaagggactcctgtgaaactgctgccaaaaagataccaataacactaacaataccgatcttgaaaaatcatcagcagtgcggattctgacatcgagggatggcattacctccgtgtttctccctttcgagccggcgggccacagacgtcggaagaaactcccgtatttgcagctggaactgcagcccacggcgccccggttttcctccccgccctgtccctctctggtcaaacaacatactaaagaggcgaggcaatgactgttggccagttctcaccggggaaaaacccactgttaggatggcatgaacatttccttagatcgtggtcagctccgaggaatgtggcgtccaggctctttgagagccatgggctgcacccggccgtaggctagtgtaactcgcatcccattgcagtgccgtttcttgactgtgttgctgtctcttagattaaccgtgctgaggctccacatagctcctggacctgtgtctagtacatactgaagcgatggtcagagtgtgtagagtgaagttgctgtgcccacattgtttgaactcgcgtaccccgtagatacattgtgcaacgttcttctgttattcccttgaggtggtaacttcgtatgttcagtttatgcgatgattgttgtaaatgcaatgccgtagtttggattaataagtggatggtttttgtttctaa

SEQ ID NO: 101851 - DNA, 1057 bp, Artificial Sequence
  derived and/or modified sequence
ggacggcgcttcccggtggcggcggaggagcccggagggacgcagccgggcaaggcagggcgcagggcgggcggcgcgaggcgcagggcgcggcgggcagaggccacctggccaccttccctggcgcccggggaaggcgcggcgatggccggggcgcgcggggcggcggcggcggcgggcgggcggcggcgggccgagggggcgcggggacacagccaggcgcccctgcccgccgcggtgcccgccgcctgaaggccgcctgggcgcgggagccggtgccagctcggagcgggcgctggaggcagctcgaggcgcgatgtcggtgccgctgctcaagatcggggtcgtgctgagcaccatggccatgatcactaactggatgtcccagacgctgccctcgctggtgggcctcaacaccaccaagctctcggcggccggcggcgggacgctggaccgcagcaccggcgtgctgcccaccaaccctgaggagagctggcaggtgtacagctctgcccaggacagcgagggcaggtgtatctgcacagtggtcgctccacagcagaccatgtgttcacgggatgcccgcacaaaacagctgaggcagctactggagaaggtgcagaacatgtctcaatccatagaggtcttggacaggcggacccagagagacttgcagtacgtggagaagatggagaaccaaatgaaaggactggagtccaagttcaaacaggtggaggagagtcataagcaacacctggccaggcagtttaagggctaacttaaaagagttttttcaatgctgcagtgactgaagaagcagtccactcccatgtaaccatgaaagagagccagagagctttttgcaccatgcatttttactattattttccaatacttagcaccatttcactaaggaaccttgaatacaaccaggatcctcctttgcatgcgactgtagctgcatttcatgaatagtttgaacccttgtcaatgcattttttgaaaaagaaagaaaaaaaaaacttcgtgtatgtgactcaaagcatgtaaccttaag

SEQ ID NO: 101852 - DNA, 1458 bp, Artificial Sequence
  derived and/or modified sequence
atgtcagtacccctcctcaagatcggtgttgtgttatcgaccatggcaatgattacgaattggatgtcccagactctgccttcccttgtgggtttgaataccaccaaattgtccgccgctggaggtggcacactggataggagcaccggcgtccttcctacgaacccagaagagtcctggcaggtgtatagctccgcacaggacagcgaagggagatgtatttgcaccgttgtggctcctcagcagacgatgtgtagtagagatgcacgcactaagcaactacgccagctcctcgaaaaagtacagaacatgtcgcaaagcatcgaggtcctagaccgacgcacccaacgagacctccagtacgtggaaaagatggaaaaccagatgaagggactcgagtctaagtttaagcaagtggaggagtcgcataaacaacatctcgccagacagttcaaggctatcaaagcaaaaatggatgagctgcggccactgatacctgtgcttgaagagtataaggctgatgccaagctagtcttgcagtttaaggaggaagttcagaacctcactagcgtcctaaatgagctccaggaggaaatcggcgcatatgactatgacgagttgcaatcgagagtttctaatctcgaggagcggctgcgcgcttgtatgcaaaaactggcctgtgggaagctgacgggcatttccgaccccgtgaccgtaaagacctcagggtctaggtttggtagctggatgactgacccccttgccccagagggtgacaatcgggtgtggtatatggacggttatcacaataatcgatttgtccgtgagtataagtccatggtggattttatgaatacggacaattttacttcacatagactcccccacccctggagcgggaccggccaggtagtgtacaatggtagtatttactttaacaaatttcagagtcacattatcattcgcttcgacctgaagaccgagaccattctgaaaaccagatccctagattatgcaggctataacaacatgtaccattatgcctggggtggccattctgatattgatctgatggtcgatgagtccggattgtgggccgtgtacgcaaccaaccagaacgccggaaatatcgtggtcagtcggctggaccccgtttcactgcagacgctccagacatggaatacatcctacccaaaacgcagtgccggagaggctttcataatctgtgggacactctacgtcacaaatggctattcgggcggtaccaaggtccactacgcttaccagacaaacgccagcacatatgaatatatcgacatcccctttcaaaataagtattcccacatctctatgctggactataacccaaaagacagagccctctacgcctggaataacggccatcaaattctatataatgttacactcttccatgtgattcgctctgacgagctgtag

SEQ ID NO: 101853 - DNA, 462 bp, Artificial Sequence
  derived and/or modified sequence
atgtcagtacctctgctgaaaatcggcgtggtgctgtctactatggccatgatcactaattggatgagtcagacgctgccgagtctggttggcttaaataccaccaaactctccgcagctggcggtggtactctggacaggtctaccggcgtgcttcccactaaccccgaagagtcctggcaggtttattccagtgcccaggactccgaaggccgttgtatctgcacggtcgtcgcccctcagcagaccatgtgctctagggacgcaaggaccaaacagcttcgtcaattattggaaaaagtgcagaacatgagtcaaagcattgaggtccttgaccgaaggactcaacgagacctgcagtatgtcgagaagatggaaaatcaaatgaagggcctggagagcaagttcaaacaggtggaagaatcccataagcaacatctggcacggcagtttaagggttag

SEQ ID NO: 101854 - DNA, 1458 bp, Artificial Sequence
  derived and/or modified sequence
atgagtgtgccacttctgaagattggtgtcgtcctctccactatggcaatgataactaactggatgtcccaaacgctgccctcactcgtaggtcttaatactacgaaactgtcagctgctggaggggggacgctggaccgcagcacaggcgtgcttcccacaaaccctgaggaatcctggcaagtgtactcttccgcccaggatagcgagggccggtgtatttgcactgtcgtggccccgcaacagacaatgtgttccagagatgctaggaccaagcagctgcgacagctactggagaaggttcagaatatgtcccagagtattgaagttcttgatcggaggacacagcgggacctacagtacgtcgaaaaaatggagaaccagatgaaagggttagagtccaagttcaaacaagtggaggagagccacaagcaacacctagccagacaatttaaagcaatcaaagctaagatggatgaactgcgacccctgatacctgtgctggaggaatacaaagccgatgctaagctcgtactgcagttcaaggaggaagtccagaacctaaccagcgtcctgaacgagcttcaggaggagattggagcctatgattacgacgagttgcaaagccgtgtctcaaatctggaggaaagattgcgcgcttgtatgcagaaactggcttgcggcaaactcactggaatttccgaccctgtgacagtcaaaaccagcggatccagatttgggtcgtggatgaccgatcctttagcgcctgagggggacaacagagtctggtatatggacggctatcataataatcgtttcgtaagggagtacaagagtatggtggacttcatgaacactgacaactttaccagccacaggcttcctcatccgtggtccgggaccggccaggtggtatacaatggatctatatattttaataagtttcagagccacataattatcagattcgaccttaaaaccgagacaatcctcaagactcggtcgctcgactacgcaggttacaataatatgtatcattacgcctggggcggacacagtgacatagatcttatggttgatgaatccggactgtgggctgtatatgccacaaatcagaacgcaggaaatatcgtggtgtcacggctggatccagtcagcctacagaccctgcaaacttggaacacctcctaccctaaacgaagcgcaggagaagctttcataatctgtgggaccctttacgtgacaaacgggtacagtgggggcaccaaggtgcactacgcctatcagactaacgcatcgacatatgaatacatcgatatacctttccaaaacaagtacagtcatatatccatgttagattacaatcccaaagaccgcgctctgtacgcctggaacaatggccaccaaattttatataacgtcactctctttcacgtgataaggtccgacgaactgtag

SEQ ID NO: 101855 - DNA, 462 bp, Artificial Sequence
  derived and/or modified sequence
atgtctgtgcctttattaaagatcggagttgtgcttagtactatggccatgatcactaactggatgtcacagaccttaccatccctcgtgggtctaaacacaaccaagctttctgctgccggaggaggcaccctcgacagatcaacaggcgtgctgccgaccaaccccgaagagagttggcaagtttactcctctgctcaggacagtgaaggtcgttgcatctgtacagtggttgctccacagcagaccatgtgctcccgtgacgctcggacaaaacagctccgccaactgctagagaaagttcaaaatatgtctcaaagcattgaagtcttggataggagaacccagcgcgacctccagtatgtggagaagatggaaaatcaaatgaagggtctcgaatcgaagttcaagcaagtggaggagagccataagcagcaccttgcaagacagttcaaaggttag

SEQ ID NO: 101856 - DNA, 1458 bp, Artificial Sequence
  derived and/or modified sequence
atgtccgtgcctttgctgaagatcggcgtggtcctaagcaccatggccatgataacaaactggatgtcacagacactgccctcgctggtgggactgaacaccactaaactgagcgcggcgggaggaggaaccttggatcgaagcacaggggttttgcccactaaccccgaagaaagctggcaggtctattccagcgcacaagattctgaaggaagatgtatatgcacagtggtcgcgcctcagcaaactatgtgttcacgggatgctaggacaaagcaactgcgacagcttctcgaaaaggtacagaacatgtctcagagtatagaagttctggatcgtaggacgcaaagggacctccaatacgtcgagaagatggagaaccagatgaaaggactggaatctaagttcaagcaggtggaagaatctcacaagcagcacctagctagacagtttaaagctattaaagctaagatggacgagttgcggccgttgattccagtgctcgaagagtataaagctgatgccaaactcgtactccaatttaaagaagaagttcagaacctcacctccgttcttaatgaacttcaggaagaaatcggcgcttatgattatgacgagctgcaatcccgggtgtccaacctcgaagaacgactgagggcttgcatgcaaaagctcgcctgcggaaaattgactggtataagcgaccccgttaccgtgaagacctcaggatcccgattcggtagttggatgaccgaccccttagcaccggagggcgacaacagagtttggtacatggacggctaccacaacaacagattcgtgcgagagtacaaaagcatggttgactttatgaacaccgataatttcactagccataggttaccccacccttggagtggtacgggccaagtggtgtacaatggctcaatctacttcaacaaatttcagtctcacataatcatccgcttcgacctgaagacagaaaccatcttgaagacccgcagccttgactatgccggctacaacaatatgtatcactatgcatggggaggacactccgacatcgatctgatggtggacgaatctgggctctgggcagtttacgcaaccaaccaaaacgctggtaacatagtggtctcaaggctagacccagtctccctgcagacactgcagacatggaatacatcatatcctaagagaagcgccggagaagcattcatcatttgtggaactctgtatgttactaacggttactcaggtgggactaaggtacactatgcatatcagactaatgcctcaacatatgagtatattgacattccctttcagaataaatactcacatatttcaatgctcgattataaccccaaagacagggcactgtatgcctggaataatggccaccaaattttatacaatgttacactctttcatgttattaggtctgacgaactgtag

SEQ ID NO: 101857 - DNA, 462 bp, Artificial Sequence
  derived and/or modified sequence
atgtccgtccccctattaaagatcggagtcgttctgtcgacaatggctatgattactaactggatgagtcagacgctaccgtcactagtgggcctgaatactaccaagctttccgccgcaggcgggggtacactggatagatcaacaggcgtcctccccaccaaccccgaagagtcttggcaagtctactcctcagcacaagatagcgaaggccgctgtatatgcacagtggtggcaccccagcagacaatgtgctcaagagacgcgaggactaagcagctaagacaactgcttgagaaggtgcagaatatgagccaaagtattgaggtgttagacagaagaacccagcgtgacctacagtacgttgagaagatggagaatcagatgaagggcctggaatccaagttcaagcaagttgaagagtctcataagcagcatttagcaagacagttcaagggatag

SEQ ID NO: 101858 - DNA, 1458 bp, Artificial Sequence
  derived and/or modified sequence
atgagcgtgcccctgctgaagatcggcgtggtgctgagcaccatggccatgatcaccaactggatgagccagaccctgcccagcctggtgggcctgaacaccaccaagctgagcgccgccggcggcggcaccctggacagaagcaccggcgtgctgcccaccaaccccgaggagagctggcaggtgtacagcagcgcccaggacagcgagggcagatgcatctgcaccgtggtggccccccagcagaccatgtgcagcagagacgccagaaccaagcagctgagacagctgctggagaaggtgcagaacatgagccagagcatcgaggtgctggacagaagaacccagagagacctgcagtacgtggagaagatggagaaccagatgaagggcctggagagcaagttcaagcaggtggaggagagccacaagcagcacctggccagacagttcaaggccatcaaggccaagatggacgagctgagacccctgatccccgtgctggaggagtacaaggccgacgccaagctggtgctgcagttcaaggaggaggtgcagaacctgaccagcgtgctgaacgagctgcaggaggagatcggcgcctacgactacgacgagctgcagagcagagtgagcaacctggaggagagactgagagcctgcatgcagaagctggcctgcggcaagctgaccggcatcagcgaccccgtgaccgtgaagaccagcggcagcagattcggcagctggatgaccgaccccctggcccccgagggcgacaacagagtgtggtacatggacggctaccacaacaacagattcgtgagagagtacaagagcatggtggacttcatgaacaccgacaacttcaccagccacagactgccccacccctggagcggcaccggccaggtggtgtacaacggcagcatctacttcaacaagttccagagccacatcatcatcagattcgacctgaagaccgagaccatcctgaagaccagaagcctggactacgccggctacaacaacatgtaccactacgcctggggcggccacagcgacatcgacctgatggtggacgagagcggcctgtgggccgtgtacgccaccaaccagaacgccggcaacatcgtggtgagcagactggaccccgtgagcctgcagaccctgcagacctggaacaccagctaccccaagagaagcgccggcgaggccttcatcatctgcggcaccctgtacgtgaccaacggctacagcggcggcaccaaggtgcactacgcctaccagaccaacgccagcacctacgagtacatcgacatccccttccagaacaagtacagccacatcagcatgctggactacaaccccaaggacagagccctgtacgcctggaacaacggccaccagatcctgtacaacgtgaccctgttccacgtgatcagaagcgacgagctgtag

SEQ ID NO: 101859 - DNA, 462 bp, Artificial Sequence
  derived and/or modified sequence
atgagcgtgcccctgctgaagatcggcgtggtgctgagcaccatggccatgatcaccaactggatgagccagaccctgcccagcctggtgggcctgaacaccaccaagctgagcgccgccggcggcggcaccctggacagaagcaccggcgtgctgcccaccaaccccgaggagagctggcaggtgtacagcagcgcccaggacagcgagggcagatgcatctgcaccgtggtggccccccagcagaccatgtgcagcagagacgccagaaccaagcagctgagacagctgctggagaaggtgcagaacatgagccagagcatcgaggtgctggacagaagaacccagagagacctgcagtacgtggagaagatggagaaccagatgaagggcctggagagcaagttcaagcaggtggaggagagccacaagcagcacctggccagacagttcaagggctag

SEQ ID NO: 101860 - protein, 458 aa, Artificial Sequence
  derived and/or modified sequence
MGEAPGREGRGPCPQLESPRRRRVLPTNPEESWQVYSSAQDSEGRCICTVVAPQQTMCSRDARTKQLRQLLEKVQNMSQSIEVLDRRTQRDLQYVEKMENQMKGLESKFKQVEESHKQHLARQFKAIKAKMDELRPLIPVLEEYKADAKLVLQFKEEVQNLTSVLNELQEEIGAYDYDELQSRVSNLEERLRACMQKLACGKLTGISDPVTVKTSGSRFGSWMTDPLAPEGDNRVWYMDGYHNNRFVREYKSMVDFMNTDNFTSHRLPHPWSGTGQVVYNGSIYFNKFQSHIIIRFDLKTETILKTRSLDYAGYNNMYHYAWGGHSDIDLMVDESGLWAVYATNQNAGNIVVSRLDPVSLQTLQTWNTSYPKRSAGEAFIICGTLYVTNGYSGGTKVHYAYQTNASTYEYIDIPFQNKYSHISMLDYNPKDRALYAWNNGHQILYNVTLFHVIRSDEL

SEQ ID NO: 101861 - DNA, 1377 bp, Artificial Sequence
  derived and/or modified sequence
atgggagaagccccagggagagaagggagagggccctgcccgcaacttgagagtcctcgtcgccgtcgcgtgctgcccacaaaccccgaggagagttggcaagtttactcgtccgcgcaagactcggagggacggtgcatttgtactgtggtcgctcctcagcagacaatgtgcagtcgggacgcgcgaacgaaacaactgagacagttgctggagaaggtgcaaaacatgtcccagagcattgaagtgctggacagaaggacgcagagggatctacaatacgtggaaaaaatggagaaccagatgaaaggcttagagtccaagttcaagcaggtggaggaatcacataagcagcacctcgcaaggcaattcaaggccatcaaagcgaagatggatgagctgcgccccctcatacctgtgcttgaagaatataaagccgacgcaaagttagtgctccagttcaaggaggaagtccagaacctgacttccgtcctaaatgagctccaggaggagatcggcgcatatgactatgatgagctgcagtctcgagtgtctaatctcgaggagcgcctgcgcgcctgcatgcagaagttggcctgtgggaagctcaccggaatttctgatccggttaccgtaaagacttctgggagccgatttggctcctggatgacggaccccctggcaccagaaggtgataatagagtgtggtacatggatggctatcacaataacaggtttgtgcgcgagtataagtccatggtggattttatgaataccgacaactttaccagtcaccggctgccgcatccatggtctggtacaggtcaggtggtgtataacgggagtatttattttaataaattccagtcccatatcattatccggttcgacctcaaaacagaaaccattctcaaaactcggtctctggattatgccggctataataacatgtatcactatgcttggggcgggcattctgacattgacctcatggtggacgaatccggcctttgggctgtgtatgcaacaaatcaaaacgccggaaatatagtcgtcagccgactggacccagtcagcttgcagaccttgcagacatggaacacttcctacccgaagaggtccgcgggcgaagcttttattatttgtggaactctttatgtgaccaacggttactcaggcggcacaaaagttcattatgcttatcagactaatgcctccacctatgaatacattgacattcctttccagaataagtacagccacatttccatgctcgactacaaccccaaagatagggcgctctatgcctggaacaatggtcatcaaatcctatacaatgtaaccttgttccatgtgattcgcagcgatgagttatag

SEQ ID NO: 101862 - DNA, 1377 bp, Artificial Sequence
  derived and/or modified sequence
atgggagaggcccctggccgggagggccggggcccctgcccccagctggagagccccaggagaagaagagtgctgcccaccaaccctgaggagagctggcaggtgtacagcagcgcccaggacagcgagggccgctgcatctgcaccgtggtggccccccagcagaccatgtgcagcagagatgcccggaccaagcagctgcggcagctgctggagaaggtgcagaacatgagccagagcattgaggtgctggacaggaggacccagagggacctgcagtatgtggagaagatggagaaccagatgaagggcctggagagcaagttcaagcaggtggaggagagccacaagcagcacctggcccggcagttcaaggccatcaaggccaagatggatgagctgcggcccctcatccctgtgctggaggagtacaaggcagatgccaagctggtgctgcagttcaaggaggaggtgcagaacctgacctctgtgctgaatgagctgcaggaggagatcggggcctatgactatgatgagctgcagagccgggtgagcaacctggaggagcggctgcgggcctgcatgcagaagctggcctgtgggaagctgaccggcatcagtgaccctgtgacagtgaagaccagcggcagcagatttggctcctggatgacagaccccctggcccctgagggggacaacagagtgtggtacatggatggctaccacaacaacagatttgtgcgggagtacaagtccatggtggacttcatgaacacagacaacttcaccagccaccggctgccccacccctggagcggcaccggccaggtggtgtacaacggcagcatctacttcaacaagttccagagccacatcatcatccgctttgacctgaagacagagaccatcctgaagaccaggagcctggactatgccggctacaacaacatgtaccactacgcctggggcggccacagcgacatcgacctgatggtggatgaaagtggcctgtgggccgtgtatgccaccaaccagaatgccggcaacatcgtggtgtcccggctggaccctgtgtccctgcagaccctgcagacctggaacaccagctaccccaagaggtctgctggggaggccttcatcatctgtggcaccctgtatgtgaccaacggctacagcggcggcaccaaggtgcactacgcctaccagaccaatgccagcacctatgagtacatcgacatccccttccagaacaagtacagccacatctccatgctggactacaaccccaaggaccgggccctgtatgcctggaacaacggccaccagatcctgtacaacgtgaccctcttccacgtgatccgcagtgatgagctgtag

SEQ ID NO: 101863 - DNA, 1377 bp, Artificial Sequence
  derived and/or modified sequence
atgggcgaggcccccggccgggagggccggggcccctgcccccagctggaaagccctagaagaaggcgggtgctcccaaccaatcccgaggagtcatggcaggtttactcatccgcccaggattccgagggacgttgtatttgtacggtggttgctccacaacagaccatgtgttcgcgcgacgcacgtactaagcagctccgccaactgctggaaaaagtgcaaaacatgagccagtccattgaagtattggatcgcagaacacagcgggacctccaatacgtggagaagatggagaaccagatgaaaggcctggagtccaagtttaagcaagtcgaagagtcacataagcagcatctggctcgtcagtttaaagccatcaaggcaaaaatggacgaactccgcccattgataccggtccttgaggaatacaaggccgatgccaagctcgtgctgcagttcaaggaggaggtacaaaatctgacatctgtgctgaacgaattgcaggaggagatcggcgcttacgactatgatgaactccagagcagagtgtccaaccttgaggaaaggttgcgggcatgcatgcagaagctggcttgcggaaagttaacaggaatctctgatcccgtcactgttaagacctccggctctaggtttggatcctggatgacggaccccctcgcccccgaaggtgataatcgggtgtggtatatggatggttaccacaataacaggtttgttcgggagtataagtctatggtcgactttatgaacaccgataacttcaccagtcacaggctccctcatccctggtcagggaccggacaggtggtgtacaatggcagcatttactttaataagtttcagtcccatatcataatccggtttgacctaaaaactgagaccattctgaaaacccggtctttagattacgccggatataataacatgtatcattacgcttgggggggacactccgatatagacctgatggtggacgagtctggtctctgggccgtctacgctaccaaccaaaatgctggcaacattgtagtctctaggttggaccccgtcagtctacagaccctgcagacttggaacacctcctatcctaaacgatccgccggagaggcctttatcatttgtggtacgctctacgtgacaaacggatatagcggaggcacaaaagtgcattacgcctatcagacgaatgcttccacctacgagtatatcgacattccttttcagaacaagtacagccatatttctatgctggactacaaccccaaggacagggccttgtatgcatggaacaacggccaccagattttgtataacgtgactctgtttcacgtgatccgctctgacgaactgtag

SEQ ID NO: 101864 - DNA, 2492 bp, Artificial Sequence
  derived and/or modified sequence
gaatcaccgcggaaaagggctccagtaggcaggacggcgccgtctctctgccggcaacctttgccccaaagcggaccctctgcggggatcggagagggatgccccggcgtgaggatgggagaagccccgggacgggagggccgcgggccgtgcccccagctggagtccccgcgccgccgccgggtgctgcccaccaaccctgaggagagctggcaggtgtacagctctgcccaggacagcgagggcaggtgtatctgcacagtggtcgctccacagcagaccatgtgttcacgggatgcccgcacaaaacagctgaggcagctactggagaaggtgcagaacatgtctcaatccatagaggtcttggacaggcggacccagagagacttgcagtacgtggagaagatggagaaccaaatgaaaggactggagtccaagttcaaacaggtggaggagagtcataagcaacacctggccaggcagtttaaggcgataaaagcgaaaatggatgaacttaggcctttgatacctgtgttggaagagtacaaggccgatgccaaattggtattgcagtttaaagaggaggtccagaatctgacgtcagtgcttaacgagctgcaagaggaaattggcgcctatgactacgatgaacttcagagcagagtgtccaatcttgaagaaaggctccgtgcatgcatgcaaaaactagcttgcgggaagttgacgggcatcagtgaccccgtgactgtcaagacctccggctcgaggttcggatcctggatgacagaccctctcgcccctgaaggcgataaccgggtgtggtacatggacggctatcacaacaaccgcttcgtacgtgagtacaagtccatggttgacttcatgaacacggacaatttcacctcccaccgtctcccccacccctggtcgggcacggggcaggtggtctacaacggttctatctacttcaacaagttccagagccacatcatcatcaggtttgacctgaagacagagaccatcctcaagacccgcagcctggactatgccggttacaacaacatgtaccactacgcctggggtggccactcggacatcgacctcatggtggacgagagcgggctgtgggccgtgtacgccaccaaccagaacgctggcaacatcgtggtcagtaggctggaccccgtgtccctgcagaccctgcagacctggaacacgagctaccccaagcgcagcgccggggaggccttcatcatctgcggcacgctgtacgtcaccaacggctactcagggggtaccaaggtccactatgcataccagaccaatgcctccacctatgaatacatcgacatcccattccagaacaaatactcccacatctccatgctggactacaaccccaaggaccgggccctgtatgcctggaacaacggccaccagatcctctacaacgtgaccctcttccacgtcatccgctccgacgagttgtagctccctcctcctggaagccaagggcccacgtcctcaccacaaagggactcctgtgaaactgctgccaaaaagataccaataacactaacaataccgatcttgaaaaatcatcagcagtgcggattctgacatcgagggatggcattacctccgtgtttctccctttcgagccggcgggccacagacgtcggaagaaactcccgtatttgcagctggaactgcagcccacggcgccccggttttcctccccgccctgtccctctctggtcaaacaacatactaaagaggcgaggcaatgactgttggccagttctcaccggggaaaaacccactgttaggatggcatgaacatttccttagatcgtggtcagctccgaggaatgtggcgtccaggctctttgagagccatgggctgcacccggccgtaggctagtgtaactcgcatcccattgcagtgccgtttcttgactgtgttgctgtctcttagattaaccgtgctgaggctccacatagctcctggacctgtgtctagtacatactgaagcgatggtcagagtgtgtagagtgaagttgctgtgcccacattgtttgaactcgcgtaccccgtagatacattgtgcaacgttcttctgttattcccttgaggtggtaacttcgtatgttcagtttatgcgatgattgttgtaaatgcaatgccgtagtttggattaataagtggatggtttttgtttctaaaaagaaaaaaaaaatcagtgttcacccttatagagacatagtcaagttcatgttgataataatcaaaggaattactctcttcttgttaaattagctaaatcatgtaaccgcagataggaagggctcgcctggggaaactctggtttccgatgggacaggaaagtcatacgggcaacagtatgcggaaagtacgttttttaagtaaaaaacaaaggcaaactttgtactatccagttatctaaggaacaataaaaacattaggagat

SEQ ID NO: 101865 - DNA, 1377 bp, Artificial Sequence
  derived and/or modified sequence
atgggcgaagctccaggcagggagggaagaggcccttgcccacagctagaaagtccgcgacgtaggagagtcctgcctacaaacccagaggagtcctggcaagtttactcatcagcgcaggattccgagggcaggtgtatttgtaccgtcgtggctccacagcagacaatgtgctctcgggatgcccgaaccaagcagctgaggcaactgctagagaaggttcagaacatgagtcagagtatagaagttcttgaccgacggactcagcgcgacctgcagtatgtggagaagatggagaaccagatgaaagggctcgaatcaaaatttaagcaggtagaagagtctcacaagcagcacctggcacgccagtttaaggctatcaaggccaaaatggacgaactgcggccattgatccctgttttggaggaatacaaggctgacgctaagctcgtactgcagttcaaagaggaagtgcagaacctgacaagtgtgctgaacgagctgcaggaggaaatcggggcatatgattatgacgagctgcagtcaagggtgagcaatctcgaggagcgccttagggcatgtatgcagaagctagcatgcggtaagctgactgggatctctgaccctgtcacagtcaaaacctccgggtccaggttcggatcctggatgactgacccactggccccagagggcgataaccgtgtgtggtacatggatggctaccacaataataggtttgttcgggaatacaagtcgatggttgatttcatgaacactgacaatttcacttcccaccggctccctcatccatggtctggtaccggccaggttgtctataatgggagtatatacttcaacaagtttcaatcccacataataattcgtttcgacttaaaaaccgagaccatcctgaagacaagatctctggattacgcaggatataacaatatgtatcattacgcctgggggggtcactccgatattgacctcatggtagacgaaagcggcctctgggccgtgtatgctacaaaccaaaacgccggtaatatagtcgtctctcggcttgaccccgtgagcctacaaactctgcaaacctggaacacgagttatccaaaaagatctgctggagaagctttcatcatctgcgggacactgtatgtgacaaacgggtattccggcggtactaaggttcattacgcttaccagacgaacgcaagcacttacgagtatatcgatattccatttcaaaataaatatagccacatcagcatgctggattacaatcctaaagatcgcgcactgtacgcatggaacaatgggcatcagatcctctacaacgtcaccctgttccacgtgatccgaagcgatgaactgtag

SEQ ID NO: 101866 - DNA, 1377 bp, Artificial Sequence
  derived and/or modified sequence
atgggggaggcacccggacgggaaggtagaggaccatgcccccaactggagagcccacgcagaaggcgcgtgctgcccacaaaccctgaggaaagttggcaagtatattccagtgcacaggattcggagggccggtgcatttgtactgtagtagccccacaacagaccatgtgttccagagatgcccggactaaacaacttaggcagttattagagaaagtgcagaatatgtctcagtcaatagaggtactggatagaagaacccaacgcgacctacaatacgttgaaaagatggagaaccagatgaaggggctggagtcaaagttcaagcaggtggaggagagccacaagcaacatttggccaggcaattcaaagcgattaaagctaaaatggacgaattaagacccctgatacctgtgcttgaagagtacaaagctgatgctaaactagttctgcaattcaaggaagaggtccagaacctgacctccgttctgaacgagctgcaggaggagattggtgcatatgactacgacgaactgcaatcaagagtgtctaatctagaggaaaggctgcgggcctgtatgcaaaaactcgcttgtggaaaattaaccggaatcagtgacccagtcactgtgaagacgagcggcagccgcttcggttcctggatgaccgacccactcgcccctgaaggggacaatagagtctggtacatggacggttaccacaataatcgcttcgtccgtgagtataaatccatggtcgatttcatgaacaccgacaacttcacatctcacagactccctcatccatggagtggcaccggccaagtggtgtacaatggttcgatctactttaacaaattccagtcccatatcattatccgtttcgacctgaagactgaaactatcctgaaaacccggagccttgattacgccggctacaacaatatgtaccactacgcctggggcgggcacagcgatatcgatctcatggtggacgagtctggcctatgggcagtatacgccactaaccaaaacgccggaaatatagttgtgagcagactcgaccctgtatcactgcagacattgcagacctggaacacgagttaccctaaaaggtccgccggcgaggccttcataatttgcggcactctatatgtcactaatggttactccggtggcacaaaagtacactacgcttatcagaccaatgcttcaacctatgagtacatcgatataccgttccaaaataagtacagccacatcagcatgctggattataacccaaaggatagggcactctacgcctggaataatggtcatcagatcctttacaatgtgaccctgttccacgtgattaggagcgacgaactctag

SEQ ID NO: 101867 - DNA, 1377 bp, Artificial Sequence
  derived and/or modified sequence
atgggggaggcacccggacgggaaggtagaggaccatgcccccaactggagagcccacgcagaaggcgcgtgctgcccacaaaccctgaggaaagttggcaagtatattccagtgcacaggattcggagggccggtgcatttgtactgtagtagccccacaacagaccatgtgttccagagatgcccggactaaacaacttaggcagttattagagaaagtgcagaatatgtctcagtcaatagaggtactggatagaagaacccaacgcgacctacaatacgttgaaaagatggagaaccagatgaaaggtctggagtccaagtttaagcaggtagaggaatcccataaacagcatttagccagacagttcaaggccatcaaagcaaaaatggacgaattgagaccccttatcccagtgctggaagagtacaaagccgatgcaaaactcgtgctgcagtttaaggaagaagtccaaaatctaacttcagtcctaaacgaactccaggaagaaattggtgcttacgattatgatgagttgcagtcacgcgtcagtaatctggaagaacgcctgcgcgcttgtatgcagaaactcgcttgcggaaagctaacaggcatctccgatccagtcacagttaaaaccagtggatcgcgttttggcagctggatgacagacccactggctcctgaaggcgataatagagtgtggtatatggacggctaccataataatcgcttcgtacgggaatacaaatccatggtcgatttcatgaatacagacaattttacatcgcaccgcctgccacacccttggagcggtacggggcaagtcgtatataatggttccatctacttcaataagtttcagtcccatataataattcgattcgacctgaagacggaaactatcctgaaaacccggagccttgattacgccggctacaacaatatgtaccactacgcctggggcgggcacagcgatatcgatctcatggtggacgagtctggcctatgggcagtatacgccactaaccaaaacgccggaaatatagttgtgagcagactcgaccctgtatcactgcagacattgcagacctggaacacgagttaccctaaaaggtccgccggcgaggccttcataatttgcggcactctatatgtcactaatggttactccggtggcacaaaagtacactacgcttaccaaacaaatgctagtacctacgaatatatcgatataccatttcagaacaagtacagtcacataagtatgctggactacaaccccaaggatcgagccctctatgcatggaacaacggccatcagattctctacaacgtaactctttttcatgtcatccgctccgatgagttatag

SEQ ID NO: 101868 - DNA, 1377 bp, Artificial Sequence
  derived and/or modified sequence
atgggcgaggcccccggcagagagggcagaggcccctgcccccagctggagagccccagaagaagaagagtgctgcccaccaaccccgaggagagctggcaggtgtacagcagcgcccaggacagcgagggcagatgcatctgcaccgtggtggccccccagcagaccatgtgcagcagagacgccagaaccaagcagctgagacagctgctggagaaggtgcagaacatgagccagagcatcgaggtgctggacagaagaacccagagagacctgcagtacgtggagaagatggagaaccagatgaagggcctggagagcaagttcaagcaggtggaggagagccacaagcagcacctggccagacagttcaaggccatcaaggccaagatggacgagctgagacccctgatccccgtgctggaggagtacaaggccgacgccaagctggtgctgcagttcaaggaggaggtgcagaacctgaccagcgtgctgaacgagctgcaggaggagatcggcgcctacgactacgacgagctgcagagcagagtgagcaacctggaggagagactgagagcctgcatgcagaagctggcctgcggcaagctgaccggcatcagcgaccccgtgaccgtgaagaccagcggcagcagattcggcagctggatgaccgaccccctggcccccgagggcgacaacagagtgtggtacatggacggctaccacaacaacagattcgtgagagagtacaagagcatggtggacttcatgaacaccgacaacttcaccagccacagactgccccacccctggagcggcaccggccaggtggtgtacaacggcagcatctacttcaacaagttccagagccacatcatcatcagattcgacctgaagaccgagaccatcctgaagaccagaagcctggactacgccggctacaacaacatgtaccactacgcctggggcggccacagcgacatcgacctgatggtggacgagagcggcctgtgggccgtgtacgccaccaaccagaacgccggcaacatcgtggtgagcagactggaccccgtgagcctgcagaccctgcagacctggaacaccagctaccccaagagaagcgccggcgaggccttcatcatctgcggcaccctgtacgtgaccaacggctacagcggcggcaccaaggtgcactacgcctaccagaccaacgccagcacctacgagtacatcgacatccccttccagaacaagtacagccacatcagcatgctggactacaaccccaaggacagagccctgtacgcctggaacaacggccaccagatcctgtacaacgtgaccctgttccacgtgatcagaagcgacgagctgtag

SEQ ID NO: 101869 - DNA, 912 bp, Artificial Sequence
  derived and/or modified sequence
atgaagattattcacgaggacggttacagtgaggaggagtgcagacaataccgtgctgtggtgtattctaatacgatacagagcatcatggccatagtgaaagccatgggaaacctccaaatagacttcgctgaccccagcagggccgatgatgcgagacaactgtttgccctttcatgcacggctgaggagcagggtgtgctgcccgatgacctgtctggagttatacgccgactgtgggccgaccatggagtgcaagcctgctttgggcgatcacgggagtatcaactcaacgactctgctgcctactatctgaacgatctggaacgcatagcgcaaagcgattacattccaacccaacaggatgtcctgaggactagggttaagaccaccggcatcgtcgaaacccacttcacattcaaggatcttcatttcaagatgttcgatgtaggcggccagcgaagcgagagaaaaaagtggatccactgtttcgaaggggtcaccgccattatattttgcgtggcgctttccgcttatgaccttgtcctagccgaggatgaggagatgaataggatgcatgagagcatgaaactattcgacagcatttgcaataacaaatggtttacagatacatccattatactgttcttgaataagaaagatttattcgaggaaaaaattacacattcacccctcaccatttgcttccctgagtacacaggcgctaataaatacgatgaggcagcatcttatattcagagcaaatttgaggatctcaataaacggaaggacacaaaggaaatttatacacattttacctgcgccaccgatacaaagaatgtacaatttgtgttcgacgcggttacggacgtaataattaaaaacaacctcaaggattgtggcctgttttag

SEQ ID NO: 101870 - DNA, 2153 bp, Artificial Sequence
  derived and/or modified sequence
agtcgctcggaactgccgacccgagtgcttcccgcagagggctggtggtgggagcggagtgggtcgggcggggccgagccgggccgtgggccgtgtgggggccgggcggcggccgggccggcggacggcgggatgggctgcaccgtgagcgccgaggacaaggcggcggccgagcgctctaagatgatcgacaagaacctgcgggaggacggagagaaggcggcgcgggaggtgaagttgctgctgttgggatcatccacgaggatggctactccgaggaggaatgccggcagtaccgggcggttgtctacagcaacaccatccagtccatcatggccattgtcaaagccatgggcaacctgcagatcgactttgccgacccctccagagcggacgacgccaggcagctatttgcactgtcctgcaccgccgaggagcaaggcgtgctccctgatgacctgtccggcgtcatccggaggctctgggctgaccatggtgtgcaggcctgctttggccgctcaagggaataccagctcaacgactcagctgcctactacctgaacgacctggagcgtattgcacagagtgactacatccccacacagcaagatgtgctacggacccgcgtaaagaccacggggatcgtggagacacacttcaccttcaaggacctacacttcaagatgtttgatgtgggtggtcagcggtctgagcggaagaagtggatccactgctttgagggcgtcacagccatcatcttctgcgtagccttgagcgcctatgacttggtgctagctgaggacgaggagatgaaccgcatgcatgagagcatgaagctattcgatagcatctgcaacaacaagtggttcacagacacgtccatcatcctcttcctcaacaagaaggacctgtttgaggagaagatcacacacagtcccctgaccatctgcttccctgagtacacaggggccaacaaatatgatgaggcagccagctacatccagagtaagtttgaggacctgaataagcgcaaagacaccaaggagatctacacgcacttcacgtgcgccaccgacaccaagaacgtgcagttcgtgtttgacgccgtcaccgatgtcatcatcaagaacaacctgaaggactgcggcctcttctgaggggcagcggggcctggcgggatgggccaccgccgactttgtaccccccaacccctgaggaagatgggggcaagaagatcacgctccccgcctgttcccccgccgcttttctcctctttcctctctttgttctcagctccccctgtcccctcagctccagacgtaggggaggggttgccacaggcctccctgtttgaagcctgcccttgtctgagatgctggtaatggccatggtacccccttctgggcatctgttctggtttttaaccattgtcttgttctgtgatgaggggaggggggcacatgctgagtctcccaaggctgcgtctggaggggcccctgcttctccagcctggacccccagctttgcccaacaccagcccctgccccagcccaagtccaaatgtttacagggagcctcctgcccagtcccccaaccccagccgctcggaggccccaaaggaaaaagcacaagaagcgtgagacgccaccattcctggaaaccacagtccacctgctcattctcgtagctttttaaaaaaatgaaagtaaaggaaaaaaaaaaaactgcaaatctagaaaactttttagagaaaaactatttaaaactgtcagatcctgaccagcaagcccccccccagccccccttccaagtgactccgtgccttgagtgtgtctgcgtgtttacacccgtccctctgctggccgcccccgtgcgagcggcacccctgccctgccctccacagaattgggttccaagggctgttccagacaactgccaacgtcactgagggccctgccccagcggccctggccccaggctctattaacctaaaatgtagctccctagcgctaacctaggaaccgccgctgcctgctggggggccacgcccctcatgcccttgtcccaggcccggggccttcagcgttgaacacttccttgcttttttcacatgttttatggaattgttcacctggtttgaaataataaaatgt

SEQ ID NO: 101871 - DNA, 912 bp, Artificial Sequence
  derived and/or modified sequence
atgaagatcatccatgaagatggctacagcgaggaggagtgccggcagtacagagctgtggtgtacagcaacaccatccagagcatcatggccatcgtgaaggccatgggcaacctgcagattgactttgctgaccccagcagagcagatgatgcccggcagctgtttgccctgagctgcacagctgaggagcagggcgtgctgcctgatgacctgtctggagtcatccggcggctgtgggccgaccatggagtgcaggcctgcttcggccgcagccgggagtaccagctgaatgacagcgctgcctactacctgaatgacctggagagaattgcccagagcgactacatccccacccagcaggatgtgctgcggaccagggtgaagaccactggaattgtggagacccacttcaccttcaaggacctgcacttcaagatgtttgatgtgggcggccagaggtctgagaggaagaagtggatccactgctttgagggcgtgacagccatcatcttctgtgtggccctgagcgcctatgacctggtgctggctgaagatgaggagatgaacaggatgcatgagagcatgaagctgtttgacagcatctgcaacaacaagtggttcacagacaccagcatcatcctcttcctgaacaagaaggacctgtttgaggagaagatcacccacagccccctgaccatctgcttccctgagtacaccggggccaacaagtatgatgaggccgccagctacatccagagcaagtttgaggacctgaacaagaggaaggacaccaaggagatctacacccacttcacctgtgccacagacaccaagaatgtgcagtttgtgtttgatgctgtgacagatgtgatcatcaagaacaacctgaaggactgtggcctcttctag

SEQ ID NO: 101872 - DNA, 912 bp, Artificial Sequence
  derived and/or modified sequence
atgaagatcatccacgaggacggctacagcgaggaggagtgccggcagtaccgcgccgttgtctatagcaataccatacagtctatcatggccatagtcaaggctatgggaaacttacagatagacttcgctgacccctctagagccgatgatgctcgccaattgtttgcgctgtcctgtactgcagaggagcagggtgttctgccagatgacctctctggtgtgattcggcgactgtgggcagaccacggcgtccaagcctgcttcgggaggagcagggagtaccaactgaacgattctgccgcatattacctgaacgacctcgaacgcatcgcccaaagcgattatataccaactcaacaagatgtgctcagaacaagggtgaagacaactggcatcgtggagactcactttacatttaaagacttgcacttcaagatgtttgacgtgggcgggcaacgctccgagaggaagaagtggatacactgttttgaaggagtgacagccattatcttttgcgtagcactgtccgcttatgatctggtgcttgcagaggatgaagagatgaataggatgcacgagagcatgaagctgttcgattctatctgcaacaacaagtggtttaccgatactagtatcatcctctttctgaacaaaaaagatctttttgaggagaagatcacacattctcctcttacaatctgtttcccagaatacacaggtgccaataagtatgacgaagcagctagttatattcagtccaaatttgaagacttaaataagaggaaagataccaaagagatttacacgcactttacctgtgcgactgacaccaagaatgtacagttcgtgttcgatgcagtcacagacgtgattattaagaataacctgaaggattgcggacttttttag

SEQ ID NO: 101873 - DNA, 912 bp, Artificial Sequence
  derived and/or modified sequence
atgaaaatcatccacgaggacggatattctgaagaggagtgccggcagtacagggctgttgtctactctaatacaatacagtcgattatggcaatcgtgaaagccatgggcaacctccagattgacttcgccgacccgagccgggcagacgacgctcgccagctctttgcactaagctgcactgccgaggagcagggtgtcctgcccgacgacctgagcggagttattcgcagactctgggcagatcatggagtgcaagcttgcttcgggcgaagtagagagtatcagctgaacgattctgctgcatattatttgaacgatctcgagagaatcgcccaaagcgattacataccaactcagcaggatgtcctgcggacgcgcgtaaagactacagggatcgtggagacccatttcacgtttaaggatctgcactttaagatgttcgacgtgggcggacagcggtctgaacgcaagaagtggatccattgttttgaaggggttactgccatcatcttttgcgtagcactgtctgcctatgaccttgtgctcgcagaggacgaagaaatgaaccgcatgcacgagtctatgaagctgtttgactccatttgtaataataagtggtttaccgacacatcaattatactctttctaaataagaaagacctcttcgaagaaaaaattactcatagccccctaacgatctgttttcctgagtatacaggcgcaaacaaatatgatgaggctgccagctacatccaaagcaagttcgaggaccttaataaacggaaagatactaaagaaatttacactcactttacatgcgcaacagatacgaagaatgtgcaatttgtgtttgacgcggtgacggatgtaatcataaaaaataaccttaaggactgtgggctgttctag

SEQ ID NO: 101874 - DNA, 912 bp, Artificial Sequence
  derived and/or modified sequence
atgaagatcatccacgaggacggctacagcgaggaggagtgcagacagtacagagccgtggtgtacagcaacaccatccagagcatcatggccatcgtgaaggccatgggcaacctgcagatcgacttcgccgaccccagcagagccgacgacgccagacagctgttcgccctgagctgcaccgccgaggagcagggcgtgctgcccgacgacctgagcggcgtgatcagaagactgtgggccgaccacggcgtgcaggcctgcttcggcagaagcagagagtaccagctgaacgacagcgccgcctactacctgaacgacctggagagaatcgcccagagcgactacatccccacccagcaggacgtgctgagaaccagagtgaagaccaccggcatcgtggagacccacttcaccttcaaggacctgcacttcaagatgttcgacgtgggcggccagagaagcgagagaaagaagtggatccactgcttcgagggcgtgaccgccatcatcttctgcgtggccctgagcgcctacgacctggtgctggccgaggacgaggagatgaacagaatgcacgagagcatgaagctgttcgacagcatctgcaacaacaagtggttcaccgacaccagcatcatcctgttcctgaacaagaaggacctgttcgaggagaagatcacccacagccccctgaccatctgcttccccgagtacaccggcgccaacaagtacgacgaggccgccagctacatccagagcaagttcgaggacctgaacaagagaaaggacaccaaggagatctacacccacttcacctgcgccaccgacaccaagaacgtgcagttcgtgttcgacgccgtgaccgacgtgatcatcaagaacaacctgaaggactgcggcctgttctag

SEQ ID NO: 101875 - DNA, 825 bp, Artificial Sequence
  derived and/or modified sequence
atggccattgtgaaggcaatggggaacctgcagatcgactttgctgacccgagtcgcgccgacgacgctcgccagcttttcgctctttcgtgcacagccgaagaacagggagtgctccccgacgatctgagcggtgtgattagaaggttatgggctgaccacggcgtgcaggcgtgctttggacggtcacgggagtatcagctgaatgacagcgccgcttattacttgaacgatttagagaggatcgctcagagcgactatattcctactcagcaggacgtgctgagaactcgggtcaaaacaactggaatcgttgagacccatttcacattcaaagatctgcacttcaagatgtttgatgtaggcggtcaacgcagcgagcgcaagaagtggatccattgcttcgaaggcgtgaccgccattattttttgtgtagccctgtctgcatacgatttagtacttgcagaagatgaggagatgaataggatgcatgagtccatgaagctctttgattctatttgtaacaacaaatggtttactgacacctcaattatactgtttctgaacaaaaaggatctgttcgaggaaaagatcactcattctccactgaccatttgcttcccagaatatactggtgcaaacaaatatgatgaggctgctagctacatccaaagcaaattcgaagatctaaacaaacgcaaagacaccaaggaaatttacacacactttacatgcgcaaccgacactaagaacgtgcaatttgtgttcgatgcagttaccgatgttataatcaaaaacaatctgaaagactgtggccttttctag

SEQ ID NO: 101876 - DNA, 825 bp, Artificial Sequence
  derived and/or modified sequence
atggccatcgtgaaggccatgggcaacctgcagattgactttgctgaccccagcagagcagatgatgcccggcagctgtttgccctgagctgcacagctgaggagcagggcgtgctgcctgatgacctgagcggggtcatccggcggctgtgggccgaccacggcgtgcaggcctgcttcggccgcagccgggagtaccagctgaatgattctgctgcctactacctgaatgacctggagcgcatcgcccagagcgactacatccccacccagcaggatgtgctgcggaccagggtgaagaccaccggcatcgtggagacccacttcaccttcaaggacctgcacttcaagatgtttgatgtgggcggccagaggtctgagaggaagaagtggatccactgctttgaaggagtgacagccatcatcttctgtgtggccctgagcgcctatgacctggtgctggccgaggatgaggagatgaacaggatgcatgagagcatgaagctgtttgacagcatctgcaacaacaagtggttcacagacaccagcatcatcctcttcctgaacaagaaggacctgtttgaggagaagatcacccacagccccctgaccatctgcttccctgagtacacaggagccaacaagtatgatgaagctgccagctacatccagagcaagtttgaggacctgaacaagaggaaggacaccaaggagatctacacccacttcacctgtgccacagacaccaagaatgtgcagtttgtgtttgatgctgtgacagatgtgatcatcaagaacaacctgaaggactgtggcctcttctag

SEQ ID NO: 101877 - DNA, 825 bp, Artificial Sequence
  derived and/or modified sequence
atggccatcgtgaaggccatgggcaacctgcagatcgacttcgccgacccgtccagggccgatgatgctcgccagctgtttgccctcagttgcacagccgaagaacagggcgtgttgcctgatgacctgagtggcgtaattcgtcggctctgggccgaccacggagttcaggcctgttttggcagaagccgcgaatatcaactgaacgattctgccgcttactacctaaacgacctcgagaggatcgcccagtcagactacattccaacacagcaagatgtgctgaggacccgagtgaaaaccactggcattgtggagacccattttacttttaaagacctgcacttcaaaatgttcgacgttgggggccagcggtccgagcgcaagaaatggattcattgcttcgagggcgttacagccattatcttttgcgtggcactctctgcctacgatttagtgctggcggaagatgaggagatgaataggatgcacgagagtatgaagctattcgattctatttgtaataataaatggttcaccgatacaagtatcattttatttttgaacaaaaaggacctgttcgaagagaagatcactcactccccattaactatttgctttccggagtatactggagccaacaagtacgacgaagccgccagttatatacagagtaagtttgaggatctcaacaaacggaaagacactaaagaaatttatactcacttcacgtgtgccacagacaccaaaaatgttcagttcgtgtttgacgccgtaacagacgtgattattaagaacaatctgaaagactgcggactgttttag

SEQ ID NO: 101878 - DNA, 825 bp, Artificial Sequence
  derived and/or modified sequence
atggccatcgtcaaagctatggggaacctccagatagactttgccgaccctagccgcgcagatgatgcgcgtcagctgttcgctctgtcctgtacagccgaggagcagggagtgctgcccgacgatttatccggagtaatcagacgcttgtgggccgatcatggggtgcaagcgtgttttggtaggtcgcgtgagtaccagcttaacgatagcgccgcttactatctgaacgatcttgaaaggattgcgcagtccgactacattcccactcagcaggatgtgttgcgcacgcgagtgaaaactactggcattgtggagacccacttcacattcaaagatctgcatttcaagatgtttgacgtaggcggacagcgttccgagcgcaagaaatggatccattgttttgaaggagtaacagcgatcattttttgcgtggccctgtcagcatacgatctagtcctagcagaggacgaggaaatgaaccgaatgcatgagtctatgaagttattcgattctatttgcaacaacaagtggttcactgacaccagcatcatcctgtttttgaataagaaggacctgtttgaggaaaaaattacacatagccctctgactatatgctttcccgagtatacgggtgccaacaagtatgatgaggcagccagctacatccagtctaagttcgaagaccttaataagagaaaagatacgaaagagatctatacgcatttcacttgcgctaccgatactaagaacgtgcagtttgtgttcgacgcggttactgacgtcatcatcaaaaataatctgaaggattgcggactcttctag

SEQ ID NO: 101879 - DNA, 825 bp, Artificial Sequence
  derived and/or modified sequence
atggccatcgtgaaggccatgggcaacctgcagatcgacttcgccgaccccagcagagccgacgacgccagacagctgttcgccctgagctgcaccgccgaggagcagggcgtgctgcccgacgacctgagcggcgtgatcagaagactgtgggccgaccacggcgtgcaggcctgcttcggcagaagcagagagtaccagctgaacgacagcgccgcctactacctgaacgacctggagagaatcgcccagagcgactacatccccacccagcaggacgtgctgagaaccagagtgaagaccaccggcatcgtggagacccacttcaccttcaaggacctgcacttcaagatgttcgacgtgggcggccagagaagcgagagaaagaagtggatccactgcttcgagggcgtgaccgccatcatcttctgcgtggccctgagcgcctacgacctggtgctggccgaggacgaggagatgaacagaatgcacgagagcatgaagctgttcgacagcatctgcaacaacaagtggttcaccgacaccagcatcatcctgttcctgaacaagaaggacctgttcgaggagaagatcacccacagccccctgaccatctgcttccccgagtacaccggcgccaacaagtacgacgaggccgccagctacatccagagcaagttcgaggacctgaacaagagaaaggacaccaaggagatctacacccacttcacctgcgccaccgacaccaagaacgtgcagttcgtgttcgacgccgtgaccgacgtgatcatcaagaacaacctgaaggactgcggcctgttctag

SEQ ID NO: 101880 - protein, 339 aa, Artificial Sequence
  derived and/or modified sequence
MEYAGHLPASSAQGTILACTSCTGAGESGKSTIVKQMKIIHEDGYSEEECRQYRAVVYSNTIQSIMAIVKAMGNLQIDFADPSRADDARQLFALSCTAEEQGVLPDDLSGVIRRLWADHGVQACFGRSREYQLNDSAAYYLNDLERIAQSDYIPTQQDVLRTRVKTTGIVETHFTFKDLHFKMFDVGGQRSERKKWIHCFEGVTAIIFCVALSAYDLVLAEDEEMNRMHESMKLFDSICNNKWFTDTSIILFLNKKDLFEEKITHSPLTICFPEYTGANKYDEAASYIQSKFEDLNKRKDTKEIYTHFTCATDTKNVQFVFDAVTDVIIKNNLKDCGLF

SEQ ID NO: 101881 - DNA, 1020 bp, Artificial Sequence
  derived and/or modified sequence
atggagtacgccggacatctaccagctagttctgctcaagggactattctggcatgcacatcgtgcaccggagctggggagagcggaaagtcgacaatcgtgaaacagatgaaaataattcacgaagatggctactcagaagaggagtgtcgccagtaccgcgctgtggtttacagtaatacaatacaatccatcatggctatagttaaggctatgggcaatctgcagattgacttcgcggatccttctagggctgacgatgcgagacaactatttgccctgtcatgcacagctgaggagcagggagtgctcccggacgatctcagcggcgtaatcagaaggttgtgggccgatcatggcgtccaggcttgcttcggtagaagccgcgagtatcagctgaacgactcagctgcctattacctgaatgatctcgagcgtatagctcaatctgattacattccaacccagcaggacgtcctgaggacacgggtgaagacaacaggcatagtcgagactcactttacatttaaagatctccattttaaaatgtttgacgtcggaggccaacgcagcgaacgcaaaaaatggatacactgcttcgaaggagttactgccattattttctgtgtagccctatcggcctatgatctagtgctggccgaggacgaagagatgaatcgcatgcacgagtccatgaaattgttcgactccatttgtaacaataagtggttcaccgatacctcaatcatcctctttctgaataagaaagacctcttcgaggagaaaataactcactctcccctgacaatctgttttcccgagtatacaggagctaataagtatgacgaggctgcttcgtacatccagtcaaaattcgaggacctgaataaacgcaaagatactaaggaaatttacactcactttacttgtgctaccgacaccaaaaatgttcagttcgtgtttgatgctgtgaccgatgtgattataaaaaacaacctgaaagactgcggcctcttctag

SEQ ID NO: 101882 - DNA, 2016 bp, Artificial Sequence
  derived and/or modified sequence
atggagtatgcagggcatcttcctgccagctctgcccagggcaccatattggcatgcaccagctgcacaggtgctggggagtcagggaagagcaccatcgtcaagcagatgaagatcatccacgaggatggctactccgaggaggaatgccggcagtaccgggcggttgtctacagcaacaccatccagtccatcatggccattgtcaaagccatgggcaacctgcagatcgactttgccgacccctccagagcggacgacgccaggcagctatttgcactgtcctgcaccgccgaggagcaaggcgtgctccctgatgacctgtccggcgtcatccggaggctctgggctgaccatggtgtgcaggcctgctttggccgctcaagggaataccagctcaacgactcagctgcctactacctgaacgacctggagcgtattgcacagagtgactacatccccacacagcaagatgtgctacggacccgcgtaaagaccacggggatcgtggagacacacttcaccttcaaggacctacacttcaagatgtttgatgtgggtggtcagcggtctgagcggaagaagtggatccactgctttgagggcgtcacagccatcatcttctgcgtagccttgagcgcctatgacttggtgctagctgaggacgaggagatgaaccgcatgcatgagagcatgaagctattcgatagcatctgcaacaacaagtggttcacagacacgtccatcatcctcttcctcaacaagaaggacctgtttgaggagaagatcacacacagtcccctgaccatctgcttccctgagtacacaggggccaacaaatatgatgaggcagccagctacatccagagtaagtttgaggacctgaataagcgcaaagacaccaaggagatctacacgcacttcacgtgcgccaccgacaccaagaacgtgcagttcgtgtttgacgccgtcaccgatgtcatcatcaagaacaacctgaaggactgcggcctcttctgaggggcagcggggcctggcgggatgggccaccgccgactttgtaccccccaacccctgaggaagatgggggcaagaagatcacgctccccgcctgttcccccgccgcttttctcctctttcctctctttgttctcagctccccctgtcccctcagctccagacgtaggggaggggttgccacaggcctccctgtttgaagcctgcccttgtctgagatgctggtaatggccatggtacccccttctgggcatctgttctggtttttaaccattgtcttgttctgtgatgaggggaggggggcacatgctgagtctcccaaggctgcgtctggaggggcccctgcttctccagcctggacccccagctttgcccaacaccagcccctgccccagcccaagtccaaatgtttacagggagcctcctgcccagtcccccaaccccagccgctcggaggccccaaaggaaaaagcacaagaagcgtgagacgccaccattcctggaaaccacagtccacctgctcattctcgtagctttttaaaaaaatgaaagtaaaggaaaaaaaaaaaactgcaaatctagaaaactttttagagaaaaactatttaaaactgtcagatcctgaccagcaagcccccccccagccccccttccaagtgactccgtgccttgagtgtgtctgcgtgtttacacccgtccctctgctggccgcccccgtgcgagcggcacccctgccctgccctccacagaattgggttccaagggctgttccagacaactgccaacgtcactgagggccctgccccagcggccctggccccaggctctattaacctaaaatgtagctccctagcgctaacctaggaaccgccgctgcctgctggggggccacgcccctcatgcccttgtcccaggcccggggccttcagcgttgaacacttccttgcttttttcacatgttttatggaattgttcacctggtttgaaataataaaatgt

SEQ ID NO: 101883 - DNA, 1020 bp, Artificial Sequence
  derived and/or modified sequence
atggagtatgccggccacctgcctgccagcagcgcccagggcaccatcctggcctgcaccagctgcacaggagctggggagagcggcaagagcaccatcgtgaagcagatgaagatcatccatgaagatggctacagcgaggaggagtgccggcagtacagagctgtggtgtacagcaacaccatccagagcatcatggccatcgtgaaggccatgggcaacctgcagattgactttgctgaccccagcagagcagatgatgcccggcagctgtttgccctgagctgcacagctgaggagcagggcgtgctgcctgatgacctgtctggagtcatccggcggctgtgggccgaccatggagtgcaggcctgcttcggccgcagccgggagtaccagctgaatgacagcgctgcctactacctgaatgacctggagagaattgcccagagcgactacatccccacccagcaggatgtgctgcggaccagggtgaagaccactggaattgtggagacccacttcaccttcaaggacctgcacttcaagatgtttgatgtgggcggccagaggtctgagaggaagaagtggatccactgctttgagggcgtgacagccatcatcttctgtgtggccctgagcgcctatgacctggtgctggctgaagatgaggagatgaacaggatgcatgagagcatgaagctgtttgacagcatctgcaacaacaagtggttcacagacaccagcatcatcctcttcctgaacaagaaggacctgtttgaggagaagatcacccacagccccctgaccatctgcttccctgagtacaccggggccaacaagtatgatgaggccgccagctacatccagagcaagtttgaggacctgaacaagaggaaggacaccaaggagatctacacccacttcacctgtgccacagacaccaagaatgtgcagtttgtgtttgatgctgtgacagatgtgatcatcaagaacaacctgaaggactgtggcctcttctag

SEQ ID NO: 101884 - DNA, 1020 bp, Artificial Sequence
  derived and/or modified sequence
atggagtacgccggccacctgcccgccagcagcgcccagggcaccattcttgcttgtactagctgtaccggggccggcgagtccggcaaatccacaatagtcaaacaaatgaaaatcattcacgaggacggctatagcgaggaggagtgcagacagtatcgggcagtggtttattccaatacgatccagagtataatggctatcgttaaggccatgggtaatctacagatcgatttcgcagacccttctagagccgacgacgcacggcagctctttgcactatcatgtaccgcggaagagcagggagtgctgcctgatgatctatcaggtgttatccggcgactttgggctgatcacggcgtccaagcatgcttcggtcggagccgtgaatatcaacttaatgatagtgccgcttactacctgaacgatcttgaaaggatcgcccagtccgactatatccccacgcagcaagatgtgttgcggacaagggtcaaaaccactggcattgtggagacacacttcacgtttaaagacctacatttcaagatgttcgatgttggaggccaacgttccgagaggaaaaaatggatccactgcttcgagggggtgacggccattattttctgcgtcgcgctctcagcctacgatctcgttctcgccgaggatgaggagatgaacagaatgcacgaatcaatgaagctcttcgatagtatctgtaataataaatggtttactgacacgagcatcattctttttcttaataaaaaggacctcttcgaggagaaaattacacacagcccattaacaatatgtttcccagaatacacaggcgccaataaatacgacgaggctgccagttatattcaaagtaagttcgaagaccttaataagaggaaggataccaaggagatttacacacatttcacttgtgcaacagacaccaagaacgtgcagttcgtttttgatgccgtgactgatgtgatcatcaaaaacaacctaaaggattgtgggctgttttag

SEQ ID NO: 101885 - DNA, 1020 bp, Artificial Sequence
  derived and/or modified sequence
atggaatacgccggacacctacccgcaagctctgcccagggcactattctggcctgtacctcctgtacaggcgcaggcgaatctggcaagagcactattgtgaaacagatgaaaatcatccacgaggacgggtactccgaggaggaatgtcgccaataccgggctgtggtgtactcaaataccatccagtccataatggccatcgtcaaggccatgggcaatctgcagattgattttgccgacccttcaagggccgacgatgcaaggcagctgtttgctctcagttgcaccgcggaggaacagggcgtcttacctgacgacttgtcgggagtgatccgtaggctgtgggccgaccatggggtacaggcttgcttcgggaggagtagggagtatcagctgaatgactccgctgcctattacctgaatgacttggaacgtatcgcccagtctgattacataccaacgcagcaggacgtgctcagaacgcgggtaaagacgacaggaatcgttgaaacgcacttcacgttcaaggacctgcactttaaaatgtttgatgttggtggacagagaagtgagaggaagaaatggatccattgcttcgagggcgtgaccgccatcattttctgcgtggctctctctgcatatgacctggttttggcggaggacgaggagatgaatagaatgcatgagtctatgaagctcttcgactctatatgtaacaacaagtggttcactgacacaagcattatcctttttctgaataagaaggatttgttcgaagaaaagattacccactcccccctaaccatttgttttcctgaatacacgggcgctaacaagtacgatgaggctgcatcttatatccagtctaagttcgaggacctcaataaaaggaaagataccaaagaaatatatacccacttcacatgtgccaccgacaccaagaacgtgcagttcgtattcgatgcggtgaccgacgtcattatcaaaaacaacctaaaggactgcggcctgttctag

SEQ ID NO: 101886 - DNA, 1020 bp, Artificial Sequence
  derived and/or modified sequence
atggagtacgccggccacctgcccgccagcagcgcccagggcaccatcctggcctgcaccagctgcaccggcgccggcgagagcggcaagagcaccatcgtgaagcagatgaagatcatccacgaggacggctacagcgaggaggagtgcagacagtacagagccgtggtgtacagcaacaccatccagagcatcatggccatcgtgaaggccatgggcaacctgcagatcgacttcgccgaccccagcagagccgacgacgccagacagctgttcgccctgagctgcaccgccgaggagcagggcgtgctgcccgacgacctgagcggcgtgatcagaagactgtgggccgaccacggcgtgcaggcctgcttcggcagaagcagagagtaccagctgaacgacagcgccgcctactacctgaacgacctggagagaatcgcccagagcgactacatccccacccagcaggacgtgctgagaaccagagtgaagaccaccggcatcgtggagacccacttcaccttcaaggacctgcacttcaagatgttcgacgtgggcggccagagaagcgagagaaagaagtggatccactgcttcgagggcgtgaccgccatcatcttctgcgtggccctgagcgcctacgacctggtgctggccgaggacgaggagatgaacagaatgcacgagagcatgaagctgttcgacagcatctgcaacaacaagtggttcaccgacaccagcatcatcctgttcctgaacaagaaggacctgttcgaggagaagatcacccacagccccctgaccatctgcttccccgagtacaccggcgccaacaagtacgacgaggccgccagctacatccagagcaagttcgaggacctgaacaagagaaaggacaccaaggagatctacacccacttcacctgcgccaccgacaccaagaacgtgcagttcgtgttcgacgccgtgaccgacgtgatcatcaagaacaacctgaaggactgcggcctgttctag

SEQ ID NO: 101887 - protein, 339 aa, Artificial Sequence
  derived and/or modified sequence
MTEGVKTLGWTKQKGGCHWGRSEGAGESGKSTIVKQMKIIHEDGYSEEECRQYRAVVYSNTIQSIMAIVKAMGNLQIDFADPSRADDARQLFALSCTAEEQGVLPDDLSGVIRRLWADHGVQACFGRSREYQLNDSAAYYLNDLERIAQSDYIPTQQDVLRTRVKTTGIVETHFTFKDLHFKMFDVGGQRSERKKWIHCFEGVTAIIFCVALSAYDLVLAEDEEMNRMHESMKLFDSICNNKWFTDTSIILFLNKKDLFEEKITHSPLTICFPEYTGANKYDEAASYIQSKFEDLNKRKDTKEIYTHFTCATDTKNVQFVFDAVTDVIIKNNLKDCGLF

SEQ ID NO: 101888 - DNA, 1020 bp, Artificial Sequence
  derived and/or modified sequence
atgacagaaggggtaaaaaccctgggctggactaagcagaaggggggttgccattggggaaggtccgagggggctggggaaagcggcaagtccaccatcgtgaagcaaatgaagattattcacgaggatggctactccgaggaggaatgcagacagtatcgagccgtggtctacagcaacaccattcagtcaattatggccatagtgaaagccatgggtaacctccagattgattttgctgacccctcccgggccgacgacgctagacaattgttcgccttgtcatgtaccgccgaagaacaaggagttctcccggacgatctctctggtgtgatccggaggctttgggccgaccacggcgtccaggcatgcttcgggcggagccgagaataccaattaaatgattccgctgcttactatctaaacgacctggagcgaatcgcacagtccgactatataccaactcagcaggacgtactgagaacacgcgttaaaacgactgggattgtcgagacacatttcactttcaaggacctccatttcaaaatgtttgacgtggggggccaacgcagcgaaagaaagaagtggatacattgctttgaaggcgtgacagctattatattttgcgttgctctgagcgcctacgatctggtgcttgcggaggacgaggaaatgaacagaatgcatgagagtatgaagttgttcgattctatctgcaacaataaatggtttaccgacacaagtatcatcctatttttgaataagaaggatctgttcgaagaaaaaataactcatagccccctgactatatgctttccggagtacacaggagcaaacaaatatgacgaggccgcttcctacatacagtcgaaattcgaagatctgaataaaaggaaggacaccaaggaaatctacacccatttcacttgtgctaccgacacgaaaaatgtccagttcgtgttcgatgcggtgactgatgttatcatcaagaacaatctcaaggattgtgggctgttttag

SEQ ID NO: 101889 - DNA, 2407 bp, Artificial Sequence
  derived and/or modified sequence
acacgttgcccagccgtgtggctgggatggtcggtacccatggccgtgcggtcgagccttgatgctccaggacagtcctggaaggcttcctggcagatccgtgggaagaaagccgacagaagggcgggaggcgggaggggaaaggtcccccgggatgggtagggcctcaacgctgggcatcggcgcaggtgtgtactgcagggagccagccagaccccccacggactgcctgaccttgggggaagcccggagtagaggaagaggccggacccccagacccgccattgactatgtccgccattgactatgtgttctgagagaaatttttttttttttttttgagactgagtctcactctttcgcccaggccggagtgcagtggcgcgatctcggctcactgcaagctccgcctcccgggttcacgccattctcctgcctcagcctcccgagtagctgggactacaggcgcccgctaccgcgcccggctaattttttgtatttttaatagagacggggtttcaccgtgttagccaggatggtctcgatctcctgacctcgtgatccgcccgccttggcctcccagagtgctgggatgacaggcgtgagcctctgagagcaaattttacccagttcctctctatcctcccgatgactctgaaatcaaactcagcaagtcatccgagcccccacggcgcagcggccctaggctggcatgggcgatgcggagctactccgccctcaggaagcaggcgaggtgcccagcgggagaatcacccacatcaccgtctaatctctgctgtgaagtggaagcgcgagaaggagggagcgtctcatgacggagggtgtgaagacgctaggctggacgaagcagaaaggcgggtgtcactggggacgttctgagggtgctggggagtcagggaagagcaccatcgtcaagcagatgaagatcatccacgaggatggctactccgaggaggaatgccggcagtaccgggcggttgtctacagcaacaccatccagtccatcatggccattgtcaaagccatgggcaacctgcagatcgactttgccgacccctccagagcggacgacgccaggcagctatttgcactgtcctgcaccgccgaggagcaaggcgtgctccctgatgacctgtccggcgtcatccggaggctctgggctgaccatggtgtgcaggcctgctttggccgctcaagggaataccagctcaacgactcagctgcctactacctgaacgacctggagcgtattgcacagagtgactacatccccacacagcaagatgtgctacggacccgcgtaaagaccacggggatcgtggagacacacttcaccttcaaggacctacacttcaagatgtttgatgtgggtggtcagcggtctgagcggaagaagtggatccactgctttgagggcgtcacagccatcatcttctgcgtagccttgagcgcctatgacttggtgctagctgaggacgaggagatgaaccgcatgcatgagagcatgaagctattcgatagcatctgcaacaacaagtggttcacagacacgtccatcatcctcttcctcaacaagaaggacctgtttgaggagaagatcacacacagtcccctgaccatctgcttccctgagtacacaggggccaacaaatatgatgaggcagccagctacatccagagtaagtttgaggacctgaataagcgcaaagacaccaaggagatctacacgcacttcacgtgcgccaccgacaccaagaacgtgcagttcgtgtttgacgccgtcaccgatgtcatcatcaagaacaacctgaaggactgcggcctcttctgaggggcagcggggcctggcgggatgggccaccgccgactttgtaccccccaacccctgaggaagatgggggcaagaagatcacgctccccgcctgttcccccgccgcttttctcctctttcctctctttgttctcagctccccctgtcccctcagctccagacgtaggggaggggttgccacaggcctccctgtttgaagcctgcccttgtctgagatgctggtaatggccatggtacccccttctgggcatctgttctggtttttaaccattgtcttgttctgtgatgaggggaggggggcacatgctgagtctcccaaggctgcgtctggaggggcccctgcttctccagcctggacccccagctttgcccaacaccagcccctgccccagcccaagtccaaatgtttacagggagcctcctgcccagtcccccaaccccagccgctcggaggccccaaaggaaaaagcacaagaagcgtgagacgccaccattcctggaaaccacagtccacctgctcattctcgtagctttttaaaaaaatgaaagtaaagg

SEQ ID NO: 101890 - DNA, 1020 bp, Artificial Sequence
  derived and/or modified sequence
atgacagagggcgtgaagaccctgggctggaccaagcagaagggcggctgccactggggccgctctgagggcgctggggagagcggcaagagcaccatcgtgaagcagatgaagatcatccatgaagatggctacagcgaggaggagtgccggcagtacagagctgtggtgtacagcaacaccatccagagcatcatggccatcgtgaaggccatgggcaacctgcagattgactttgctgaccccagcagagcagatgatgcccggcagctgtttgccctgagctgcacagctgaggagcagggcgtgctgcctgatgacctgtctggagtcatccggcggctgtgggccgaccatggagtgcaggcctgcttcggccgcagccgggagtaccagctgaatgacagcgctgcctactacctgaatgacctggagagaattgcccagagcgactacatccccacccagcaggatgtgctgcggaccagggtgaagaccactggaattgtggagacccacttcaccttcaaggacctgcacttcaagatgtttgatgtgggcggccagaggtctgagaggaagaagtggatccactgctttgagggcgtgacagccatcatcttctgtgtggccctgagcgcctatgacctggtgctggctgaagatgaggagatgaacaggatgcatgagagcatgaagctgtttgacagcatctgcaacaacaagtggttcacagacaccagcatcatcctcttcctgaacaagaaggacctgtttgaggagaagatcacccacagccccctgaccatctgcttccctgagtacaccggggccaacaagtatgatgaggccgccagctacatccagagcaagtttgaggacctgaacaagaggaaggacaccaaggagatctacacccacttcacctgtgccacagacaccaagaatgtgcagtttgtgtttgatgctgtgacagatgtgatcatcaagaacaacctgaaggactgtggcctcttctag

SEQ ID NO: 101891 - DNA, 1020 bp, Artificial Sequence
  derived and/or modified sequence
atgaccgagggcgtgaagaccctgggctggaccaagcagaagggcggctgtcattggggcagatctgagggcgcaggagaatccggaaaaagtaccattgtaaaacagatgaaaatcatacacgaagacggatactcggaggaggagtgtcggcaatatagagccgtggtatattccaacaccatccagagcatcatggccatcgtgaaagccatgggcaacctgcagatagactttgccgatccatcccgagccgacgacgcgaggcaactgttcgctctctcctgtacagcagaggaacaaggagtcctgcctgacgatctgagtggcgtgatacgacgcctgtgggccgatcacggggtgcaggcatgtttcggaagatctagagagtatcagttgaatgattctgccgcgtactacttaaacgatctggagaggatcgctcagtcagattacatccccactcagcaggacgtcctaaggacacgcgtcaaaaccaccggaatcgtcgagacacacttcacatttaaggaccttcactttaagatgttcgacgtgggcggacaacgatcagagaggaaaaaatggattcactgctttgaaggcgtgaccgccattatcttctgcgtggctctcagcgcgtatgaccttgtcctggcagaagacgaggaaatgaaccgtatgcatgaatccatgaagctgttcgactccatctgtaacaacaagtggtttaccgacacgtctatcatattgtttttaaataaaaaagacctgttcgaggagaagattacacactcacccctgactatttgtttccccgaatatacgggggccaataagtatgacgaggcagcctcctacattcagtccaagttcgaggatctcaataagaggaaggacaccaaggagatatacacacattttacttgtgcgaccgacacaaaaaatgttcaatttgtgttcgacgcggtgactgacgtgatcatcaagaacaacctgaaggattgcgggctgttctag

SEQ ID NO: 101892 - DNA, 1020 bp, Artificial Sequence
  derived and/or modified sequence
atgaccgaaggggtcaaaactttaggatggaccaagcagaaaggcggttgtcactggggaaggtccgagggagcaggggaatccggcaagtcaacaatcgttaagcaaatgaaaatcattcacgaagacgggtactccgaggaggaatgtcggcagtaccgcgcagtcgtctactcaaatacaatacaatctattatggcaatcgtgaaagccatggggaatctgcagattgattttgctgatcctagccgggctgatgatgcccgacagttatttgcgctgtcatgcactgcagaagagcagggcgtcttgccagacgatttaagcggcgtgataaggcgcctctgggccgaccacggggtgcaggcatgcttcggcagatctcgcgagtaccagctgaacgactcagctgcctattatctcaacgacctagagagaattgctcagagtgactatatccccacacagcaggatgtgctgaggactcgcgtgaaaaccaccgggatcgttgaaacacactttaccttcaaggacctacactttaagatgttcgatgttggaggccagcggagcgagcgtaaaaagtggatccattgcttcgagggcgtgacagcaattatattttgcgttgctttatctgcgtatgatctggtactggcagaagacgaggaaatgaaccgcatgcatgagagtatgaaactgtttgatagcatctgcaacaacaagtggttcacggacaccagtatcatactgttcctcaataagaaggatctgttcgaggaaaagattacacactcccctcttaccatctgcttccctgaatacaccggtgcaaacaaatacgatgaagccgcttcatacatacagtccaagtttgaggacctgaacaaaaggaaggacaccaaagaaatttacacccattttacttgcgctactgatactaaaaatgtgcagtttgtgttcgacgccgtaaccgacgtgataataaaaaacaacctcaaagactgcggtctattttag

SEQ ID NO: 101893 - DNA, 1020 bp, Artificial Sequence
  derived and/or modified sequence
atgaccgagggcgtgaagaccctgggctggaccaagcagaagggcggctgccactggggcagaagcgagggcgccggcgagagcggcaagagcaccatcgtgaagcagatgaagatcatccacgaggacggctacagcgaggaggagtgcagacagtacagagccgtggtgtacagcaacaccatccagagcatcatggccatcgtgaaggccatgggcaacctgcagatcgacttcgccgaccccagcagagccgacgacgccagacagctgttcgccctgagctgcaccgccgaggagcagggcgtgctgcccgacgacctgagcggcgtgatcagaagactgtgggccgaccacggcgtgcaggcctgcttcggcagaagcagagagtaccagctgaacgacagcgccgcctactacctgaacgacctggagagaatcgcccagagcgactacatccccacccagcaggacgtgctgagaaccagagtgaagaccaccggcatcgtggagacccacttcaccttcaaggacctgcacttcaagatgttcgacgtgggcggccagagaagcgagagaaagaagtggatccactgcttcgagggcgtgaccgccatcatcttctgcgtggccctgagcgcctacgacctggtgctggccgaggacgaggagatgaacagaatgcacgagagcatgaagctgttcgacagcatctgcaacaacaagtggttcaccgacaccagcatcatcctgttcctgaacaagaaggacctgttcgaggagaagatcacccacagccccctgaccatctgcttccccgagtacaccggcgccaacaagtacgacgaggccgccagctacatccagagcaagttcgaggacctgaacaagagaaaggacaccaaggagatctacacccacttcacctgcgccaccgacaccaagaacgtgcagttcgtgttcgacgccgtgaccgacgtgatcatcaagaacaacctgaaggactgcggcctgttctag

SEQ ID NO: 101894 - protein, 143 aa, Artificial Sequence
  derived and/or modified sequence
MAAEDVVATGADPSDLESGGLLHEIFTSPLNLLLLGLCIFLLYKIVRGDQPAASGDSDDDEPPPLPRLKRRDFTPAELRRFDGVQDPRILMAINGKVFDVTKGRKFYGPVKYHHVGKLLKEGEEPTVYSDEEEPKDESARKND

SEQ ID NO: 101895 - DNA, 432 bp, Artificial Sequence
  derived and/or modified sequence
atggcagctgaggatgtggttgcaactggagcagaccccagcgacttggagagcggaggattgctccacgagattttcacttccccactaaatttattactgttaggcttatgcatctttctgctgtataagattgtcaggggtgaccaaccagctgccagcggcgattccgacgacgatgagccacctcccctgccccggctaaaacgtagagattttactccagccgagcttaggcgctttgacggggtacaagacccaaggattctcatggctattaacggaaaggtgtttgatgtgaccaaaggacggaaattctacgggccagttaagtatcatcacgttggtaaactgttaaaagaaggtgaagaacctacagtgtattccgacgaggaggagcccaaggatgaaagtgcgcgtaaaaatgattag

SEQ ID NO: 101896 - DNA, 432 bp, Artificial Sequence
  derived and/or modified sequence
atggctgctgaagatgtggtggccactggagctgaccccagcgacctggagagcggcggcctgctgcacgagatcttcaccagccccctgaacctgctgctgctgggcctgtgcatcttcctgctgtacaagatcgtgcggggggaccagcctgctgccagcggggacagtgatgatgatgagcccccacccctgccccggctgaagaggcgggacttcaccccagctgagctgcggagatttgatggagtgcaggacccccgcatcctgatggccatcaacgggaaggtgtttgatgtgaccaagggcaggaagttctacggccctgtgaagtaccaccacgtgggcaagctgctgaaggagggggaggagcccaccgtgtacagtgatgaggaggagcccaaggatgagagcgccaggaagaatgactag

SEQ ID NO: 101897 - DNA, 432 bp, Artificial Sequence
  derived and/or modified sequence
atggccgccgaggacgtggtggccaccggcgccgaccccagcgacctggagtctggcggcctcctccatgaaatttttacaagtcccctgaacttacttttgttaggattgtgcatcttcttattgtataagatcgtcaggggagaccagccagctgccagcggtgattctgatgatgatgagccccccccgctcccccgcctcaaacgaagggattttactcctgctgagctgaggcgctttgatggcgtgcaggaccctcgtattctcatggccatcaacggtaaggtattcgatgtcactaaaggcagaaagttttacggacccgtgaagtaccatcacgtcggaaaacttctgaaggagggtgaagaacctaccgtctacagtgatgaggaggagccaaaggacgagagtgcccgtaagaatgactag

SEQ ID NO: 101898 - DNA, 432 bp, Artificial Sequence
  derived and/or modified sequence
atggcggcagaagatgttgttgcaacaggcgcagacccttcggacttggaatctggcggactgctccacgaaatttttacctctcccctcaatttgctgctgctaggcctgtgcatcttcctactgtacaagatcgtgaggggtgaccagcctgcagcctccggcgactccgatgatgatgaaccaccacctctgcccaggctcaagcgacgtgattttacccctgctgaactccgaagatttgacggagtgcaggaccctcgtatattaatggcaattaatggcaaggtgttcgatgtgacaaagggtcgaaagttctacggccctgtcaagtatcaccacgttggcaaattactcaaggagggcgaagaacccaccgtgtacagtgacgaagaggaacctaaagacgagtcagctagaaagaacgattag

SEQ ID NO: 101899 - DNA, 1682 bp, Artificial Sequence
  derived and/or modified sequence
atccctgcctagcgcggcccaacctttactccagagatcatggctgccgaggatgtggtggcgactggcgccgacccaagcgatctggagagcggcgggctgctgcatgagattttcacgtcgccgctcaacctgctgctgcttggcctctgcatcttcctgctctacaagatcgtgcgcggggaccagccggcggccagcggcgacagcgacgacgacgagccgccccctctgccccgcctcaagcggcgcgacttcacccccgccgagctgcggcgcttcgacggcgtccaggacccgcgcatactcatggccatcaacggcaaggtgttcgatgtgaccaaaggccgcaaattctacgggcccgtcaagtatcatcacgtgggcaaactgctgaaggagggggaggagcccactgtgtactcagatgaggaagaaccaaaagatgagagtgcccggaaaaatgattaaagcattcagtggaagtatatctatttttgtattttgcaaaatcatttgtaacagtccactctgtctttaaaacatagtgattacaatatttagaaagttttgagcacttgctataagttttttaattaacatcactagtgacactaataaaattaacttcttagaatgcatgatgtgtttgtgtgtcacaaatccagaaagtgaactgcagtgctgtaatacacatgttaatactgtttttcttctatctgtagttagtacaggatgaatttaaatgtgtttttcctgagagacaaggaagacttgggtatttcccaaaacaggtaaaaatcttaaatgtgcaccaagagcaaaggatcaacttttagtcatgatgttctgtaaagacaacaaatccctttttttttctcaattgacttaactgcatgatttctgttttatctacctctaaagcaaatctgcagtgttccaaagactttggtatggattaagcgctgtccagtaacaaaatgaaatctcaaaacagagctcagctgcaaaaaagcatattttctgtgtttctggactgcactgttgtccttgccctcacatagacactcagacaccctcacaaacacagtagtctatagttaggattaaaataggatctgaacattcaaaagaaagctttggaaaaaaagagctggctggcctaaaaacctaaatatatgatgaagattgtaggactgtcttcccaagccccatgttcatggtggggcaatggttatttggttattttactcaattggttactctcatttgaaatgagggagggacatacagaataggaacaggtgtttgctctcctaagagccttcatgcacacccctgaaccacgaggaaacagtacagtcgctagtcaagtggtttttaaagtaaagtatattcataaggtaacagttattctgttgttataaaactatacccactgcaaaagtagtagtcaagtgtctaggtctttgatattgctcttttggttaacactaagcttaagtagactatacagttgtatgaatttgtaaaagtatatgaacacctagtgagatttcaaacttgtaattgtggttaaatagtcattgtattttcttgtgaactgtgttttatgattttacctcaaatcagaaaacaaaatgatgtgctttggtcagttaataaaaatggttttacccact

SEQ ID NO: 101900 - DNA, 432 bp, Artificial Sequence
  derived and/or modified sequence
atggccgccgaggacgtggtggccaccggcgccgaccccagcgacctggagagcggcggcctgctgcacgagatcttcaccagccccctgaacctgctgctgctgggcctgtgcatcttcctgctgtacaagatcgtgagaggcgaccagcccgccgccagcggcgacagcgacgacgacgagcccccccccctgcccagactgaagagaagagacttcacccccgccgagctgagaagattcgacggcgtgcaggaccccagaatcctgatggccatcaacggcaaggtgttcgacgtgaccaagggcagaaagttctacggccccgtgaagtaccaccacgtgggcaagctgctgaaggagggcgaggagcccaccgtgtacagcgacgaggaggagcccaaggacgagagcgccagaaagaacgactag

SEQ ID NO: 101901 - protein, 1559 aa, Artificial Sequence
  derived and/or modified sequence
MEPGSDDFLPPPECPVFEPSWAEFRDPLGYIAKIRPIAEKSGICKIRPPADWQPPFAVEVDNFRFTPRIQRLNELEAQTRVKLNYLDQIAKFWEIQGSSLKIPNVERRILDLYSLSKIVVEEGGYEAICKDRRWARVAQRLNYPPGKNIGSLLRSHYERIVYPYEMYQSGANLVCNTRPFDNEEKDKEYKPHSIPLRQSVQPSKFNSYGRRAKRLQPDPEPTEEDIEKNPELKKLQIYGAGPKMMGLGLMAKDKTLRKKDKEGPECPPTVVVKEELGGDVKVESTSPKTFLESKEELSHSPEPCTKMTMRLRRNHSNAQFIESYVCRMCSRGDEDDKLLLCDGCDDNYHIFCLLPPLPEIPKGVWRCPKCVMAECKRPPEAFGFEQATREYTLQSFGEMADSFKADYFNMPVHMVPTELVEKEFWRLVNSIEEDVTVEYGADIHSKEFGSGFPVSDSKRHLTPEEEEYATSGWNLNVMPVLEQSVLCHINADISGMKVPWLYVGMVFSAFCWHIEDHWSYSINYLHWGEPKTWYGVPSLAAEHLEEVMKKLTPELFDSQPDLLHQLVTLMNPNTLMSHGVPVVRTNQCAGEFVITFPRAYHSGFNQGYNFAEAVNFCTADWLPAGRQCIEHYRRLRRYCVFSHEELICKMAACPEKLDLNLAAAVHKEMFIMVQEERRLRKALLEKGITEAEREAFELLPDDERQCIKCKTTCFLSALACYDCPDGLVCLSHINDLCKCSSSRQYLRYRYTLDELPAMLHKLKVRAESFDTWANKVRVALEVEDGRKRSLEELRALESEARERRFPNSELLQQLKNCLSEAEACVSRALGLVSGQEAGPHRVAGLQMTLTELRAFLDQMNNLPCAMHQIGDVKGVLEQVEAYQAEAREALASLPSSPGLLQSLLERGRQLGVEVPEAQQLQRQVEQARWLDEVKRTLAPSARRGTLAVMRGLLVAGASVAPSPAVDKAQAELQELLTIAERWEEKAHLCLEARQKHPPATLEAIIREAENIPVHLPNIQALKEALAKARAWIADVDEIQNGDHYPCLDDLEGLVAVGRDLPVGLEELRQLELQVLTAHSWREKASKTFLKKNSCYTLLEVLCPCADAGSDSTKRSRWMEKELGLYKSDTELLGLSAQDLRDPGSVIVAFKEGEQKEKEGILQLRRTNSAKPSPLASSSTASSTTSICVCGQVLAGAGALQCDLCQDWFHGRCVSVPRLLSSPRPNPTSSPLLAWWEWDTKFLCPLCMRSRRPRLETILALLVALQRLPVRLPEGEALQCLTERAISWQGRARQALASEDVTALLGRLAELRQRLQAEPRPEEPPNYPAAPASDPLREGSGKDMPKVQGLLENGDSVTSPEKVAPEEGSGKRDLELLSSLLPQLTGPVLELPEATRAPLEELMMEGDLLEVTLDENHSIWQLLQAGQPPDLERIRTLLELEKAERHGSRARGRALERRRRRKVDRGGEGDDPAREELEPKRVRSSGPEAEEVQEEEELEEETGGEGPPAPIPTTGSPSTQENQNGLEPAEGTTSGPSAPFSTLTPRLHLPCPQQPPQQQL

SEQ ID NO: 101902 - DNA, 4680 bp, Artificial Sequence
  derived and/or modified sequence
atggagcctgggtctgatgattttctcccccccccagaatgtcctgtgttcgaaccttcgtgggccgagttcagggatcctttgggatacatcgcgaaaatacggccaattgcggagaaaagcgggatctgtaagattagacccccagctgattggcaacctccatttgctgtcgaggtagacaactttagatttactccccgaatccagcgactgaacgagctggaagcccagacccgagtcaaattaaactacttggatcaaatcgccaagttttgggaaattcaaggctcttctctcaagatccctaatgtcgaacgcagaatactggacttgtacagcctcagtaagattgtggtcgaggaaggggggtacgaggccatttgcaaggatcgccgatgggccagagtggctcaacgcctgaactacccgccgggaaaaaacatcggctccctcctgcgctcccattacgagcggatagtgtacccatacgagatgtatcaaagcggggccaacctggtgtgcaacaccaggccatttgacaacgaagaaaaggataaggagtataaaccacatagcattcccctccgccagtctgtccagccttcgaaatttaactcctacggtcgtcgcgccaagagattgcagcccgacccggagccaacagaagaagatattgagaagaacccggaattaaagaaactgcagatctacggggccggaccaaagatgatgggcctgggcctaatggctaaggataaaaccctgcgtaagaaggataaggaaggacccgaatgcccacccaccgtggtggtgaaggaggaattgggtggtgatgtgaaagttgagagtaccagtcctaagaccttcctagagtccaaggaagagctgagtcattcacctgaaccatgtaccaaaatgactatgaggctgcggcgcaatcactctaatgcacagtttatagagagctatgtctgtagaatgtgcagcaggggagatgaagatgacaagctcctcttgtgtgacggttgtgatgacaattaccatatcttttgtctactgcccccgctgcccgagattcccaagggcgtgtggaggtgcccgaagtgcgtgatggctgagtgcaaaagaccaccagaggccttcgggtttgaacaggccacaagagaatatacgctacaatccttcggtgagatggccgacagcttcaaggccgactacttcaacatgcccgttcatatggtgcccaccgaattagttgagaaggaattttggagactggtgaactccattgaggaagacgtcactgtcgagtatggcgctgatattcacagcaaagagtttggcagcggatttccggtttccgacagcaagcgtcatctcacgcctgaggaggaggagtacgctacatccgggtggaacttaaacgtcatgccagttctggagcagtcagtcctctgtcatataaacgccgatattagcgggatgaaggtgccttggctgtatgtcggaatggttttctcggcattctgttggcacatcgaagatcactggtcttatagcatcaattatctgcactggggtgagccaaagacctggtatggagtcccaagtcttgctgctgaacacctggaggaagtcatgaagaaattaacacccgaattattcgactctcagcctgacctgctccaccaactcgtcacacttatgaatcctaataccctgatgtcgcacggagtgccagtagttcgtaccaatcaatgtgccggtgaatttgtgatcactttccccagggcctaccactcaggattcaatcaggggtataatttcgcagaggccgtgaacttttgcaccgccgattggctgccagccgggcgacagtgcatcgaacactacagacgcctgcggaggtactgcgtgttttcccacgaggaactcatctgcaagatggccgcgtgtccagaaaagctggatttaaatctggcagccgccgtacacaaagaaatgttcatcatggtccaggaagaacgcagacttaggaaagccctgttagagaaagggataaccgaggccgaacgggaagcgttcgaactactgcctgatgatgaacgccagtgtatcaagtgcaagactacatgtttcctaagcgctctggcttgttatgactgcccagatggcctggtgtgccttagccatattaatgacctatgtaaatgcagtagctccaggcagtatttgcgataccgatataccttagatgagctgccggccatgctgcacaagttaaaggtcagagctgagtcttttgacacttgggccaataaagtgagggttgccttggaggtggaagatggaagaaagagaagtcttgaagagttgcgagcgttggagagtgaggctcgggaaagaaggtttcccaacagtgaactgctgcagcagctcaaaaattgtctgagcgaggctgaggcatgcgtttcgcgggctttgggactcgtgtccggtcaggaggctgggccacacagggtggccggactgcagatgaccctgactgagctgagagcatttctggatcagatgaacaacttgccctgcgcaatgcaccagatcggcgatgtgaagggggtcttggagcaggtggaggcataccaggcggaagcacgagaagccctggcctccctgccttcatcccctggacttcttcagagcctgttggaaagagggcggcagctgggtgttgaagtgccggaagcccaacagctgcagcgccaggttgagcaggcacggtggcttgatgaagtcaagcgtactctcgctcccagcgccaggcggggaactttagcagtcatgagaggattgttggtagccggtgccagcgtggctcctagccccgccgtagacaaggcgcaggccgaactccaggaactcttgaccatcgccgagcgctgggaggagaaagcccatctgtgccttgaggcccggcaaaagcacccaccggccaccctggaagcaattatcagggaggcggagaacatccccgtacacctacctaacatacaggctctgaaagaggctctggcaaaggcccgggcgtggattgcagatgtggacgagatacaaaatggcgaccactacccgtgtttggacgatctagaggggctcgtagctgtgggccgcgacttgccggtgggtctggaggagctgcggcagcttgagttacaggtgctaaccgctcacagctggcgggagaaagctagtaagacctttctgaaaaaaaactcttgctacaccctgctggaagtcctctgtccgtgtgccgacgcgggatccgactccacaaaacgctcgcgctggatggagaaggagctcgggctttataagagcgataccgaactcctaggtttaagtgcccaggatttgcgcgaccctgggagtgtgattgtagccttcaaggagggcgagcagaaggagaaggaaggcattttacagctccggcgaacaaatagtgctaaaccatccccactggcttcgagttccactgcctccagcaccacttccatctgcgtgtgcggacaagtactagctggggccggcgcccttcagtgtgatctgtgccaagattggtttcacggccggtgtgtaagcgttccccgcttactgagtagcccgcgaccaaatcccacgtcatctccactgctggcttggtgggagtgggatacgaagttcctttgcccgctgtgcatgcggtccagacggcctaggttagagacgatactcgcactcctcgtagctctccagcgtcttcccgttagactcccagagggtgaagcattacagtgtctgacagagagagcgatcagttggcagggacgcgccaggcaggcacttgcatccgaggacgtgacagctctcctgggcagacttgccgagttacgacagcggctgcaggcagagcccaggcccgaggagccccccaattacccggccgccccagcaagcgacccactgagggagggatctggaaaagacatgccgaaagtgcaggggctgttagagaatggtgattccgtcaccagtcccgaaaaggtggctccggaggaggggtctggtaagagggacctcgagctgctgagtagtctcctgccccaactcaccggacctgtcctggaactaccggaggctactagagcccccctcgaagagctgatgatggaaggagatttgcttgaggtgaccctggacgaaaatcactccatttggcagttactgcaggccgggcagccacccgacctggaaaggatcagaaccttactggaactcgaaaaggccgaaaggcacggaagccgcgctcgaggcagggcactggagagaagacggaggcgaaaagttgaccgaggaggagaaggggacgatcctgctcgggaagaactggagcctaagcgtgtgcgttctagcgggcctgaagctgaagaagtgcaggaagaagaagaactagaggaagagactggcggggagggtccaccagcacccatccccaccacaggatcccctagcacccaagaaaaccagaacggactggaacccgcagagggtacgaccagtggaccatctgcccccttcagcacgctaactccccggctgcacctgccgtgtccacagcagcccccacagcagcagttatag

SEQ ID NO: 101903 - DNA, 4680 bp, Artificial Sequence
  derived and/or modified sequence
atggagcccggcagtgatgacttcctgcccccaccagaatgtcctgtgtttgagcccagctgggccgagttccgggaccccctgggctacatcgccaagatccggcccatcgccgagaagagcggcatctgcaagatccggcccccagctgactggcagcccccatttgctgtggaggtggacaacttccgcttcaccccccgcatccagaggctgaatgagctggaggcccagaccagggtgaagctgaactacctggaccagatcgccaagttctgggagatccagggcagcagcctgaagatccccaacgtggagcggcgcatcctggacctgtacagcctgagcaagatcgtggtggaggagggcggctatgaggccatctgcaaggaccggcgctgggcccgggtggcccagaggctgaactacccacctgggaagaacatcggcagcctgctgcggagccactatgagcgcatcgtgtacccctatgagatgtaccagagcggggccaacctggtgtgcaacacccggccctttgacaatgaggagaaggacaaggagtacaagccccacagcatccccctgcggcagagcgtgcagcccagcaagttcaacagctatggccggcgggccaagaggctgcagcctgaccctgagcccacagaggaggacatcgagaagaaccctgagctgaagaagctgcagatctacggggccggccccaagatgatgggcctgggcctgatggccaaggacaagaccctgaggaagaaggacaaggagggcccagaatgtcctcccaccgtggtggtgaaggaggagctgggcggagatgtgaaggtggagagcaccagccccaagaccttcctggagagcaaggaggagctgagccacagccctgagccctgcaccaagatgaccatgaggctgcggaggaaccacagcaatgcccagttcatcgagagctatgtgtgcaggatgtgcagcagaggagatgaagatgacaagctgctgctgtgtgatggctgtgatgacaactaccacatcttctgcctgctgccccccctgcctgagatccccaagggcgtgtggcgctgccccaagtgtgtgatggccgagtgcaagaggcctcctgaggccttcggctttgagcaggccacccgggagtacaccctgcagagctttggagagatggctgacagcttcaaggctgactacttcaacatgcctgtgcacatggtgcccacagagctggtggagaaggagttctggaggctggtgaacagcattgaagaagatgtgacagtggagtatggagctgacatccacagcaaggagtttggcagcggcttccctgtgtctgacagcaagaggcacctgaccccagaggaggaggagtatgccaccagcggctggaacctgaatgtgatgcctgtgctggagcagagcgtgctgtgccacatcaatgctgacatcagcggcatgaaggtgccctggctgtatgtgggcatggtgttcagcgccttctgctggcacatcgaggaccactggagctacagcatcaactacctgcactggggcgagcccaagacctggtacggcgtgcccagcctggccgctgagcacctggaggaggtgatgaagaagctgaccccagagctgtttgacagccagcctgacctgctgcaccagctggtgaccctgatgaaccccaacaccctgatgagccacggcgtgcctgtggtgaggaccaaccagtgtgccggggagtttgtgatcaccttcccccgggcctaccacagcggcttcaaccagggctacaactttgctgaggccgtgaacttctgcacagctgactggctgcctgctggccggcagtgcatcgagcactacagaaggctgcggcgctactgtgtgttcagccatgaggagctgatctgcaagatggccgcctgcccagagaagctggacctgaacctggccgctgctgtgcacaaggagatgttcatcatggtgcaggaggagcggcggctgaggaaggccctgctggagaagggcatcacagaagctgagcgggaggcctttgagctgctgcctgatgatgagcggcagtgcatcaagtgcaagaccacctgcttcctgagcgccctggcctgctatgactgcccagatggcctggtgtgcctgagccacatcaatgacctgtgcaagtgcagcagcagccggcagtacctgcgctaccgctacaccctggatgagctgcctgccatgctgcacaagctgaaggtgcgggcagagagctttgacacctgggccaacaaggtgcgggtggccctggaggtggaggatggcaggaagaggagcctggaggagctgcgggccctggagagcgaggcccgggagcggcgcttccccaacagcgagctgctgcagcagctgaagaactgcctgtctgaggccgaggcctgtgtgtcccgggccctgggcctggtgtctggccaggaggccggcccccaccgggtggccggcctgcagatgaccctgacagagctgcgggccttcctggaccagatgaacaacctgccctgtgccatgcaccagattggagatgtgaagggcgtgctggagcaggtggaggcctaccaggccgaggcccgggaggccctggccagcctgcccagcagccctggcctgctgcagagcctgctggagcggggccggcagctgggcgtggaggtgcctgaggcccagcagctgcagaggcaggtggagcaggcccgctggctggatgaggtgaagaggaccctggcccccagcgcccggcggggcaccctggccgtgatgaggggcctgctggtggccggggcctctgtggcccccagccctgctgtggacaaggcccaggccgagctgcaggagctgctgaccatcgccgagcgctgggaggagaaggcccacctgtgcctggaggcccggcagaagcaccccccagccaccctggaggccatcatccgggaggccgagaacatccctgtgcacctgcccaacatccaggccctgaaggaggccctggccaaggcccgggcctggattgctgatgtggatgagatccagaatggagaccactacccctgcctggatgacctggagggcctggtggccgtgggccgggacctgcctgtgggcctggaggagctgcggcagctggagctgcaggtgctgacagcccacagctggagggagaaggccagcaagaccttcctgaagaagaacagctgctacaccctgctggaggtgctgtgcccctgtgctgatgctggcagtgacagcaccaagaggagccgctggatggagaaggagctgggcctgtacaagagtgacacagagctgctgggcctgagcgcccaggacctgcgggaccccggcagcgtcatcgtggccttcaaggagggggagcagaaggagaaggagggcatcctgcagctgcggaggaccaacagcgccaagcccagccccctggccagcagcagcacagccagcagcaccaccagcatctgtgtgtgtggccaggtgctggccggggccggggccctgcagtgtgacctgtgccaggactggttccacggccgctgtgtgtctgtgccccggctgctgagcagcccccggcccaaccccaccagcagccccctgctggcctggtgggagtgggacaccaagttcctgtgccccctgtgcatgaggagccggcggccccggctggagaccatcctggccctgctggtggccctgcagaggctgcctgtgcggctgcctgagggggaggccctgcagtgcctgacagagcgggccatctcctggcagggccgggcccggcaggccctggcctctgaagatgtgacagccctgctgggccgcctggccgagctgcggcagaggctgcaggccgagcccaggcctgaggagccccccaactacccagctgccccagccagtgaccccctgcgggagggcagcggcaaggacatgcccaaggtgcagggcctgctggagaatggagacagcgtgaccagccctgagaaggtggcccctgaggagggcagcggcaagagggacctggagctgctgagcagcctgctgccccagctgaccggccctgtgctggagctgcctgaggccacccgggcccccctggaggagctgatgatggagggggacctgctggaggtgaccctggatgagaaccacagcatctggcagctgctgcaggccggccagcccccagacctggagcgcatccgcaccctgctggagctggagaaggccgagagacatggcagccgggcccggggccgggccctggagaggagaagaagaaggaaggtggacagaggaggagaaggagatgatcctgcccgggaggagctggagcccaagagggtgcgcagcagcggccctgaggccgaggaggtgcaggaggaggaggagctggaggaggagactggaggagagggccccccagcccccatccccaccaccggcagccccagcacccaggagaaccagaatggcctggagcctgctgagggcaccaccagcggccccagcgcccccttcagcaccctgaccccccggctgcacctgccctgcccccagcagcccccccagcagcagctgtag

SEQ ID NO: 101904 - DNA, 5677 bp, Artificial Sequence
  derived and/or modified sequence
ggccgcggcgtttgggaggtaactgtggtggcgaaggctgcggtagtggggaggcaaccacacagtttggaagaaacggagcgggacgaagaggcggtagcagtagagtcagcctgagactctcagagcacgacggccacacgcccccttaggccctcggcgggcggcggctgccccgcttagggcctagcctccgagcattgcctcggcttcaaacagcggcggcgccatgagtccttaagggcggtccaagcctcccgatccctggcccagacctcgggcccaccatggagccggggtccgacgatttcctaccgccaccggagtgcccggtgttcgagcctagctgggccgagttccgagaccctcttggctacatcgcgaaaatcaggcccatcgcagagaaatcgggcatttgcaagatccgcccacccgcggactggcagccaccctttgctgtggaagtggacaacttcaggtttaccccccgaatccagaggctgaatgagctagaggcccagacgagagtgaaactgaactacttggaccagattgccaaattctgggaaatccagggctcctccttaaagattcccaatgtagaacggcggatcttggacctctacagtctcagcaaaattgtggtggaggaaggtggttatgaagctatctgcaaggaccgtcggtgggctcgggtagcccagcgcctcaactatccaccaggcaaaaatattggctccttgctacgctcccactacgaacgcattgtttatccctatgaaatgtaccagtctggagccaaccttgtgtgtaacacacgtccatttgataatgaggagaaggacaaggaatacaaaccccacagcatccccctacgacagtctgtgcagccttccaagttcaacagctatggccggcgggccaagagactgcagcctgatccggaacccacagaggaagacattgagaagaatccagagctgaaaaagctacagatctatggggcaggccccaagatgatgggcctgggcctcatggccaaagacaagactctgcggaagaaagataaggaggggcctgagtgtccccccacagtagtggtgaaggaggagttaggtggggatgtgaaggtggagtcaacatcgcctaagaccttcctggagagcaaggaggagctgagtcacagcccagaaccctgcaccaagatgaccatgaggctacggaggaaccacagcaatgcccagtttattgagtcatatgtctgccggatgtgttctcgaggggatgaggatgacaagctcctgctgtgtgatggctgtgatgacaactaccacatcttctgcctgctgcctcctctgcctgagatccccaagggtgtctggcggtgcccaaagtgtgtcatggcggagtgtaagcggcccccagaagcctttggctttgagcaggctacccgggaatacactctgcagagctttggcgagatggccgactcctttaaagctgactacttcaacatgcccgtgcatatggtgcccacagaacttgtggagaaggagttctggaggctggtaaatagcattgaggaagatgtgactgttgagtatggagctgacatccattccaaagaatttggcagcggtttccctgtcagtgacagtaaacggcacctaacccccgaagaggaggagtatgctaccagtggttggaacctaaatgtgatgccggtgttggaacagtctgtactgtgccacatcaatgcagatatctctggcatgaaggtgccctggctctacgtgggcatggtcttctcagccttttgctggcatattgaggatcactggagttactccattaactacctccactggggtgagccgaagacctggtatggggtgccctcacttgcagcagaacatttggaagaagtgatgaagaagctgacacctgaactatttgatagccagcctgacctcctgcaccaacttgtcaccctcatgaatcccaacaccctcatgtcccatggtgtgccagttgtccgcacaaaccagtgtgcaggagagtttgtcatcaccttcccccgtgcttaccacagcggcttcaaccaaggctacaactttgccgaggctgtcaacttttgcactgctgactggttgcctgctgggcgccagtgcattgagcactaccgccggctccggagatactgcgtcttctcccatgaggagcttatctgcaagatggctgcctgcccagagaagctagacctgaacctggcggcagctgtgcataaggagatgttcatcatggtgcaagaagagcggcgtctacgaaaggccctgctggagaagggtatcacagaggctgagcgagaggctttcgagctgctcccagatgatgagcgccagtgtatcaagtgcaagactacgtgtttcctgtcagccctggcctgctacgactgcccagacggccttgtctgcctttcccacatcaatgatctctgcaagtgctccagtagccggcagtacctgcggtatcggtataccttggatgagcttcctgccatgctgcataagctgaaggttcgggctgagtcctttgacacctgggccaacaaagtgcgagtggccctggaggtggaggatgggcggaagcgcagccttgaagaactgagggcactagagtctgaagcccgtgagcggaggtttcctaatagtgagctgctgcagcaactaaagaactgcctgagtgaggcagaggcttgcgtgtcccgagctctgggactggtcagcggccaggaagctggcccccacagggtggctggtctacagatgaccctgactgagctccgggcctttctggaccagatgaacaacctgccttgcgccatgcaccagattggggatgtcaagggtgttctggaacaggtggaggcctaccaggctgaggctcgtgaggccctggcctcactgccctccagtccagggctactgcagtccctgttggagagggggcggcagctgggggtggaggtgcctgaggcccagcagctccagcggcaggtggaacaggcgcgatggctggatgaggtgaaacgcacactggccccctcagcccgaaggggcaccttggctgtcatgcgaggactgttggtcgcgggtgccagtgtagcccctagccctgctgtggataaagcccaggccgagctgcaggaactgctgaccattgctgaacgctgggaggagaaagcccacctctgcctggaggccaggcagaagcatccaccagccacacttgaggccataatccgtgaagcggaaaacatccctgttcacctgcccaacatccaggctctcaaggaggctcttgctaaggcccgggcctggattgctgatgttgatgagatccaaaatggtgaccactacccctgcctggatgacttggagggcctagtagctgtgggccgggacctacctgtggggctggaggagctgagacagctagagctacaggtactgacagcgcactcctggagggagaaggcctccaagaccttcctcaagaaaaattcttgctacacgctgctggaggttctctgcccatgtgcagatgccggctcagacagcaccaagcgcagccggtggatggagaaggagctggggttgtacaaatctgacacagagctgctggggctgtctgcgcaggacctcagggacccaggctctgtgatcgtggccttcaaggagggggaacagaaggagaaggagggtatcctgcagctgcgtcgcaccaattcggccaagcccagtccactggcatcatcgagcacggcctcctctacaacctctatctgtgtgtgtgggcaggtgctggctggggcgggagctctgcagtgtgacctgtgtcaggactggttccatgggcggtgtgtgtcagtgcctcgcctcctcagctctccgaggcccaatcccacctcatccccactgctggcctggtgggaatgggacaccaaattcctgtgtccactgtgtatgcgctcaaggcgcccgcgcctggagaccatcctggcactgctggtagccctgcagagactgcctgtgcggctgcccgagggcgaggccctgcagtgcctcacagagagggccatcagctggcaaggccgcgccaggcaggctctggcctctgaagatgtgactgctcttttgggacggctggctgagctccgccaacggctacaggctgaacctagacctgaggagcctcctaactaccctgcagcccctgcttctgaccccctcagagagggcagtggcaaggatatgcctaaggtccagggcttactggagaatggagacagtgtgaccagtcctgagaaggtagccccggaggagggctcaggtaagagagatctggagctgctgtcctcgctgttgccacagttgactggccctgtgttggaactgcctgaggcaacccgggcccccttggaggagctcatgatggagggggacctgctcgaggtgaccctggatgagaaccacagcatatggcagctgctgcaggctggacagcccccagacctggagaggatccgcacacttctggagctggagaaggcagagcgtcacgggagtcgggctcggggccgggccctggagaggcggcggcggcggaaggtggatcggggtggggagggcgatgacccagcccgagaggagctagagccaaagagggtacggagctcagggccagaggctgaggaggtccaggaggaggaagagctggaggaggagactgggggtgagggcccccctgcacccatccccaccactggcagccccagcacccaggagaaccagaatggcttggaaccggcggaagggaccacttcaggcccctcggcccctttctccactctgactccccggctgcatctgccctgcccacagcagccgcctcagcaacagttgtgacagtggctgagcctagcacagaccctgacagagacccccctcggcctcaaggatcctctttctgaccatcaagcctgcttcttggggggtgggcgggtaggggggtggccatccctgctacccgcccacccctgagtcccttgacttttgtattctgactccaaggtattgttcagacctcagctcctgggggccggcccctggagtcttccctccctggtagcctctaaccagcattcccagacacctgaggcagatagatggatgggctggtgggcaggggggtggctggggctgggccatcaccattccagagacaaggccagtgtatatgcaaactgggggactctcctcccttctctccccagttctggtcctggccaggccatgctacactaacccctgcccccactctcctcccctcttttccttccttcctacccccttctccctctcccttcccctgactgttccacccaggaggaggaaacttcacatagccgtgctcacagttttttattttaaaggaatttggctggggagctgaacagggctccctgtgatctgaagaaagcttttggtgcttgtcctcacaaccacctcagtcctccctccctgtcctcccctgtctcctttcctcctcctgggttcatgttgtaataaaagaagattgttggtgtgtaattaatttgttcaaaagaaaaaaaaaa

SEQ ID NO: 101905 - DNA, 4680 bp, Artificial Sequence
  derived and/or modified sequence
atggagcccggcagcgacgacttcctgcccccccccgagtgccccgtgttcgagccaagctgggctgagttcagggatcctctaggctacattgccaagatccggcctatagcagagaagtctggcatctgcaagatccgccctccggctgattggcagcctccattcgccgtggaagtggacaacttccgtttcacaccccgtatccagcgcttaaatgaacttgaggctcaaaccagagtcaagctgaattatcttgaccagattgctaagttctgggagattcaagggtctagcctcaaaattcctaacgtagagcggcgtattctggacttgtacagcctgagcaaaatcgtggtagaggagggaggatatgaagctatatgtaaggacaggagatgggcacgagtcgcccagcggctcaactaccctcccggcaagaacatcggctctctcctccgcagccattatgagagaattgtgtacccctacgagatgtatcaatcaggagctaacctggtctgtaacacccggccctttgacaacgaggagaaagacaaagagtacaaaccacactccatcccccttcggcaatccgtgcagccctctaagtttaatagttacggacgtagggcaaagcggctccagcctgaccccgagcccacagaagaagacatagaaaagaatcccgagctcaaaaagctgcagatctacggtgctggcccaaagatgatgggcctggggttaatggctaaggataagaccttgagaaaaaaagataaggaaggccccgagtgcccgcccacagtggtggtgaaagaggagttaggtggggacgttaaagttgaatcaactagtccaaagaccttccttgaaagcaaggaggagctgtcacactctcctgagccgtgtactaaaatgactatgcgcctaaggaggaaccatagcaatgcccagttcatagagtcctatgtgtgccggatgtgttcaagaggggacgaggacgataagctactcctttgcgatggctgtgacgacaactatcacatcttttgtcttttgcccccactccccgaaatccccaagggcgtatggcggtgtcccaaatgcgtaatggcggagtgtaaacgaccgccggaggcctttggatttgagcaggccaccagagagtacacactgcagtcctttggtgagatggctgactctttcaaagcggattattttaacatgccagttcacatggtgcccaccgagcttgtggaaaaagaattctggaggctggtgaatagcattgaagaagatgtcactgtcgagtacggagccgatattcattccaaggaattcggatcggggtttcctgtgtctgattccaaaagacatcttactcctgaggaggaagaatatgccacctccggctggaacctcaatgtgatgccagtgctggagcaatctgttctctgccatatcaatgctgacatctccggcatgaaggtcccttggctttatgtgggaatggtcttctctgctttttgttggcatatcgaggatcattggagttattcaattaactacttgcattggggcgaacccaaaacttggtatggtgtacctagcttagccgccgagcatctcgaagaggttatgaaaaagctcacccccgagcttttcgatagccaacctgatctcctccaccagctagtgaccctgatgaatcctaataccttgatgagccatggtgtgcctgttgtgcgcacgaaccagtgcgccggagagttcgtgattacttttcctcgggcttaccactctgggttcaaccaggggtacaactttgctgaggcagtgaacttctgcaccgccgattggctgccggccggacggcaatgcatagagcactataggaggctgcgtaggtattgtgtgttctcccatgaggagctgatctgtaagatggcagcctgcccagagaaactcgacctcaacctggccgctgcagtacataaggagatgttcataatggttcaggaggaacgcagactccgcaaggccttgcttgaaaaaggcattacagaggcagaaagggaggcattcgagttgcttcctgacgatgagcgccagtgtatcaagtgcaaaacaacgtgtttcctgagtgctctcgcgtgctacgactgtccagacggacttgtctgtctgtctcatatcaatgatctgtgtaaatgcagctctagcagacagtacttgcgctaccggtatacacttgacgagctgcccgccatgctacacaagctgaaagtcagagccgagtccttcgacacatgggccaacaaggttcgtgtggcgctggaggttgaggacggaaggaaacgctccctggaggagctcagagcgctggaatccgaggctagagagcgtaggtttcctaactccgagttgctgcagcagctgaaaaactgtctttctgaggcggaagcctgcgtaagtcgggctctgggtctggtgagtggacaggaggcaggaccacatagagtggcaggtttgcaaatgacgctgactgagttgagagccttcctggatcaaatgaataacctcccatgcgctatgcaccaaatcggcgatgttaagggagtgctcgaacaggtggaagcttaccaggcagaggcacgggaagccctagcaagtctcccaagttcacccggcctgctacagtctcttttagagaggggtcgccagctgggagtggaagtgcccgaggcacagcaattgcagagacaggtagagcaagctcgatggctcgatgaggtgaagcgcacactggctcccagcgcacgcagaggaacacttgccgtgatgcgcggactcctggtggccggggccagtgtggctcccagtcctgcggtggacaaggcccaggctgagcttcaggaactcctgactattgcagagagatgggaggaaaaggcccacctctgtttggaggcgaggcaaaaacacccccccgcaactctggaagccattatcagggaggcagaaaatatccctgtccacctccctaacatacaagctctcaaagaagctctagcaaaggcacgagcctggattgccgacgtggatgaaattcaaaacggcgatcattatccctgtctggacgacctggagggcctggtggccgtagggcgggacctgcctgtgggactcgaggagttgaggcagctggagctccaggtgctgacggcccactcctggcgcgagaaagcctcaaagactttccttaagaaaaactcatgctacacacttctagaggttctgtgcccatgcgcggatgcgggttctgacagcaccaagaggtcaaggtggatggaaaaggaactcgggctgtataagtcagacacggaactgctggggctgtccgcacaagatctccgtgatccaggaagcgtaattgtggcctttaaggagggtgaacaaaaagaaaaagagggtatacttcagctacgccgcacaaactctgctaagcctagcccactcgcctcatccagcactgcgtcatcgaccactagcatctgtgtctgcgggcaggtattagccggagctggcgccctgcagtgtgacctctgccaggactggttccacgggcgttgtgtgtctgtaccacgactgctgtcaagcccacgaccaaaccctacctcctctcctctgctggcctggtgggaatgggatactaagttcctgtgccccctttgtatgagatcgagacggccaagattagaaaccattctggcactgctggtggctttgcaacgcttgcccgtgcggttgcctgagggggaggccctgcagtgcttaaccgaacgggcaatctcgtggcagggcagagcaagacaagcactggcaagcgaagatgtaactgccctgctgggccggctcgcagagctacgccagcgactccaggccgagcctaggccagaggagccaccgaattatcccgctgcgcctgccagcgatcctctgcgcgagggatcgggtaaggacatgcctaaggtacaggggctattggaaaatggcgattctgtcactagtccagagaaggtggcccccgaggagggcagtgggaagagggacctggagctactgagtagtttactgccgcagttgacagggccggtgctggagctcccggaagctaccagggctcccctcgaagagcttatgatggagggagacctgctggaggtgacccttgacgaaaatcactctatctggcagttactgcaggcggggcagcctcctgaccttgagcggatccggactttgctcgaactcgaaaaggccgagagacacggctcaagagcacggggtagagcacttgaaagacgccggaggagaaaagtggataggggaggagaaggcgatgacccagcacgcgaagagctcgagccaaagagggtgagaagttctggaccagaggccgaggaggtacaagaagaggaagaactagaagaagagaccggtggcgaggggccgcctgcaccaattcccacaaccggatcacccagcacacaggagaatcaaaatggcttggagccagctgaagggacaaccagcggaccaagcgccccattttcaacactgactccacgtctccatcttccctgccctcagcaacctccccagcagcagctgtag

SEQ ID NO: 101906 - DNA, 4680 bp, Artificial Sequence
  derived and/or modified sequence
atggaacccggatcagatgacttcctcccccctcccgaatgtcctgtgtttgaaccttcctgggccgaatttcgtgaccctttagggtatattgcaaagataagacctattgccgaaaaatccggaatttgcaagattaggcctccagctgactggcagccccctttcgcggttgaagtagataatttccgattcaccccacgcatccagaggctcaacgagctcgaggcacagaccagagtgaagctcaattatctcgatcagattgccaagttctgggagatccagggctcctctcttaaaatacctaacgtagaacggaggatccttgacctctattctctgagtaagatcgtggtggaagagggcggttatgaggctatatgtaaagacaggagatgggccagggtggcacagaggctgaactacccaccaggcaaaaatattggcagcctgctgagaagccactacgaaagaatcgtgtacccatatgagatgtatcaatctggagctaacctcgtgtgtaatacacgaccctttgacaacgaggagaaggacaaggaatacaagccccattctatcccactccgccagagcgttcagccatcgaagttcaacagttatggcagaagagccaagagacttcagcccgatcccgagcctacagaagaggacatcgagaagaatcctgaactgaaaaaacttcagatttacggtgccggaccgaaaatgatgggactcgggttgatggccaaagataaaactctgcggaaaaaagataaagaaggtcctgaatgccctcctaccgtggtggtgaaggaggagcttggtggagatgtaaaggtcgagagtaccagcccaaaaacctttctcgaaagcaaggaggagctctctcactctccagagccatgcaccaaaatgaccatgagacttcgaagaaatcactcaaacgcccagttcattgagtcttacgtttgtcggatgtgcagccgtggagatgaggacgacaaactgctgctttgcgacggctgtgacgacaactaccacattttctgtctgctgccacccctcccagagattccaaagggcgtgtggcgctgtccgaagtgcgttatggccgaatgcaaaagaccacccgaggcatttggtttcgagcaagctaccagagaatacactctccagagcttcggtgaaatggcagactccttcaaggccgattattttaatatgcctgtccatatggtgccaactgagttggtggagaaagaattctggcgtctggtcaactccatagaggaggatgtcacagtggaatacggagccgacatccactctaaagaattcgggtcgggctttcccgtctccgatagtaagagacatctgacgcctgaggaagaagagtacgccacatcaggttggaacttaaatgtcatgccagtgctcgagcaatccgtcctgtgtcacatcaatgctgatatctcgggcatgaaggtaccctggttgtatgtgggcatggtcttctctgctttctgttggcatatcgaggaccattggtcatatagtatcaactatttacattggggagaaccaaagacatggtacggcgtaccctcactggctgcagaacatctggaagaggttatgaaaaagctgaccccagagctgtttgatagccaaccggatctgctgcatcagcttgttactctgatgaatcccaatacacttatgtcacatggagtgcctgttgtgaggacgaatcagtgtgctggagaattcgtcattacctttcccagagcctaccattccgggtttaatcagggctacaattttgcggaagccgtgaatttttgtaccgcggattggctgcccgctggcaggcaatgcattgaacactatcgaagacttaggcgatactgtgtgttctcccacgaagagcttatttgcaaaatggcagcttgccctgaaaagttggacctgaatctggccgctgccgtccataaagagatgttcatcatggtgcaagaagagcgcagattgagaaaggccttacttgaaaaggggataaccgaagccgaaagagaagccttcgaactgctgccagatgatgaaaggcaatgcatcaaatgcaaaactacctgcttcctgagtgcactggcatgctacgattgcccagacgggctggtatgtctatctcatattaacgacctgtgtaagtgcagctcttcccgccagtaccttcgttatcgttataccctagacgaactaccagccatgttgcacaagctgaaggttcgcgctgagagtttcgatacctgggctaacaaagtccgcgtggctctcgaagtggaggacggacggaagaggtcactggaagaacttcgcgcactggagagtgaggcaagagaaaggagattcccaaacagcgaactgctgcaacagctcaagaattgtctctcggaggcagaagcatgtgtgtcacgggcactaggtttagtgagcggccaagaagccggtccacaccgagttgctgggttacagatgaccctgactgagttacgggcttttctggatcagatgaacaacttaccgtgcgccatgcatcagatcggagatgttaagggtgtcttagaacaggtggaggcataccaggccgaagccagggaagcactggcaagcttaccctcctctccgggattgctgcagagcctgctggaaaggggtaggcaactgggtgtcgaggtgcccgaggcacaacagcttcaacgccaggtggagcaggcaaggtggctggacgaggtgaaaaggacacttgcaccctccgccagacgcggaactctggccgttatgagaggtctgctcgtcgccggtgcgtcagtggctccttcaccagccgtggataaagcccaggcagagttgcaggagctcctaacaatagccgagcggtgggaagaaaaagcccatctgtgtctcgaggcacgccaaaagcacccaccagccacgttggaggctatcattcgggaggctgagaatatccctgtccatctgcctaatattcaggccctcaaagaagcgttagccaaggcacgtgcatggattgctgacgtcgatgagatccagaacggggaccactacccatgtcttgacgatttagaaggactggtcgcagtcggccgtgacttgcctgtcggcttggaagaattgagacagttggaactgcaggttctcactgctcactcttggagggagaaagcttctaaaaccttcctcaaaaagaatagctgttacacattactggaggtcctatgtccttgtgcagacgctgggtctgactccacaaaacgcagcaggtggatggaaaaggaattgggactgtacaaatcagacaccgaactgctgggcctgtctgcccaggacctccgggatccgggaagtgtgatcgtagcatttaaagaaggggaacagaaggaaaaggagggtatcctgcagctacgtaggactaacagcgctaagccttcccccctggcatcatcctcgaccgcgagcagcactacttccatttgcgtgtgtggccaagttctggcgggagcgggtgcccttcagtgtgacctttgtcaggactggtttcacgggagatgtgtgtcagttcctagactgttatcttcccccaggcccaacccaacaagctcgcctctgctagcctggtgggaatgggacactaagttcttgtgcccgctgtgcatgagatcaagacggccaagactggagactatcctcgccctgttagtcgccttgcagagattgccggtgaggctgcccgagggcgaggcacttcagtgtctgacggagagagccatttcttggcaaggcagagccaggcaagcccttgcaagtgaagacgtcacagcactgttaggccgtctagcggaactcagacagcgcttgcaagccgagcccagacccgaggaaccacccaactaccctgcagcccctgcgtctgaccccctacgggaaggctctgggaaggacatgccgaaggttcagggcctgttagagaatggagactctgttaccagccctgaaaaagtggctcccgaagagggaagcgggaagcgcgacttggaactgttgagtagccttctgcctcagcttacaggacctgtgttagaactgccggaggcgaccagagcccctctggaagagctaatgatggagggggacctgctggaggtcacccttgatgaaaaccattccatctggcagctgttgcaggctggacagccaccagatctggagagaatacgcacgctgctggagctggaaaaggcggaacgacatggatcgcgagctaggggcagagctctggagaggaggcgcaggagaaaggtcgatagggggggtgagggtgatgatcccgcacgagaagagctggagcctaagcgtgtcaggagcagtggcccagaggcggaggaggtccaggaagaagaagaactggaggaggaaacaggtggcgaaggccctcctgcgccaattccaaccacaggctctccttcaacccaggaaaatcagaacggcttggaacctgcagaaggcaccaccagcggtccaagtgcaccgtttagcacccttaccccccgattgcatctcccttgtccacagcagcctccccagcagcaactatag

SEQ ID NO: 101907 - DNA, 4680 bp, Artificial Sequence
  derived and/or modified sequence
atggagcccggcagcgacgacttcctgcccccccccgagtgccccgtgttcgagcccagctgggccgagttcagagaccccctgggctacatcgccaagatcagacccatcgccgagaagagcggcatctgcaagatcagaccccccgccgactggcagccccccttcgccgtggaggtggacaacttcagattcacccccagaatccagagactgaacgagctggaggcccagaccagagtgaagctgaactacctggaccagatcgccaagttctgggagatccagggcagcagcctgaagatccccaacgtggagagaagaatcctggacctgtacagcctgagcaagatcgtggtggaggagggcggctacgaggccatctgcaaggacagaagatgggccagagtggcccagagactgaactacccccccggcaagaacatcggcagcctgctgagaagccactacgagagaatcgtgtacccctacgagatgtaccagagcggcgccaacctggtgtgcaacaccagacccttcgacaacgaggagaaggacaaggagtacaagccccacagcatccccctgagacagagcgtgcagcccagcaagttcaacagctacggcagaagagccaagagactgcagcccgaccccgagcccaccgaggaggacatcgagaagaaccccgagctgaagaagctgcagatctacggcgccggccccaagatgatgggcctgggcctgatggccaaggacaagaccctgagaaagaaggacaaggagggccccgagtgcccccccaccgtggtggtgaaggaggagctgggcggcgacgtgaaggtggagagcaccagccccaagaccttcctggagagcaaggaggagctgagccacagccccgagccctgcaccaagatgaccatgagactgagaagaaaccacagcaacgcccagttcatcgagagctacgtgtgcagaatgtgcagcagaggcgacgaggacgacaagctgctgctgtgcgacggctgcgacgacaactaccacatcttctgcctgctgccccccctgcccgagatccccaagggcgtgtggagatgccccaagtgcgtgatggccgagtgcaagagaccccccgaggccttcggcttcgagcaggccaccagagagtacaccctgcagagcttcggcgagatggccgacagcttcaaggccgactacttcaacatgcccgtgcacatggtgcccaccgagctggtggagaaggagttctggagactggtgaacagcatcgaggaggacgtgaccgtggagtacggcgccgacatccacagcaaggagttcggcagcggcttccccgtgagcgacagcaagagacacctgacccccgaggaggaggagtacgccaccagcggctggaacctgaacgtgatgcccgtgctggagcagagcgtgctgtgccacatcaacgccgacatcagcggcatgaaggtgccctggctgtacgtgggcatggtgttcagcgccttctgctggcacatcgaggaccactggagctacagcatcaactacctgcactggggcgagcccaagacctggtacggcgtgcccagcctggccgccgagcacctggaggaggtgatgaagaagctgacccccgagctgttcgacagccagcccgacctgctgcaccagctggtgaccctgatgaaccccaacaccctgatgagccacggcgtgcccgtggtgagaaccaaccagtgcgccggcgagttcgtgatcaccttccccagagcctaccacagcggcttcaaccagggctacaacttcgccgaggccgtgaacttctgcaccgccgactggctgcccgccggcagacagtgcatcgagcactacagaagactgagaagatactgcgtgttcagccacgaggagctgatctgcaagatggccgcctgccccgagaagctggacctgaacctggccgccgccgtgcacaaggagatgttcatcatggtgcaggaggagagaagactgagaaaggccctgctggagaagggcatcaccgaggccgagagagaggccttcgagctgctgcccgacgacgagagacagtgcatcaagtgcaagaccacctgcttcctgagcgccctggcctgctacgactgccccgacggcctggtgtgcctgagccacatcaacgacctgtgcaagtgcagcagcagcagacagtacctgagatacagatacaccctggacgagctgcccgccatgctgcacaagctgaaggtgagagccgagagcttcgacacctgggccaacaaggtgagagtggccctggaggtggaggacggcagaaagagaagcctggaggagctgagagccctggagagcgaggccagagagagaagattccccaacagcgagctgctgcagcagctgaagaactgcctgagcgaggccgaggcctgcgtgagcagagccctgggcctggtgagcggccaggaggccggcccccacagagtggccggcctgcagatgaccctgaccgagctgagagccttcctggaccagatgaacaacctgccctgcgccatgcaccagatcggcgacgtgaagggcgtgctggagcaggtggaggcctaccaggccgaggccagagaggccctggccagcctgcccagcagccccggcctgctgcagagcctgctggagagaggcagacagctgggcgtggaggtgcccgaggcccagcagctgcagagacaggtggagcaggccagatggctggacgaggtgaagagaaccctggcccccagcgccagaagaggcaccctggccgtgatgagaggcctgctggtggccggcgccagcgtggcccccagccccgccgtggacaaggcccaggccgagctgcaggagctgctgaccatcgccgagagatgggaggagaaggcccacctgtgcctggaggccagacagaagcacccccccgccaccctggaggccatcatcagagaggccgagaacatccccgtgcacctgcccaacatccaggccctgaaggaggccctggccaaggccagagcctggatcgccgacgtggacgagatccagaacggcgaccactacccctgcctggacgacctggagggcctggtggccgtgggcagagacctgcccgtgggcctggaggagctgagacagctggagctgcaggtgctgaccgcccacagctggagagagaaggccagcaagaccttcctgaagaagaacagctgctacaccctgctggaggtgctgtgcccctgcgccgacgccggcagcgacagcaccaagagaagcagatggatggagaaggagctgggcctgtacaagagcgacaccgagctgctgggcctgagcgcccaggacctgagagaccccggcagcgtgatcgtggccttcaaggagggcgagcagaaggagaaggagggcatcctgcagctgagaagaaccaacagcgccaagcccagccccctggccagcagcagcaccgccagcagcaccaccagcatctgcgtgtgcggccaggtgctggccggcgccggcgccctgcagtgcgacctgtgccaggactggttccacggcagatgcgtgagcgtgcccagactgctgagcagccccagacccaaccccaccagcagccccctgctggcctggtgggagtgggacaccaagttcctgtgccccctgtgcatgagaagcagaagacccagactggagaccatcctggccctgctggtggccctgcagagactgcccgtgagactgcccgagggcgaggccctgcagtgcctgaccgagagagccatcagctggcagggcagagccagacaggccctggccagcgaggacgtgaccgccctgctgggcagactggccgagctgagacagagactgcaggccgagcccagacccgaggagccccccaactaccccgccgcccccgccagcgaccccctgagagagggcagcggcaaggacatgcccaaggtgcagggcctgctggagaacggcgacagcgtgaccagccccgagaaggtggcccccgaggagggcagcggcaagagagacctggagctgctgagcagcctgctgccccagctgaccggccccgtgctggagctgcccgaggccaccagagcccccctggaggagctgatgatggagggcgacctgctggaggtgaccctggacgagaaccacagcatctggcagctgctgcaggccggccagccccccgacctggagagaatcagaaccctgctggagctggagaaggccgagagacacggcagcagagccagaggcagagccctggagagaagaagaagaagaaaggtggacagaggcggcgagggcgacgaccccgccagagaggagctggagcccaagagagtgagaagcagcggccccgaggccgaggaggtgcaggaggaggaggagctggaggaggagaccggcggcgagggcccccccgcccccatccccaccaccggcagccccagcacccaggagaaccagaacggcctggagcccgccgagggcaccaccagcggccccagcgcccccttcagcaccctgacccccagactgcacctgccctgcccccagcagcccccccagcagcagctgtag

SEQ ID NO: 101908 - protein, 491 aa, Artificial Sequence
  derived and/or modified sequence
MQPLLCLGNLEDARERTGTLLAQHPAWGRTRAKPGSPLNTKKEGDLIAAQARLKDLEALLNSKEAALSTALSEKRTLEGELHDLRGQVAKLEAALGEAKKQLQDEMLRRVDAENRLQTMKEELDFQKNIYSEELRETKRRHETRLVEIDNGKQREFESRLADALQELRAQHEDQVEQYKKELEKTYSAKLDNARQSAERNSNLVGAAHEELQQSRIRIDSLSAQLSQLQKQLAAKEAKLRDLEDSLARERDTSRRLLAEKEREMAEMRARMQQQLDEYQELLDIKLALDMEIHAYRKLLEGEEERLRLSPSPTSQRSRGRASSHSSQTQGGGSVTKKRKLESTESRSSFSQHARTSGRVAVEEVDEEGKFVRLRNKSNEDQSMGNWQIKRQNGDDPLLTYRFPPKFTLKAGQVVTIWAAGAGATHSPPTDLVWKAQNTWGCGNSLRTALINSTGEEVAMRKLVRSVTVVEDDEDEDGDDLLHHHHVSGSRR

SEQ ID NO: 101909 - DNA, 1476 bp, Artificial Sequence
  derived and/or modified sequence
atgcagccattactctgtctgggcaatctggaggacgcaagggaacgaactgggactctgctcgctcaacatcctgcatggggcaggactcgggcaaaacccgggagcccactgaacactaagaaggagggcgacctgattgccgcccaggcccggttaaaagacctggaggctctgttgaacagtaaagaggctgcactgtccaccgcattgtcagagaaacggacattggagggcgagctgcatgacctccgcggacaagttgcaaagctggaggccgcactgggggaggcgaaaaaacagttgcaggatgaaatgctgaggcgcgtggatgcggaaaatcgtctgcaaaccatgaaagaagagctggacttccagaagaacatttactcagaagagcttcgggagacaaagcgccgacacgagacgcgcctcgtggaaattgacaatggtaaacagcgggagttcgagtcgcgccttgctgatgctttgcaggagttgcgagctcagcacgaagaccaggtggaacaatataaaaaggagttagagaagacctattctgccaagctggacaacgccagacagtctgcagaaagaaacagtaatctggttggggcggcacacgaagagctccagcagagtcgcatccgcattgattcactgagcgctcaattgtctcaactccagaagcagctggcagcgaaggaggctaagctgcgcgatttggaagacagtctggctcgggaaagagacacaagtcggcgcctgctggctgagaaagagagagaaatggccgagatgcgtgcccgcatgcagcagcagctagatgagtatcaggagcttcttgacattaagttagctctcgacatggagattcacgcttatcgcaagcttctcgagggggaggaagaacgacttcggttgagcccctctcccacctcccaaagatccaggggaagggcttcctcacactcttcacaaacccagggcggtggcagcgtgactaagaaacgaaagctggaaagtacagagtctagaagctccttttcacagcacgctcgcacatccggccgtgtggccgtagaagaggtcgatgaagagggcaaatttgtgcgccttcgaaataaaagcaacgaagatcaatccatgggcaattggcagattaaacgccagaacggagacgatcctttgttaacctatcgcttccctcctaagtttaccctcaaggctggtcaggtcgtgactatttgggccgctggtgccggcgctactcatagtccccccacagatttggtttggaaggcccagaatacctggggctgtggcaactctctgcgaacagctctaattaatagcacaggagaggaagtcgctatgcggaaactggtgagatccgtgactgtggtggaggatgatgaagatgaggatggcgatgacctgctgcaccaccaccatgtgagtgggtcccgccggtag

SEQ ID NO: 101910 - DNA, 1476 bp, Artificial Sequence
  derived and/or modified sequence
atgcaaccactgttgtgcctgggtaacttagaagatgccagggaacgcaccggcactttgctggctcaacacccggcttggggccgcaccagagctaaacctggaagccctttgaataccaaaaaggagggcgacctgatcgccgcgcaagcacggctgaaagatctggaagctctcttgaatagcaaggaggcggccctgagtactgcgttgtcggaaaaaagaacacttgagggcgagctccatgacctgcgaggccaagtggccaaactggaagccgccttgggcgaggctaagaaacaactgcaggatgaaatgttgcggcgggtcgacgctgaaaaccgactacagacaatgaaggaggagctcgactttcagaagaatatttactctgaagagctcagggagacaaagcgccgccacgagactcggctagtcgaaatcgacaacggcaagcagagagagttcgaaagtagacttgcagatgcactccaggagctgcgcgcccaacacgaggaccaagttgaacaatacaagaaagaactggagaaaacttattcagccaagctcgacaatgccagacaaagtgctgagcgcaactccaatctcgttggagccgcgcacgaagagttgcagcagtcaaggattagaatcgatagcctgtcggcccagctgtctcagctccagaaacagctcgctgcaaaagaagctaaactgcgcgatttggaagatagcctagcaagagaacgagatacttcacggaggctgctggccgagaaggagcgggagatggcagagatgagggcccgcatgcagcagcaactggatgagtaccaagaattgctggacattaagttggcgctagatatggagattcacgcctaccgcaaactattggaaggggaagaagagagactcaggctgtctccctcacctacgtcacagcgaagccgcggacgggcctcatctcacagctcccagacccagggaggtgggagcgtgacaaagaagaggaagctggagagtacagagagccgatctagcttcagccaacacgctcgcacatccggccgagtggccgtggaagaggtggacgaagagggcaagttcgtgcggctgcgtaacaagtccaacgaagatcagagcatgggtaactggcagatcaagcgacagaacggagacgatccactgctgacttacaggtttccccctaagttcacattaaaagctggacaggtagtgacaatctgggcagccggcgcaggggccacacacagtcctccgactgatcttgtttggaaggcacaaaacacctggggttgcggaaattctttaagaacagctctgatcaattccactggagaagaggtggccatgcgtaaactggtgagatccgtaacggtcgtggaggatgacgaagacgaagatggcgacgatctcctgcatcaccaccacgttagtggctccaggaggtag

SEQ ID NO: 101911 - DNA, 1679 bp, Artificial Sequence
  derived and/or modified sequence
gtgtgctgcctggcaatggggaactctgagggctgatttgccagtgatgggaagagttagaaacaggatgcccagcccttctcgcctcaagaggccactgggatgcagccactcctgtgcttggggaacctggaggatgcaagggaaaggactggcactctgctggcacagcacccggcctggggcaggacacgggcgaagccagggtctcccctcaataccaagaaggagggtgacctgatagctgctcaggctcggctgaaggacctggaggctctgctgaactccaaggaggccgcactgagcactgctctcagtgagaagcgcacgctggagggcgagctgcatgatctgcggggccaggtggccaagcttgaggcagccctaggtgaggccaagaagcaacttcaggatgagatgctgcggcgggtggatgctgagaacaggctgcagaccatgaaggaggaactggacttccagaagaacatctacagtgaggagctgcgtgagaccaagcgccgtcatgagacccgactggtggagattgacaatgggaagcagcgtgagtttgagagccggctggcggatgcgctgcaggaactgcgggcccagcatgaggaccaggtggagcagtataagaaggagctggagaagacttattctgccaagctggacaatgccaggcagtctgctgagaggaacagcaacctggtgggggctgcccacgaggagctgcagcagtcgcgcatccgcatcgacagcctctctgcccagctcagccagctccagaagcagctggcagccaaggaggcgaagcttcgagacctggaggactcactggcccgtgagcgggacaccagccggcggctgctggcggaaaaggagcgggagatggccgagatgcgggcaaggatgcagcagcagctggacgagtaccaggagcttctggacatcaagctggccctggacatggagatccacgcctaccgcaagctcttggagggcgaggaggagaggctacgcctgtcccccagccctacctcgcagcgcagccgtggccgtgcttcctctcactcatcccagacacagggtgggggcagcgtcaccaaaaagcgcaaactggagtccactgagagccgcagcagcttctcacagcacgcacgcactagcgggcgcgtggccgtggaggaggtggatgaggagggcaagtttgtccggctgcgcaacaagtccaatgaggaccagtccatgggcaattggcagatcaagcgccagaatggagatgatcccttgctgacttaccggttcccaccaaagttcaccctgaaggctgggcaggtggtgacgatctgggctgcaggagctggggccacccacagcccccctaccgacctggtgtggaaggcacagaacacctggggctgcgggaacagcctgcgtacggctctcatcaactccactggggaagaagtggccatgcgcaagctggtgcgctcagtgactgtggttgaggacgacgaggatgaggatggagatgacctgctccatcaccaccacgtgagtggtagccgccgctgaggccgagcctgcactggggccacccagccaggcctgggggcagcctctccccagcctccccgtgccaaaaatcttttcattaaagaatgttttggaacttt

SEQ ID NO: 101912 - DNA, 1577 bp, Artificial Sequence
  derived and/or modified sequence
atgcagccactcctgtgcttggggaacctggaggatgcaagggaaaggactggcactctgctggcacagcacccggcctggggcaggacacgggcgaagccagggtctcccctcaataccaagaaggagggtgacctgatagctgctcaggctcggctgaaggacctggaggctctgctgaactccaaggaggccgcactgagcactgctctcagtgagaagcgcacgctggagggcgagctgcatgatctgcggggccaggtggccaagcttgaggcagccctaggtgaggccaagaagcaacttcaggatgagatgctgcggcgggtggatgctgagaacaggctgcagaccatgaaggaggaactggacttccagaagaacatctacagtgaggagctgcgtgagaccaagcgccgtcatgagacccgactggtggagattgacaatgggaagcagcgtgagtttgagagccggctggcggatgcgctgcaggaactgcgggcccagcatgaggaccaggtggagcagtataagaaggagctggagaagacttattctgccaagctggacaatgccaggcagtctgctgagaggaacagcaacctggtgggggctgcccacgaggagctgcagcagtcgcgcatccgcatcgacagcctctctgcccagctcagccagctccagaagcagctggcagccaaggaggcgaagcttcgagacctggaggactcactggcccgtgagcgggacaccagccggcggctgctggcggaaaaggagcgggagatggccgagatgcgggcaaggatgcagcagcagctggacgagtaccaggagcttctggacatcaagctggccctggacatggagatccacgcctaccgcaagctcttggagggcgaggaggagaggctacgcctgtcccccagccctacctcgcagcgcagccgtggccgtgcttcctctcactcatcccagacacagggtgggggcagcgtcaccaaaaagcgcaaactggagtccactgagagccgcagcagcttctcacagcacgcacgcactagcgggcgcgtggccgtggaggaggtggatgaggagggcaagtttgtccggctgcgcaacaagtccaatgaggaccagtccatgggcaattggcagatcaagcgccagaatggagatgatcccttgctgacttaccggttcccaccaaagttcaccctgaaggctgggcaggtggtgacgatctgggctgcaggagctggggccacccacagcccccctaccgacctggtgtggaaggcacagaacacctggggctgcgggaacagcctgcgtacggctctcatcaactccactggggaagaagtggccatgcgcaagctggtgcgctcagtgactgtggttgaggacgacgaggatgaggatggagatgacctgctccatcaccaccacgtgagtggtagccgccgctgaggccgagcctgcactggggccacccagccaggcctgggggcagcctctccccagcctccccgtgccaaaaatcttttcattaaagaatgttttggaacttt

SEQ ID NO: 101913 - DNA, 1476 bp, Artificial Sequence
  derived and/or modified sequence
atgcagcccctgctgtgcctgggcaacctggaggatgcccgggagaggacaggcaccctgctggcccagcacccagcctggggccgcacccgggccaagccaggcagccccctgaacaccaagaaggagggggacctgattgctgcccaggcccggctgaaggacctggaggccctgctgaacagcaaggaggccgccctgagcacagccctgtctgagaagaggaccctggagggggagctgcatgacctgcggggccaggtggccaagctggaggccgccctgggggaggccaagaagcagctgcaggatgagatgctgcggcgggtggatgctgaaaatcggctgcagaccatgaaggaggagctggacttccagaagaacatctacagcgaggagctgcgggagaccaagagaagacatgagacccggctggtggagattgacaacgggaagcagcgggagtttgagagccggctggctgatgccctgcaggagctgcgggcccagcacgaggaccaggtggagcagtacaagaaggagctggagaagacctacagcgccaagctggacaatgcccggcagagcgctgagaggaacagcaacctggtgggcgccgcccacgaggagctgcagcagagccgcatcagaattgacagcctgagcgcccagctgagccagctgcagaagcagctggccgccaaggaggccaagctgcgggacctggaggacagcctggcccgggagcgggacaccagccggcggctgctggccgagaaggagcgggagatggccgagatgagggccaggatgcagcagcagctggatgagtaccaggagctgctggacatcaagctggccctggacatggagatccacgcctacaggaagctgctggagggggaggaggagcggctgcggctgagccccagccccaccagccagaggagccggggccgggccagcagccacagcagccagacccagggcggcggctctgtgaccaagaagaggaagctggagagcacagagagccgcagcagcttcagccagcacgcccggaccagcggccgggtggccgtggaggaggtggatgaggagggcaagtttgtgcggctgaggaacaagagcaatgaagaccagagcatgggcaactggcagatcaagaggcagaatggagatgaccccctgctgacctaccgcttcccccccaagttcaccctgaaggccggccaggtggtgaccatctgggccgccggggccggggccacccacagccccccaacagacctggtgtggaaggcccagaacacctggggctgcggcaacagcctgaggacagccctgatcaacagcactggagaggaggtggccatgaggaagctggtgcgctctgtgacagtggtggaggatgatgaagatgaagatggagatgacctgctgcaccaccaccacgtgtctggcagcagaagatag

SEQ ID NO: 101914 - DNA, 1476 bp, Artificial Sequence
  derived and/or modified sequence
atgcagcccctgctgtgcctgggcaacctggaggacgcccgggagcggacagggacattgctggcacagcatcccgcatggggccggactcgtgctaaacctggatcacctctcaatacaaagaaggagggcgatctgatagctgcacaggcccgcctcaaggatctggaagctttgttgaatagtaaagaggccgccctgtccaccgctcttagcgaaaagcggacactagagggcgagctgcatgacctgcgcggacaggtggcaaagctcgaagcagccttgggcgaagctaaaaagcagcttcaggacgaaatgttacggcgcgttgacgcagagaatcggttacagaccatgaaagaggagctagacttccagaagaacatctattcagaggaactgagagaaaccaagagaagacacgaaacccggctagtcgagattgacaatgggaaacagcgagagttcgaaagcaggttggctgacgcccttcaagaactgagagcccagcacgaagaccaggtggaacaatacaaaaaggagctggagaaaacatattccgctaagctggacaacgctcgacagagcgctgaacggaattcgaaccttgtcggggctgcccatgaggagcttcagcagtcaaggataaggatcgattcactaagcgcgcagctcagtcagctacaaaaacaactggcagccaaggaggctaaactgcgtgatttggaagactccctggcaagagagcgagatacctcccggaggttactggccgagaaagagagagaaatggcagaaatgcgggcccgcatgcagcaacaattggacgagtaccaagagctcctggatatcaaactcgctctggacatggagatccacgcctataggaagctcctcgagggcgaggaggaaagacttaggctctccccctctccgaccagccagcggtcccgcggcagggccagtagtcatagctcacagactcagggcggaggcagtgtaaccaaaaagagaaagttggagagcactgagtctcgttcatcattcagtcagcacgccagaacatctggaagggtggccgtcgaagaagtggatgaggaaggaaagttcgttcggctccgcaacaagagtaacgaagatcagtctatgggtaattggcaaatcaaaagacagaacggggacgatccccttcttacctaccgattccccccaaagttcactctcaaagcagggcaggtggtcaccatttgggccgctggcgctggggctacacacagccctcctaccgatcttgtttggaaggcccagaatacctggggatgtggcaacagtctccgaacggccctcataaacagcacgggagaggaggtggcgatgaggaaacttgtcagaagtgtgactgtggtagaagatgatgaagatgaggatggggatgaccttctccaccaccaccacgtgtccggcagccgccgctag

SEQ ID NO: 101915 - DNA, 1476 bp, Artificial Sequence
  derived and/or modified sequence
atgcagcccctgctgtgcctgggcaacctggaggacgcccgggagcgtacaggcactctactcgcccaacacccagcttggggcaggactcgagccaagcccggtagccctctcaacacaaaaaaggagggggacctgattgctgcccaggctcgcctgaaggatctcgaggcgctgctgaactccaaagaggccgccttgagcaccgccttgagcgagaaacggaccctagaaggcgagctgcacgatcttcgggggcaggtggccaaactagaagcagctctgggggaggcgaagaaacagctgcaggacgagatgctgcgacgggttgacgccgagaatcgcctgcagacaatgaaggaagagcttgatttccagaagaatatctacagcgaggaactgagagaaactaaaagaaggcacgagacgcgcctggttgagatcgataacggtaagcaaagggaatttgaatcccggctagccgatgccttgcaggaactccgagcacaacatgaagaccaggtcgagcagtacaaaaaagagctcgaaaagacatacagcgcaaaattagacaacgctaggcaaagtgctgaacggaactcaaaccttgtcggcgccgcccacgaggagctgcagcagtccagaattcgtattgatagcctgtccgcacagctcagccagctccagaagcagttagccgccaaagaggccaagttacgagatttggaggacagcttagctcgagagcgtgacactagccgaagattgctggccgaaaaggagcgcgaaatggcagagatgagagcgagaatgcaacaacagctagatgagtatcaggagttgttagatatcaaattagctctcgatatggagattcacgcttatcgtaagttattagaaggggaggaggagagactgcggcttagcccgagccccacatctcagaggtctcgcggcagggcgtcctcccatagctcacagacacaaggtggagggagcgtgacaaagaagagaaagctggagtcaactgaatcgcgctcatccttctcccagcatgccagaacatctggacgcgttgcagtggaggaggtcgacgaggagggcaaattcgtccgcttaaggaacaagtcaaatgaggaccagtccatgggcaactggcagatcaagcgacaaaacggcgatgaccccctcctcacttatagattccctcctaaatttaccctgaaagcaggccaggtcgtgaccatatgggcagccggagcaggtgccactcattctccccccaccgaccttgtgtggaaggcccagaatacctggggctgcgggaactcactgcgcaccgccctgataaattccacgggcgaagaggtggccatgcggaaattagttaggtcagttactgtagtcgaggacgatgaagacgaggatggagatgatctactacaccaccatcacgtcagcggaagccggaggtag

SEQ ID NO: 101916 - DNA, 1476 bp, Artificial Sequence
  derived and/or modified sequence
atgcagcccttactgtgtctcggcaatcttgaagacgccagagagagaacagggaccttattggcgcagcaccccgcatggggccgtactcgcgctaagccaggctctcctcttaacacgaagaaggagggagatctgattgccgctcaggccaggctgaaggatctggaggcgctgttgaatagcaaggaggctgccctcagtaccgcactaagtgagaaaaggactctggaaggtgaattgcatgacctgaggggacaggtcgccaaactggaagctgctctgggcgaggccaaaaaacagctgcaggacgaaatgcttagacgtgtggatgcagagaatcggttgcagaccatgaaagaggaactagacttccagaaaaacatatactcggaggagcttagagagacaaagagacgtcacgagacacgattagttgaaattgacaacgggaagcaaagggagttcgagtctcgactcgcagacgcactgcaggaattgcgagcacaacacgaggaccaggtcgaacagtataagaaggagctggagaagacttacagcgcaaagctcgataacgctagacagtccgcagagagaaatagcaaccttgtcggcgcagctcacgaagagttgcagcagagccgtattagaatcgactcccttagcgctcagctgtcacaactccagaaacagctggccgctaaggaggctaaactgcgcgaccttgaggattccctggctagggaacgcgatacaagtcgacgcctcttggctgagaaggagcgcgagatggccgagatgcgagcccgaatgcagcagcaacttgatgaataccaggaactgctggatattaaactggctctggatatggagatccatgcctaccgcaagttattggaaggagaagaggagagactcaggttgtcgccaagccctacctcccaacgttcccgtggaagagcatcctcccatagttcgcagactcagggcggaggcagcgttactaaaaagagaaagttagaaagcacggagagtcggtccagcttctcacagcatgccagaacctccggcagagtggcagtagaggaggtggacgaagagggcaagttcgtgagactgcgaaacaagagtaacgaagaccaatcgatgggaaactggcagattaagcgccagaatggtgacgatcctttgttaacttacaggttccctcccaaattcaccctgaaggccggacaggtggttaccatttgggccgcaggagcgggagccacccattcccctccaacggaccttgtatggaaggcccagaacacttgggggtgcgggaactcactgcgcacagctctgatcaactcaacgggcgaggaagtggcaatgaggaaactggtgaggtcagtcacagtggtcgaggatgatgaggacgaagacggagacgaccttctgcatcatcaccacgtgtccgggagcaggcgctag

SEQ ID NO: 101917 - DNA, 1476 bp, Artificial Sequence
  derived and/or modified sequence
atgcaacctctcctgtgtctcgggaacttggaagatgctcgcgaaagaacgggcacattacttgcccagcacccggcatggggaaggacacgcgcaaaacctggaagccctctgaataccaagaaagaaggagacctgattgcagcccaagccagactcaaagacttggaagccctccttaactctaaagaggctgcccttagtacggccctgtcagaaaaaaggaccctggagggagaactgcacgacctcagggggcaggtggcgaagctcgaggccgctctgggggaagctaagaaacagctgcaggatgaaatgttgcggcgagtggacgcagaaaaccgccttcagaccatgaaagaggaactggatttccagaagaacatatattccgaggagctgcgtgagacaaagagacgtcacgagacacgcctggttgaaatcgacaacggaaagcaacgggagtttgagtcacgcctcgccgatgccctgcaggagttgagggcacagcacgaggaccaagtggagcagtacaagaaagaactggagaaaacatattcagccaagttagacaacgcccgtcagagtgctgagcgcaactccaatctggtgggcgctgcacacgaagaactgcagcaaagccgaattcgcatcgattccctctccgcccaactgtcccagctccagaagcagttagcggcaaaggaagcgaagctgcgggacctcgaggactcactggcccgtgaacgggatacaagtcgcagacttctggcagaaaaggagcgcgagatggctgagatgcgcgcacgtatgcaacagcaactggatgagtaccaagagctcctggatatcaaattggctcttgacatggagatacacgcctacaggaagcttctggaaggcgaggaagagcgactgagactgagtccttcaccaacatctcagcgctctcggggacgcgcttcaagccacagttcgcagacccagggaggtggatccgtcacaaaaaagagaaaactggagagcaccgaatcaagatcatcattttcccagcacgcgcgaacctccggtcgggtggccgtcgaagaggtcgacgaggagggcaagtttgttcggcttcggaacaaatccaacgaggatcagagtatggggaactggcagattaagcgccaaaacggcgacgatcccctgctcacctatcgttttcctcccaagttcacgctgaaggcaggtcaggtggtaactatctgggcagccggtgccggagctacacatagtcctcccacagacctggtgtggaaagctcagaatacatggggctgcggcaactctttgaggacagccctgattaatagtactggcgaagaggtggccatgcgcaaattggtccgttctgtcacggttgttgaggatgacgaagacgaagacggtgacgacctcctgcatcaccaccatgtgagcggttccaggcgatag

SEQ ID NO: 101918 - DNA, 1476 bp, Artificial Sequence
  derived and/or modified sequence
atgcagcccctgctgtgcctgggcaacctggaggacgccagagagagaaccggcaccctgctggcccagcaccccgcctggggcagaaccagagccaagcccggcagccccctgaacaccaagaaggagggcgacctgatcgccgcccaggccagactgaaggacctggaggccctgctgaacagcaaggaggccgccctgagcaccgccctgagcgagaagagaaccctggagggcgagctgcacgacctgagaggccaggtggccaagctggaggccgccctgggcgaggccaagaagcagctgcaggacgagatgctgagaagagtggacgccgagaacagactgcagaccatgaaggaggagctggacttccagaagaacatctacagcgaggagctgagagagaccaagagaagacacgagaccagactggtggagatcgacaacggcaagcagagagagttcgagagcagactggccgacgccctgcaggagctgagagcccagcacgaggaccaggtggagcagtacaagaaggagctggagaagacctacagcgccaagctggacaacgccagacagagcgccgagagaaacagcaacctggtgggcgccgcccacgaggagctgcagcagagcagaatcagaatcgacagcctgagcgcccagctgagccagctgcagaagcagctggccgccaaggaggccaagctgagagacctggaggacagcctggccagagagagagacaccagcagaagactgctggccgagaaggagagagagatggccgagatgagagccagaatgcagcagcagctggacgagtaccaggagctgctggacatcaagctggccctggacatggagatccacgcctacagaaagctgctggagggcgaggaggagagactgagactgagccccagccccaccagccagagaagcagaggcagagccagcagccacagcagccagacccagggcggcggcagcgtgaccaagaagagaaagctggagagcaccgagagcagaagcagcttcagccagcacgccagaaccagcggcagagtggccgtggaggaggtggacgaggagggcaagttcgtgagactgagaaacaagagcaacgaggaccagagcatgggcaactggcagatcaagagacagaacggcgacgaccccctgctgacctacagattcccccccaagttcaccctgaaggccggccaggtggtgaccatctgggccgccggcgccggcgccacccacagcccccccaccgacctggtgtggaaggcccagaacacctggggctgcggcaacagcctgagaaccgccctgatcaacagcaccggcgaggaggtggccatgagaaagctggtgagaagcgtgaccgtggtggaggacgacgaggacgaggacggcgacgacctgctgcaccaccaccacgtgagcggcagcagaagatag

SEQ ID NO: 101919 - protein, 572 aa, Artificial Sequence
  derived and/or modified sequence
METPSQRRATRSGAQASSTPLSPTRITRLQEKEDLQELNDRLAVYIDRVRSLETENAGLRLRITESEEVVSREVSGIKAAYEAELGDARKTLDSVAKERARLQLELSKVREEFKELKARNTKKEGDLIAAQARLKDLEALLNSKEAALSTALSEKRTLEGELHDLRGQVAKLEAALGEAKKQLQDEMLRRVDAENRLQTMKEELDFQKNIYSEELRETKRRHETRLVEIDNGKQREFESRLADALQELRAQHEDQVEQYKKELEKTYSAKLDNARQSAERNSNLVGAAHEELQQSRIRIDSLSAQLSQLQKQLAAKEAKLRDLEDSLARERDTSRRLLAEKEREMAEMRARMQQQLDEYQELLDIKLALDMEIHAYRKLLEGEEERLRLSPSPTSQRSRGRASSHSSQTQGGGSVTKKRKLESTESRSSFSQHARTSGRVAVEEVDEEGKFVRLRNKSNEDQSMGNWQIKRQNGDDPLLTYRFPPKFTLKAGQVVTIWAAGAGATHSPPTDLVWKAQNTWGCGNSLRTALINSTGEEVAMRKLVRSVTVVEDDEDEDGDDLLHHHHVSGSRR

SEQ ID NO: 101920 - DNA, 2077 bp, Artificial Sequence
  derived and/or modified sequence
aggaggacctattagagcctttgccccggcgtcggtgactcagtgttcgcgggagcgccgcacctacaccagccaacccagatcccgaggtccgacagcgcccggcccagatccccacgcctgccaggagcaagccgagagccagccggccggcgcactccgactccgagcagtctctgtccttcgacccgagccccgcgccctttccgggacccctgccccgcgggcagcgctgccaacctgccggccatggagaccccgtcccagcggcgcgccacccgcagcggggcgcaggccagctccactccgctgtcgcccacccgcatcacccggctgcaggagaaggaggacctgcaggagctcaatgatcgcttggcggtctacatcgaccgtgtgcgctcgctggaaacggagaacgcagggctgcgccttcgcatcaccgagtctgaagaggtggtcagccgcgaggtgtccggcatcaaggccgcctacgaggccgagctcggggatgcccgcaagacccttgactcagtagccaaggagcgcgcccgcctgcagctggagctgagcaaagtgcgtgaggagtttaaggagctgaaagcgcgcaataccaagaaggagggtgacctgatagctgctcaggctcggctgaaggacctggaggctctgctgaactccaaggaggccgcactgagcactgctctcagtgagaagcgcacgctggagggcgagctgcatgatctgcggggccaggtggccaagcttgaggcagccctaggtgaggccaagaagcaacttcaggatgagatgctgcggcgggtggatgctgagaacaggctgcagaccatgaaggaggaactggacttccagaagaacatctacagtgaggagctgcgtgagaccaagcgccgtcatgagacccgactggtggagattgacaatgggaagcagcgtgagtttgagagccggctggcggatgcgctgcaggaactgcgggcccagcatgaggaccaggtggagcagtataagaaggagctggagaagacttattctgccaagctggacaatgccaggcagtctgctgagaggaacagcaacctggtgggggctgcccacgaggagctgcagcagtcgcgcatccgcatcgacagcctctctgcccagctcagccagctccagaagcagctggcagccaaggaggcgaagcttcgagacctggaggactcactggcccgtgagcgggacaccagccggcggctgctggcggaaaaggagcgggagatggccgagatgcgggcaaggatgcagcagcagctggacgagtaccaggagcttctggacatcaagctggccctggacatggagatccacgcctaccgcaagctcttggagggcgaggaggagaggctacgcctgtcccccagccctacctcgcagcgcagccgtggccgtgcttcctctcactcatcccagacacagggtgggggcagcgtcaccaaaaagcgcaaactggagtccactgagagccgcagcagcttctcacagcacgcacgcactagcgggcgcgtggccgtggaggaggtggatgaggagggcaagtttgtccggctgcgcaacaagtccaatgaggaccagtccatgggcaattggcagatcaagcgccagaatggagatgatcccttgctgacttaccggttcccaccaaagttcaccctgaaggctgggcaggtggtgacgatctgggctgcaggagctggggccacccacagcccccctaccgacctggtgtggaaggcacagaacacctggggctgcgggaacagcctgcgtacggctctcatcaactccactggggaagaagtggccatgcgcaagctggtgcgctcagtgactgtggttgaggacgacgaggatgaggatggagatgacctgctccatcaccaccacgtgagtggtagccgccgctgaggccgagcctgcactggggccacccagccaggcctgggggcagcctctccccagcctccccgtgccaaaaatcttttcattaaagaatgttttggaactttaaaaaaaa

SEQ ID NO: 101921 - DNA, 1398 bp, Artificial Sequence
  derived and/or modified sequence
atggaaacacctagccagaggcgggcaacacgctccggggctcaagcatccagtacacccctctcacctacaaggattacgcggttgcaggaaaaagaggatctgcaggagctcaatgaccgtctggcagtgtatattgacagggtgcgttccttggagactgagaacgccggcttacggttacgcatcacagagagcgaggaagtcgtgagccgggaagtgtcaggaattaaggccgcttatgaagctgagttaggtgatgccagaaagacactagactccgttgcaaaagaacgtgccaggctgcagctggagctgtccaaggtgagagaggagttcaaggagttaaaagctcgcaacactaaaaaggaaggagacttgattgcagctcaggctcgcctgaaggacctggaagccctgctgaatagtaaggaggctgccctttctaccgctctgtccgaaaaacgcaccctggagggtgagctgcatgatcttcgcggacaggttgccaagttggaagcggctttaggagaggccaagaagcagcttcaggacgaaatgcttcgacgggtggacgcagaaaaccggttgcaaactatgaaggaagagctagattttcaaaagaacatttattccgaagagttgcgcgagacaaagcgacggcacgagaccagattggtcgagattgacaatggtaagcagagggagtttgagtcccggcttgctgacgccttgcaagagctgagagcgcagcatgaagaccaggtggaacagtacaaaaaggagctggagaagacctactcagcgaaactcgacaatgcaaggcagtcggccgagcgaaattctaacctcgtcggggctgcccacgaggaactccagcagagccgcattaggattgactctctatccgctcagctctcccagctgcagaagcaactcgccgccaaggaggccaagctacgcgatctggaagacagcctggctagggagcgcgacacctcccgtaggcttctcgctgaaaaagaaagagagatggccgagatgcgggctaggatgcagcaacaacttgacgaatatcaagaacttctcgatatcaagttggcgctagacatggaaattcatgcttatagaaagttgcttgaaggagaggaggaaaggcttaggctgtcaccaagccccacctctcaacgctctagaggacgcgcgtccagccacagttcacagacacaggggggggggtctgtaactaagaagcggaagctagaatcgaccgagtcgagaagttcctttagccaacatgcccgtacgtctggtcgcgtggccgtggaagaagtggacgaggacgaagatggcgacgatctgctgcatcatcaccatgtcagtgggagccgcaggtag

SEQ ID NO: 101922 - DNA, 1719 bp, Artificial Sequence
  derived and/or modified sequence
atggaaaccccctcgcagagacgagccacaagaagcggagctcaagcgtcaagtacacctctgagccccacccgaattactagacttcaggagaaagaggacctccaggagctgaatgatcgtttggccgtgtacatagatagggtgaggagccttgagaccgaaaacgccggcctaagactgaggatcacggagagcgaagaagtcgtctcccgggaagtctcaggaattaaggccgcttatgaggccgagctgggcgatgcaaggaagaccctggatagcgttgccaaggaaagggctcgactccagcttgaattatccaaggtacgggaggaattcaaggaactgaaggcaagaaatactaaaaaggagggtgacctgatcgcagctcaagcccggttgaaggatttagaggccctgttaaactctaaggaagcagctctgagtacggccctgtctgaaaaacgcacactggagggagagctccatgatctgagaggacaggtcgccaagcttgaggccgccctgggagaagcaaagaaacagctgcaagatgagatgctgagacgggtggacgcggagaacaggctgcagacaatgaaagaggagttggattttcagaaaaacatttactcagaagaactgcgcgaaacaaagcggcgacacgaaacccgactcgtggagatcgataatggcaagcaaagggaatttgagtcacgcctcgccgatgcattacaggaactcagagcccaacacgaagatcaagtggagcagtataaaaaagaactggaaaagacttatagtgctaagttagataacgcacgacagagtgccgaacgcaacagtaatcttgttggtgctgcccatgaggagttacagcaatcccggattaggattgattctttgagcgctcagctatcccagctgcagaaacagctggccgcgaaggaggcaaagctgagggacctggaagacagcctcgctcgcgagcgagataccagccgtaggttgctggctgaaaaagaacgcgagatggccgaaatgagggctagaatgcaacagcaactggacgagtaccaagagctcttggatattaagctcgcccttgatatggaaattcatgcataccggaaactcctagaaggggaggaggagaggctgcggctgagcccttcaccaacctctcagcgctcaagaggcagagctagtagtcactccagccagactcaaggcggtggctccgtgactaagaaaaggaagctggaatctactgaatctcgcagctctttctctcagcacgctcggacatccggtcgggtggccgtggaagaggtagacgaggagggaaagtttgtaaggttgaggaacaagagtaacgaagaccagagcatgggcaactggcagatcaaaaggcagaacggcgatgatccccttctcacttaccgcttccccccgaagttcaccctgaaggctgggcaagtggtaacaatatgggcagctggagccggcgccacacacagtccgcctaccgaccttgtgtggaaggcccagaatacctggggttgcgggaactccttgagaactgcactcataaattccaccggcgaggaggtggcaatgcgaaaactggtacggtcagtcaccgtcgtggaagatgacgaagatgaggacggcgacgacctgctccatcaccatcacgtgagtgggagccgaaggtag

SEQ ID NO: 101923 - DNA, 1719 bp, Artificial Sequence
  derived and/or modified sequence
atggaaactccttcacagaggcgagccacaaggagtggggcccaggctagtagcacccccctcagcccaactcgaatcacaagactgcaggagaaagaagatcttcaggagttgaacgacagactggcggtttatattgacagagtccggtctctcgaaaccgaaaacgcgggtctgagactcagaattacggaatcggaggaggtggtgtcacgggaagtgtcagggattaaagccgcatacgaggccgagttgggcgacgctaggaagacgctggattcggtggcgaaagaaagagcccgtctgcaactggagttgagcaaagtgagagaggagttcaaggaactcaaagctcgcaatacgaaaaaagaaggcgatcttattgctgctcaggcacgactcaaagacctcgaggccctgttgaacagcaaagaagctgctttgtctacagccctgtctgagaaacgaactctagaaggcgaattgcatgacctgaggggccaagtcgccaaactggaagcagcactcggtgaggccaaaaaacagttgcaggacgagatgctcaggcgcgtggatgcagagaaccgcttgcagaccatgaaggaagaacttgactttcagaaaaacatctactctgaggaacttcgcgaaacaaaacgcagacacgagacaagactcgtggaaatcgacaacggaaagcagagagaattcgagtcaaggctggctgacgctttgcaagaactccgggctcaacatgaggatcaagtggaacaatataaaaaagaattggagaaaacgtattcagcgaaactggataatgccagacaatccgccgagcggaatagcaacctggtaggggccgcccacgaggaactacaacagagcaggattcgtattgatagcctgagcgcccagttgagtcagttgcagaagcagctcgccgcaaaggaagcaaaactgagggacttggaggactcccttgctcgagagcgtgacacaagtcggagactattggcggagaaagaaagagagatggccgaaatgagggccagaatgcaacagcagcttgatgagtaccaggagctgctggacattaagttggcgctggacatggagatccacgcctaccggaaactgcttgaaggcgaggaagagagactgagactttccccctcacctacctctcagaggagtcgaggtcgcgcatcaagtcatagcagtcagacacagggtggaggctccgtgaccaaaaaacgaaaacttgagagcacagaaagtcggtcatccttcagccaacacgcacgcacttcgggtagagtggcggtggaggaagtcgatgaggagggaaagttcgtgcggttgcggaataagtctaacgaagatcaatctatggggaactggcagatcaaaaggcagaatggtgacgatcctttactcacatatcgatttccccctaaattcactctcaaggcaggccaggtggtaacaatatgggctgctggtgctggagctacacacagcccacctactgatctggtgtggaaggctcagaatacttgggggtgcgggaactccctcaggaccgcacttatcaattcaaccggcgaagaggtcgccatgcggaagctcgtgaggtcagtgactgtggtggaggatgacgaagatgaggacggggacgacctgcttcatcaccatcacgtgagtggctcacgtagatag

SEQ ID NO: 101924 - DNA, 1464 bp, Artificial Sequence
  derived and/or modified sequence
atggaaactccgagccagagacgcgcaactcgatccggggcccaggctagctctacacctctgtcacctaccagaattacacggcttcaggagaaagaggacctacaggaactcaatgaccggctggccgtgtacattgatcgggtcaggtctctcgagaccgagaacgccggtttgcgacttagaatcaccgagtccgaggaagtggtttctagagaagtaagtggaattaaagctgcgtacgaggccgagcttggagatgctaggaaaacactggactccgtcgctaaagaacgcgctaggctgcagctggagttatccaaggtcagagaggagtttaaggagctcaaggcccgaaacaccaagaaagagggtgaccttatcgctgcccaggctcggctgaaagacctcgaggcgctgctgaattctaaggaggccgccctgtcaactgctctgtccgagaagcggaccctggagggcgaattacatgacctcagagggcaagtcgccaaactggaggccgcactcggcgaggctaagaagcagctgcaggacgaaatgctgaggagagtggacgctgagaatcggctccaaaccatgaaagaggagcttgatttccaaaaaaacatttacagtgaggagctgcgggagacgaagagacgacatgagaccagacttgtggagatagacaatggcaagcagagagagttcgaaagccggctcgctgatgcactacaggaactgcgtgctcagcatgaagaccaggttgagcagtacaaaaaagagctggagaagacttatagcgcgaagctggacaacgccagacagtcagccgaaagaaatagtaatctggttggcgccgcccacgaggaactgcaacaaagccggatacggatcgattccctgagtgctcagctgagccagctgcagaaacaactggctgcgaaagaggctaaactgagggacctggaggacagcctggctcgggagagggacacctctcgtcgattgctggctgagaaggagagggagatggccgagatgagggcgcggatgcagcagcagctggacgagtaccaggagttgctggatatcaaacttgcgctagacatggaaattcacgcttatagaaaactgctggagggagaggaagagcgcctgagactaagtccttccccgaccagccagcggtcccgaggaagggcatccagccattcttctcagacacagggcggcggatcagtaactaaaaaaagaaaactggagagcactgagtccaggtccagcttttcacaacacgcaagaacatccggcaattctctgaggaccgcactgattaactctacgggagaagaagtagccatgcgcaagctagtccgttctgtgaccgtggtagaggacgatgaggacgaagacggcgatgatctgctgcatcatcatcacgtgagtggatcacgccgctag

SEQ ID NO: 101925 - DNA, 1692 bp, Artificial Sequence
  derived and/or modified sequence
gccgcacctacaccagccaacccagatcccgaggtccgacagcgcccggcccagatccccacgcctgccaggagcaagccgagagccagccggccggcgcactccgactccgagcagtctctgtccttcgacccgagccccgcgccctttccgggacccctgccccgcgggcagcgctgccaacctgccggccatggagaccccgtcccagcggcgcgccacccgcagcggggcgcaggccagctccactccgctgtcgcccacccgcatcacccggctgcaggagaaggaggacctgcaggagctcaatgatcgcttggcggtctacatcgaccgtgtgcgctcgctggaaacggagaacgcagggctgcgccttcgcatcaccgagtctgaagaggtggtcagccgcgaggtgtccggcatcaaggccgcctacgaggccgagctcggggatgcccgcaagacccttgactcagtagccaaggagcgcgcccgcctgcagctggagctgagcaaagtgcgtgaggagtttaaggagctgaaagcgcgcaataccaagaaggagggtgacctgatagctgctcaggctcggctgaaggacctggaggctctgctgaactccaaggaggccgcactgagcactgctctcagtgagaagcgcacgctggagggcgagctgcatgatctgcggggccaggtggccaagcttgaggcagccctaggtgaggccaagaagcaacttcaggatgagatgctgcggcgggtggatgctgagaacaggctgcagaccatgaaggaggaactggacttccagaagaacatctacagtgaggagctgcgtgagaccaagcgccgtcatgagacccgactggtggagattgacaatgggaagcagcgtgagtttgagagccggctggcggatgcgctgcaggaactgcgggcccagcatgaggaccaggtggagcagtataagaaggagctggagaagacttattctgccaagctggacaatgccaggcagtctgctgagaggaacagcaacctggtgggggctgcccacgaggagctgcagcagtcgcgcatccgcatcgacagcctctctgcccagctcagccagctccagaagcagctggcagccaaggaggcgaagcttcgagacctggaggactcactggcccgtgagcgggacaccagccggcggctgctggcggaaaaggagcgggagatggccgagatgcgggcaaggatgcagcagcagctggacgagtaccaggagcttctggacatcaagctggccctggacatggagatccacgcctaccgcaagctcttggagggcgaggaggagaggctacgcctgtcccccagccctacctcgcagcgcagccgtggccgtgcttcctctcactcatcccagacacagggtgggggcagcgtcaccaaaaagcgcaaactggagtccactgagagccgcagcagcttctcacagcacgcacgcactagcgggcgcgtggccgtggaggaggtggacgaggatgaggatggagatgacctgctccatcaccaccacgtgagtggtagccgccgctgaggccgagcctgcactggggccacccagccaggcctgggggcagcctctccccagcctccccgtgccaaaaatcttttcattaaagaatgttttggaacttt

SEQ ID NO: 101926 - DNA, 2069 bp, Artificial Sequence
  derived and/or modified sequence
aggaggacctattagagcctttgccccggcgtcggtgactcagtgttcgcgggagcgccgcacctacaccagccaacccagatcccgaggtccgacagcgcccggcccagatccccacgcctgccaggagcaagccgagagccagccggccggcgcactccgactccgagcagtctctgtccttcgacccgagccccgcgccctttccgggacccctgccccgcgggcagcgctgccaacctgccggccatggagaccccgtcccagcggcgcgccacccgcagcggggcgcaggccagctccactccgctgtcgcccacccgcatcacccggctgcaggagaaggaggacctgcaggagctcaatgatcgcttggcggtctacatcgaccgtgtgcgctcgctggaaacggagaacgcagggctgcgccttcgcatcaccgagtctgaagaggtggtcagccgcgaggtgtccggcatcaaggccgcctacgaggccgagctcggggatgcccgcaagacccttgactcagtagccaaggagcgcgcccgcctgcagctggagctgagcaaagtgcgtgaggagtttaaggagctgaaagcgcgcaataccaagaaggagggtgacctgatagctgctcaggctcggctgaaggacctggaggctctgctgaactccaaggaggccgcactgagcactgctctcagtgagaagcgcacgctggagggcgagctgcatgatctgcggggccaggtggccaagcttgaggcagccctaggtgaggccaagaagcaacttcaggatgagatgctgcggcgggtggatgctgagaacaggctgcagaccatgaaggaggaactggacttccagaagaacatctacagtgaggagctgcgtgagaccaagcgccgtcatgagacccgactggtggagattgacaatgggaagcagcgtgagtttgagagccggctggcggatgcgctgcaggaactgcgggcccagcatgaggaccaggtggagcagtataagaaggagctggagaagacttattctgccaagctggacaatgccaggcagtctgctgagaggaacagcaacctggtgggggctgcccacgaggagctgcagcagtcgcgcatccgcatcgacagcctctctgcccagctcagccagctccagaagcagctggcagccaaggaggcgaagcttcgagacctggaggactcactggcccgtgagcgggacaccagccggcggctgctggcggaaaaggagcgggagatggccgagatgcgggcaaggatgcagcagcagctggacgagtaccaggagcttctggacatcaagctggccctggacatggagatccacgcctaccgcaagctcttggagggcgaggaggagaggctacgcctgtcccccagccctacctcgcagcgcagccgtggccgtgcttcctctcactcatcccagacacagggtgggggcagcgtcaccaaaaagcgcaaactggagtccactgagagccgcagcagcttctcacagcacgcacgcactagcgggcgcgtggccgtggaggaggtggatgaggagggcaagtttgtccggctgcgcaacaagtccaatgaggaccagtccatgggcaattggcagatcaagcgccagaatggagatgatcccttgctgacttaccggttcccaccaaagttcaccctgaaggctgggcaggtggtgacgatctgggctgcaggagctggggccacccacagcccccctaccgacctggtgtggaaggcacagaacacctggggctgcgggaacagcctgcgtacggctctcatcaactccactggggaagaagtggccatgcgcaagctggtgcgctcagtgactgtggttgaggacgacgaggatgaggatggagatgacctgctccatcaccaccacgtgagtggtagccgccgctgaggccgagcctgcactggggccacccagccaggcctgggggcagcctctccccagcctccccgtgccaaaaatcttttcattaaagaatgttttggaacttt

SEQ ID NO: 101927 - DNA, 2461 bp, Artificial Sequence
  derived and/or modified sequence
attccttgacccgaggaggatagggatgtggccttcggtctttcctcgcagctccggggcaagctaggagtgggatggaagtcgagagtcgatcccggagcccggccgcggggagaggttctcggcagagaagacaaagcccgcagcagcgatggggggagagctgggctctgcgtgttgtgggggccaggaaagggtgccaggctggggctggaaccccctggcaaaggatggggtcccctcatccctaaacagcaagccatctcccctcgcccgccccccgcccccccagtctcggagatctcagaggcaccgactgggagacttgatgtaattgtcttcacaattctgtgaagatggacttggtgtctctgcttcacatgaagggacctgaggttcagagaggctaagtaactttcctaggtcacagagctgtgttcgcgggagcgccgcacctacaccagccaacccagatcccgaggtccgacagcgcccggcccagatccccacgcctgccaggagcaagccgagagccagccggccggcgcactccgactccgagcagtctctgtccttcgacccgagccccgcgccctttccgggacccctgccccgcgggcagcgctgccaacctgccggccatggagaccccgtcccagcggcgcgccacccgcagcggggcgcaggccagctccactccgctgtcgcccacccgcatcacccggctgcaggagaaggaggacctgcaggagctcaatgatcgcttggcggtctacatcgaccgtgtgcgctcgctggaaacggagaacgcagggctgcgccttcgcatcaccgagtctgaagaggtggtcagccgcgaggtgtccggcatcaaggccgcctacgaggccgagctcggggatgcccgcaagacccttgactcagtagccaaggagcgcgcccgcctgcagctggagctgagcaaagtgcgtgaggagtttaaggagctgaaagcgcgcaataccaagaaggagggtgacctgatagctgctcaggctcggctgaaggacctggaggctctgctgaactccaaggaggccgcactgagcactgctctcagtgagaagcgcacgctggagggcgagctgcatgatctgcggggccaggtggccaagcttgaggcagccctaggtgaggccaagaagcaacttcaggatgagatgctgcggcgggtggatgctgagaacaggctgcagaccatgaaggaggaactggacttccagaagaacatctacagtgaggagctgcgtgagaccaagcgccgtcatgagacccgactggtggagattgacaatgggaagcagcgtgagtttgagagccggctggcggatgcgctgcaggaactgcgggcccagcatgaggaccaggtggagcagtataagaaggagctggagaagacttattctgccaagctggacaatgccaggcagtctgctgagaggaacagcaacctggtgggggctgcccacgaggagctgcagcagtcgcgcatccgcatcgacagcctctctgcccagctcagccagctccagaagcagctggcagccaaggaggcgaagcttcgagacctggaggactcactggcccgtgagcgggacaccagccggcggctgctggcggaaaaggagcgggagatggccgagatgcgggcaaggatgcagcagcagctggacgagtaccaggagcttctggacatcaagctggccctggacatggagatccacgcctaccgcaagctcttggagggcgaggaggagaggctacgcctgtcccccagccctacctcgcagcgcagccgtggccgtgcttcctctcactcatcccagacacagggtgggggcagcgtcaccaaaaagcgcaaactggagtccactgagagccgcagcagcttctcacagcacgcacgcactagcgggcgcgtggccgtggaggaggtggatgaggagggcaagtttgtccggctgcgcaacaagtccaatgaggaccagtccatgggcaattggcagatcaagcgccagaatggagatgatcccttgctgacttaccggttcccaccaaagttcaccctgaaggctgggcaggtggtgacgatctgggctgcaggagctggggccacccacagcccccctaccgacctggtgtggaaggcacagaacacctggggctgcgggaacagcctgcgtacggctctcatcaactccactggggaagaagtggccatgcgcaagctggtgcgctcagtgactgtggttgaggacgacgaggatgaggatggagatgacctgctccatcaccaccacgtgagtggtagccgccgctgaggccgagcctgcactggggccacccagccaggcctgggggcagcctctccccagcctccccgtgccaaaaatcttttcattaaagaatgttttggaacttt

SEQ ID NO: 101928 - DNA, 1683 bp, Artificial Sequence
  derived and/or modified sequence
aagccgagagccagccggccggcgcactccgactccgagcagtctctgtccttcgacccgagccccgcgccctttccgggacccctgccccgcgggcagcgctgccaacctgccggccatggagaccccgtcccagcggcgcgccacccgcagcggggcgcaggccagctccactccgctgtcgcccacccgcatcacccggctgcaggagaaggaggacctgcaggagctcaatgatcgcttggcggtctacatcgaccgtgtgcgctcgctggaaacggagaacgcagggctgcgccttcgcatcaccgagtctgaagaggtggtcagccgcgaggtgtccggcatcaaggccgcctacgaggccgagctcggggatgcccgcaagacccttgactcagtagccaaggagcgcgcccgcctgcagctggagctgagcaaagtgcgtgaggagtttaaggagctgaaagcgcgcaataccaagaaggagggtgacctgatagctgctcaggctcggctgaaggacctggaggctctgctgaactccaaggaggccgcactgagcactgctctcagtgagaagcgcacgctggagggcgagctgcatgatctgcggggccaggtggccaagcttgaggcagccctaggtgaggccaagaagcaacttcaggatgagatgctgcggcgggtggatgctgagaacaggctgcagaccatgaaggaggaactggacttccagaagaacatctacagtgaggagctgcgtgagaccaagcgccgtcatgagacccgactggtggagattgacaatgggaagcagcgtgagtttgagagccggctggcggatgcgctgcaggaactgcgggcccagcatgaggaccaggtggagcagtataagaaggagctggagaagacttattctgccaagctggacaatgccaggcagtctgctgagaggaacagcaacctggtgggggctgcccacgaggagctgcagcagtcgcgcatccgcatcgacagcctctctgcccagctcagccagctccagaagcagctggcagccaaggaggcgaagcttcgagacctggaggactcactggcccgtgagcgggacaccagccggcggctgctggcggaaaaggagcgggagatggccgagatgcgggcaaggatgcagcagcagctggacgagtaccaggagcttctggacatcaagctggccctggacatggagatccacgcctaccgcaagctcttggagggcgaggaggagaggctacgcctgtcccccagccctacctcgcagcgcagccgtggccgtgcttcctctcactcatcccagacacagggtgggggcagcgtcaccaaaaagcgcaaactggagtccactgagagccgcagcagcttctcacagcacgcacgcactagcgggaacagcctgcgtacggctctcatcaactccactggggaagaagtggccatgcgcaagctggtgcgctcagtgactgtggttgaggacgacgaggatgaggatggagatgacctgctccatcaccaccacgtgagtggtagccgccgctgaggccgagcctgcactggggccacccagccaggcctgggggcagcctctccccagcctccccgtgccaaaaatcttttcattaaagaatgttttggaacttt

SEQ ID NO: 101929 - DNA, 1398 bp, Artificial Sequence
  derived and/or modified sequence
atggagacccccagccagaggcgggccaccaggtctggggcccaggccagcagcacccccctgagccccacccgcatcacccggctgcaggagaaggaggacctgcaggagctgaatgaccggctggccgtgtacatcgacagagtgcgcagcctggagacagaaaatgccggcctgcggctgcgcatcacagagagcgaggaggtggtgtcccgggaggtgtctggcatcaaggccgcctatgaagctgagctgggagatgccaggaagaccctggacagcgtggccaaggagcgggcccggctgcagctggagctgagcaaggtgcgggaggagttcaaggagctgaaggccaggaacaccaagaaggagggggacctgattgctgcccaggcccggctgaaggacctggaggccctgctgaacagcaaggaggccgccctgagcacagccctgtctgagaagaggaccctggagggggagctgcatgacctgcggggccaggtggccaagctggaggccgccctgggggaggccaagaagcagctgcaggatgagatgctgcggcgggtggatgctgagaaccggctgcagaccatgaaggaggagctggacttccagaagaacatctacagcgaggagctgcgggagaccaagagaagacatgagacccggctggtggagattgacaatggcaagcagcgggagtttgagagccggctggctgatgccctgcaggagctgcgggcccagcacgaggaccaggtggagcagtacaagaaggagctggagaagacctacagcgccaagctggacaatgcccggcagagcgctgagaggaacagcaacctggtgggcgccgcccacgaggagctgcagcagagccgcatcagaattgacagcctgagcgcccagctgagccagctgcagaagcagctggccgccaaggaggccaagctgcgggacctggaggacagcctggcccgggagcgggacaccagccggcggctgctggccgagaaggagcgggagatggccgagatgagggccaggatgcagcagcagctggatgagtaccaggagctgctggacatcaagctggccctggacatggagatccacgcctacaggaagctgctggagggggaggaggagcggctgcggctgagccccagccccaccagccagaggagccggggccgggccagcagccacagcagccagacccagggcggcggctctgtgaccaagaagaggaagctggagagcacagagagccgcagcagcttcagccagcacgcccggaccagcggccgggtggccgtggaggaggtggatgaagatgaagatggagatgacctgctgcaccaccaccacgtgtctggcagcagaagatag

SEQ ID NO: 101930 - DNA, 1719 bp, Artificial Sequence
  derived and/or modified sequence
atggagacccccagccagaggcgggccaccaggtctggggcccaggccagcagcacccccctgagccccacccgcatcacccggctgcaggagaaggaggacctgcaggagctgaatgaccggctggccgtgtacatcgacagagtgcgcagcctggagacagaaaatgccggcctgcggctgcgcatcacagagagcgaggaggtggtgtcccgggaggtgtctggcatcaaggccgcctatgaagctgagctgggagatgccaggaagaccctggacagcgtggccaaggagcgggcccggctgcagctggagctgagcaaggtgcgggaggagttcaaggagctgaaggccaggaacaccaagaaggagggggacctgattgctgcccaggcccggctgaaggacctggaggccctgctgaacagcaaggaggccgccctgagcacagccctgtctgagaagaggaccctggagggggagctgcatgacctgcggggccaggtggccaagctggaggccgccctgggggaggccaagaagcagctgcaggatgagatgctgcggcgggtggatgctgagaaccggctgcagaccatgaaggaggagctggacttccagaagaacatctacagcgaggagctgcgggagaccaagagaagacatgagacccggctggtggagattgacaatggcaagcagcgggagtttgagagccggctggctgatgccctgcaggagctgcgggcccagcacgaggaccaggtggagcagtacaagaaggagctggagaagacctacagcgccaagctggacaatgcccggcagagcgctgagaggaacagcaacctggtgggcgccgcccacgaggagctgcagcagagccgcatcagaattgacagcctgagcgcccagctgagccagctgcagaagcagctggccgccaaggaggccaagctgcgggacctggaggacagcctggcccgggagcgggacaccagccggcggctgctggccgagaaggagcgggagatggccgagatgagggccaggatgcagcagcagctggatgagtaccaggagctgctggacatcaagctggccctggacatggagatccacgcctacaggaagctgctggagggggaggaggagcggctgcggctgagccccagccccaccagccagaggagccggggccgggccagcagccacagcagccagacccagggcggcggctctgtgaccaagaagaggaagctggagagcacagagagccgcagcagcttcagccagcacgcccggaccagcggccgggtggccgtggaggaggtggatgaggagggcaagtttgtgcggctgaggaacaagagcaatgaagaccagagcatgggcaactggcagatcaagaggcagaatggagatgaccccctgctgacctaccgcttcccccccaagttcaccctgaaggccggccaggtggtgaccatctgggccgccggggccggggccacccacagccccccaacagacctggtgtggaaggcccagaacacctggggctgcggcaacagcctgaggacagccctgatcaacagcactggagaggaggtggccatgaggaagctggtgcgctctgtgacagtggtggaggatgatgaagatgaagatggagatgacctgctgcaccaccaccacgtgtctggcagcagaagatag

SEQ ID NO: 101931 - DNA, 1464 bp, Artificial Sequence
  derived and/or modified sequence
atggagacccccagccagaggcgggccaccaggtctggggcccaggccagcagcacccccctgagccccacccgcatcacccggctgcaggagaaggaggacctgcaggagctgaatgaccggctggccgtgtacatcgacagagtgcgcagcctggagacagaaaatgccggcctgcggctgcgcatcacagagagcgaggaggtggtgtcccgggaggtgtctggcatcaaggccgcctatgaagctgagctgggagatgccaggaagaccctggacagcgtggccaaggagcgggcccggctgcagctggagctgagcaaggtgcgggaggagttcaaggagctgaaggccaggaacaccaagaaggagggggacctgattgctgcccaggcccggctgaaggacctggaggccctgctgaacagcaaggaggccgccctgagcacagccctgtctgagaagaggaccctggagggggagctgcatgacctgcggggccaggtggccaagctggaggccgccctgggggaggccaagaagcagctgcaggatgagatgctgcggcgggtggatgctgagaaccggctgcagaccatgaaggaggagctggacttccagaagaacatctacagcgaggagctgcgggagaccaagagaagacatgagacccggctggtggagattgacaatggcaagcagcgggagtttgagagccggctggctgatgccctgcaggagctgcgggcccagcacgaggaccaggtggagcagtacaagaaggagctggagaagacctacagcgccaagctggacaatgcccggcagagcgctgagaggaacagcaacctggtgggcgccgcccacgaggagctgcagcagagccgcatcagaattgacagcctgagcgcccagctgagccagctgcagaagcagctggccgccaaggaggccaagctgcgggacctggaggacagcctggcccgggagcgggacaccagccggcggctgctggccgagaaggagcgggagatggccgagatgagggccaggatgcagcagcagctggatgagtaccaggagctgctggacatcaagctggccctggacatggagatccacgcctacaggaagctgctggagggggaggaggagcggctgcggctgagccccagccccaccagccagaggagccggggccgggccagcagccacagcagccagacccagggcggcggctctgtgaccaagaagaggaagctggagagcacagagagccgcagcagcttcagccagcacgcccggaccagcggcaacagcctgaggacagccctgatcaacagcactggagaggaggtggccatgaggaagctggtgcgctctgtgacagtggtggaggatgatgaagatgaagatggagatgacctgctgcaccaccaccacgtgtctggcagcagaagatag

SEQ ID NO: 101932 - DNA, 1398 bp, Artificial Sequence
  derived and/or modified sequence
atggagacccccagccagcggcgggccacccggagcggcgcccaggccagctctacgcccctatcccctaccaggatcacccgcctacaagagaaggaggacttgcaggaactgaacgaccggctggcagtgtacatcgacagggttaggagcctggaaaccgaaaatgccggactgcgtctgcggatcaccgaaagtgaggaagtagtctctcgcgaggtgtccggaattaaagcagcctatgaggctgaactgggagatgcccgaaagaccctggattcagtcgcaaaggagagggcaagactccaactggaattgtccaaggtgagagaggagtttaaggaacttaaagcacgcaatacaaaaaaagaaggggacctcatcgctgcccaggcccggcttaaagatctggaggctctgctcaattcaaaagaagccgccttaagtactgctttgtccgaaaagagaactctagagggcgagctgcacgacctcagaggacaggtggccaagctcgaggccgcattaggggaggccaagaagcagctgcaggacgaaatgctgaggagggttgacgctgaaaaccgactgcagacgatgaaggaggaactggacttccagaagaacatctattccgaggaactaagagagacgaaaaggcgacacgaaactcggcttgtggagattgacaacgggaagcaacgggagttcgaaagccgactggccgacgctctacaagagctccgcgctcagcacgaggaccaagtggagcagtataagaaagaactcgagaaaacttacagtgcaaagttagacaacgcgcggcaatccgcggagcggaatagcaatcttgtgggtgctgctcatgaggagcttcagcagtcgcgtatccgtatcgattcattgtcagcgcagttatcccagctccagaagcaactcgccgccaaggaggcgaaactgcgcgatttggaagacagcttggcgagggaaagggatacgagccggagattactggccgagaaggagagagagatggctgagatgcgggcccggatgcagcagcagctcgatgaatatcaggaacttcttgacatcaagctcgcactggatatggagatccacgcttaccggaagctcctcgagggcgaagaggagagactgaggctttcgccgagccctaccagccagcggagtcgcggcagggcatcaagccatagctcccagactcaaggtggcgggtccgtgacgaagaagagaaagttggaaagtactgaaagtagatccagcttcagccagcatgcccggacttctggccgcgtcgctgttgaggaagttgatgaagatgaagacggggatgatcttctgcatcaccatcatgtgtccggcagtcgcaggtag

SEQ ID NO: 101933 - DNA, 1719 bp, Artificial Sequence
  derived and/or modified sequence
atggagacccccagccagcggcgggccacccggagcggcgcccaggccagttctacgcccctctccccgacacggataacgagactgcaggagaaagaagacctgcaggaattaaatgaccgcctggccgtgtatatcgaccgcgtgcgctccttagaaacggagaacgctgggcttaggctacgcattacagaaagcgaagaagtggtgtcgagggaagtttcggggataaaggcggcatatgaggccgaactcggagatgcccggaagacacttgacagtgtcgctaaagaacgggcgcgcctccaactcgagcttagtaaagtgagagaagagttcaaggagctgaaagcccggaataccaagaaggagggggaccttattgccgcccaggcccggctcaaggacttggaggcacttctcaacagcaaggaggctgctctgtcaaccgcgttgtccgagaagaggactttggaaggcgagctgcacgatctgagaggccaagtggccaaattagaagcagccctgggggaagccaaaaagcagttgcaggatgagatgttacggcgtgtggatgccgagaaccgcttacagacaatgaaggaagaattggacttccagaagaacatatactcagaagaacttcgcgagacaaagcgcaggcacgagacgcggttagtagaaattgacaacggaaagcaaagagaattcgaaagtagactggccgacgctttgcaggagctccgggcgcaacacgaagatcaggtcgaacaatacaaaaaggagctggagaagacttatagcgccaagctggataacgctcgccagagtgccgagcgaaactctaatctagtaggagcggcccatgaagaactgcaacaatcacggatacgtattgattctctctccgcccagctgtctcagcttcagaaacagcttgccgcaaaggaagcaaaactgcgcgatcttgaagactcactggcacgggaacgagatactagtcgccgcctgcttgctgagaaagaaagggagatggcagagatgcgagctcggatgcagcagcagcttgacgaataccaggagttgctcgatataaaactggcgcttgacatggaaatacatgcctatcggaagctgctggagggagaagaggagcgtctgagactgtctccatctccaacctctcagcgatcccgaggccgggcctcaagccacagctcccagacccagggcggaggttccgtgaccaagaagaggaagctcgaatcaactgaatctaggagttctttcagtcagcatgcacggacatcaggtcgggtagcagtcgaagaagtcgacgaggaggggaagtttgtacgcttgcgaaacaagtctaatgaagaccagtcgatgggcaattggcagattaaacggcagaatggagacgatcccctgctgacgtaccgcttcccacccaaatttaccctgaaggcaggccaagtggtgaccatctgggccgctggagctggagccacccacagcccgccgactgatctggtctggaaggcacagaatacgtggggatgtggcaatagtctgagaaccgctctaattaactctaccggggaagaggtggctatgcgcaaacttgtgcggtccgtgacagttgttgaagacgacgaagacgaggacggtgatgaccttttacaccaccaccacgtgagcggatcgcgacgatag

SEQ ID NO: 101934 - DNA, 1719 bp, Artificial Sequence
  derived and/or modified sequence
atggagacccccagccagcggcgggccacccggagcggcgcccaggcctcttcgacgccgctgtccccaactcggattacacgcctccaagaaaaggaggacttgcaggaactcaatgataggttggcagtctatatcgaccgtgtccgaagtctggagactgaaaatgccggcctgcggttgaggatcaccgaatctgaggaggtggtgtcaagagaggtatcgggtattaaagcagcctacgaagcagaacttggggatgcccggaagaccctagattcagttgcaaaggaaagagcccgactgcaactcgagcttagcaaagtgagggaggagtttaaagaactgaaggcaagaaatacgaagaaggaaggtgatttaatcgctgctcaggcccgcttaaaggacctggaagcgctgcttaacagcaaggaggccgctctgagtaccgctctgagcgaaaagaggactctggagggtgaacttcatgacctcagaggccaggtcgcaaagctagaagcagcccttggggaagccaaaaagcagctgcaagacgaaatgttacgacgggtggacgcggaaaacagattgcagaccatgaaagaagagttggacttccagaaaaacatctatagtgaagaactcagggaaacaaagcgccgacatgagactaggttggtagaaatagacaacggcaaacaacgtgagtttgaaagcagactggccgatgcactgcaagagttgcgcgcccagcatgaagaccaagtggaacaatacaaaaaagagttagaaaagacgtattctgccaaactcgataatgcccggcaaagtgctgagagaaactccaaccttgtgggcgctgcccatgaagaacttcagcaatccaggataaggatagacagcctatcggctcagctatcacagctgcaaaagcagctcgccgcaaaggaggcgaagctgcgggatcttgaggattctctggctcgcgaacgagacactagtcggcggctcctcgccgagaaagagcgcgaaatggctgagatgagagcccgcatgcagcagcaactcgacgaataccaggagctgctcgatataaagctggctttagatatggaaatccatgcatatagaaagctcctcgagggggaggaggagcgcctgaggcttagcccaagccccacttctcaacggagtaggggtcgagcgtccagtcacagttcccagacacagggcggagggtccgtaacgaaaaaaaggaagctggagtcaactgagagccgctccagtttctctcagcacgctaggacaagcgggcgagtggcggtggaggaggtggatgaggaggggaaatttgtccgtctaaggaacaaatctaatgaggaccagtcaatggggaactggcagattaaacgccagaatggcgatgaccccctcctgacatacaggttccctccaaaatttaccctgaaggcaggccaggttgttactatctgggcagcaggggctggggccacccattccccccctactgatctcgtttggaaagcccagaacacatgggggtgtgggaacagcctgaggacagccctgattaattccacaggagaggaagtcgctatgagaaagctggtgagatcagttaccgtggtcgaggatgacgaggatgaagacggagacgacctgcttcaccatcaccatgtgtccgggagtcgcaggtag

SEQ ID NO: 101935 - DNA, 1464 bp, Artificial Sequence
  derived and/or modified sequence
atggagacccccagccagcggcgggccacccggagcggcgcccaggcatcaagcacacccctcagccctacacgaattacgagattgcaagaaaaagaagacttacaagagctgaatgatcggcttgccgtgtacatcgacagggtgagatctttggagactgagaatgccggtctacggctgagaattaccgaatcagaagaagttgtgagccgggaggtaagcggcatcaaggcggcctatgaagcagagctgggcgatgcaagaaagaccttagacagcgtcgccaaggaaagggcccgcctccagctggagctgtctaaagtacgcgaagaattcaaagaactgaaggcgaggaacacaaaaaaggaaggtgatctgatcgcagcccaggctaggctcaaggatttagaggcgctgctgaattccaaggaggccgccctatctacagcactctccgagaagagaaccctcgagggagaactccacgatttgcgcggccaggtggcgaaactggaagcagcccttggcgaggccaaaaagcagctgcaggacgaaatgcttagacgagtcgacgcagagaatagactgcagacgatgaaggaggaactcgatttccagaagaacatatatagcgaagaattgcgcgaaaccaaaagacggcacgagacacgtctggtggaaatagacaacgggaagcaaagggagttcgagtcacggttggccgacgcgcttcaggagttacgggcccaacatgaagatcaggtcgagcagtacaagaaagagttggagaaaacttacagtgcgaagctcgacaacgctcggcagtctgccgaaaggaattcaaaccttgttggggccgcccatgaagagttgcagcagagtcgtatccgcatagacagcctgtctgcccagctcagccaattacagaagcaactggctgctaaagaagcaaaactccgagacctggaggactccttagcgcgcgagagggatacatctagacggcttctggccgaaaaggagagagaaatggctgagatgcgtgcccgtatgcagcagcaactggacgagtatcaagagttgttggatatcaagctggccttggacatggagattcacgcctatcgcaaactgctcgagggcgaggaagaaagattgcgtctgtcaccaagcccaacttcccaacgaagcagggggagggcaagttctcactctagtcagactcagggtgggggcagcgttacaaagaaacgcaaactggagtcaacggagtcccgctcgtccttctctcagcatgcaagaaccagcggtaatagcctgcgaacagctttaatcaactctacaggggaggaagtggcgatgaggaagctggtgagatccgtcactgtcgtggaagatgacgaagacgaggacggagacgacttacttcaccaccatcacgtcagtgggagtcgaaggtag

SEQ ID NO: 101936 - DNA, 1398 bp, Artificial Sequence
  derived and/or modified sequence
atggagactccttctcaaaggcgggcaacaagatctggcgcacaggcctcttccaccccgctctcccccaccaggatcacacggcttcaggagaaggaggacctgcaggagctgaacgatagacttgccgtgtacatcgaccgagtcaggagcctggagacggagaatgccggtttgcggctgcgaatcaccgagagtgaggaagtggtttcgagggaggtgtctggcatcaaagctgcttatgaggccgagctgggagacgccaggaagacactggactctgttgcaaaagagcgggcaaggctgcagctggaactgagtaaagtcagagaagaattcaaggagctcaaggcaaggaacacgaagaaggagggagacctcatcgccgcacaggctaggctgaaagatcttgaggccctgctcaattccaaggaggctgctctctcgacagccctttctgagaaaagaacactcgagggggagcttcacgatctgcgagggcaggtagcaaagctggaagccgctctcggggaagctaagaaacagctgcaggatgagatgttacggcgtgtggatgccgaaaaccgcctacagacaatgaaggaggaattggactttcagaaaaacatttatagtgaggagttgcgggaaactaaacgcagacatgagactagactagtcgaaatagataacgggaaacagcgcgagttcgaatcaagactggccgacgcactccaggaactgcgagcccagcatgaagaccaggtggaacaatacaaaaaagaacttgagaaaacctacagtgcaaagcttgacaacgctaggcaatctgccgaaagaaattctaacttggtaggcgctgcccatgaggagctccagcagagccggatccgcattgactcactctcagcacagctgtcccaattacagaaacagcttgccgctaaagaggccaaactccgggaccttgaagacagcctggcaagagagcgggatacatctcgaaggcttctcgccgagaaggaacgggaaatggccgagatgcgagccaggatgcagcagcagctggatgagtatcaggagttgctggacattaagttagccctggatatggagatccatgcataccggaagctactcgaaggcgaggaggaaaggctgagactcagcccttcccccacttcccagcgttcaagggggagggcgagctcccacagttctcagacccagggagggggaagcgtgacaaaaaagagaaaactggagagcacggagtccaggtcctctttttcgcaacacgctagaaccagcggaagagtcgcagtcgaggaggtcgatgaggatgaggatggggacgacttgctacatcaccatcacgtcagtggttcacgacggtag

SEQ ID NO: 101937 - DNA, 1719 bp, Artificial Sequence
  derived and/or modified sequence
atggagacccctagccagagaagagcaactcgttccggtgcgcaagccagctctactccgctatctcctacccggattacaaggctgcaggaaaaggaggatctccaggagttgaatgacaggctggcagtttatattgaccgcgtgaggtcactggaaaccgaaaacgcgggattgaggcttcggattactgaatccgaggaagtggtatcacgggaggtctccggcatcaaagctgcttatgaagcggaacttggcgatgcgagaaaaaccctggattccgtcgccaaagaaagagcacggctccaactcgagctgtcaaaggtcagggaagagtttaaggagctaaaggcacgaaacacaaagaaagagggcgatttgatcgcggcacaggctcgtttgaaagacctggaagcattactgaactccaaggaggctgccctaagtaccgctctgtctgaaaagagaaccctggagggtgaactgcatgacctgagagggcaggtagccaagctggaagccgctctaggtgaggcaaaaaagcaactgcaggacgagatgctcaggcgcgttgatgccgaaaaccggctgcagaccatgaaggaggaactcgacttccaaaaaaacatttatagtgaggaactacgcgagaccaaacgacggcacgaaactcgtttggttgagatagataatggcaagcagcgggagttcgaatctaggctggcagacgcactgcaggagcttcgagcccagcatgaagaccaggttgaacagtacaaaaaggagctggagaagacatactccgccaaactcgacaacgcaaggcaatcggcggagaggaactccaacctggtcggtgccgctcacgaggaactccagcaaagccgtatccgcatagactccttatctgcccagttgtcccagctgcagaaacagttggctgccaaggaggccaaacttcgtgatcttgaagacagccttgcgcgagagcgcgatactagcagacgactgctggccgagaaagagagggagatggctgaaatgagggcccgaatgcagcagcaacttgatgagtatcaagagctgctagacattaaactggcccttgatatggagatacacgcctatagaaagcttctggagggggaagaggagaggctacgactgagtccttctccaacatcgcagcgcagcagagggcgagcctcttcacactccagccagacccaggggggaggctcagtgacaaagaaaagaaaactggaatccacggagtcacgatcctctttcagccagcatgctcggacttcagggagagtggcggtggaggaggtcgatgaggaaggaaagttcgtgcgtttaaggaacaaatccaacgaagatcagagtatgggcaactggcagataaagaggcaaaatggggacgaccctctgttgacttatcgatttccacctaagttcacacttaaggctggacaggttgtgacaatttgggccgcaggggcaggcgcaacgcactcccctcccacggacttagtctggaaagctcagaacacctggggctgtggaaacagcctgcgcaccgccctgatcaattccaccggtgaagaggttgcaatgcgaaagttagtgagatcagtgaccgtggttgaagacgacgaggacgaggatggggacgacctgcttcaccatcatcatgtgtccggaagcaggcgctag

SEQ ID NO: 101938 - DNA, 1719 bp, Artificial Sequence
  derived and/or modified sequence
atggagacgcctagccagcggcgagccacccgttctggagcccaagctagtagcaccccactttctccaacccggataactcgactgcaagagaaggaggatctacaggagctgaacgaccggttggctgtctatatcgatcgggtcaggagcttagaaacagagaatgctggccttcgactgcgcattactgagtccgaagaggtcgtgtcccgcgaagtgagtgggatcaaagccgcttacgaagctgaactgggtgatgccagaaaaactttagattctgttgcaaaagagagggcccgactccagctggagttgagtaaggtgcgtgaggagttcaaggaacttaaggcacggaatacaaagaaggaaggtgacctgattgctgcccaggcacggctgaaggacttggaggctctgctgaatagcaaggaggccgctctcagcacagccctgtcagagaagcggactctggaaggcgagcttcacgacttgcgcggacaggttgccaagcttgaagcagccctaggcgaagcaaagaaacagttgcaggatgagatgctgagacgagtggacgcagagaacaggttacagacaatgaaggaagaactggattttcagaagaatatttacagtgaagagctgcgtgagacaaaacggaggcacgaaacaagactggttgaaattgacaacggcaagcagcgggaattcgaatctcgcctggccgacgctcttcaggaactgagagcacagcacgaagatcaggtggaacagtacaagaaggagctggaaaagacatacagtgctaaacttgacaacgctcgtcagtctgccgagcgaaactctaacctagtcggggctgcccatgaagagctccagcaaagtcgtattcgcattgacagtctttccgctcagctcagccagctgcaaaagcagttggccgctaaagaggctaagcttcgggatctggaggattccctcgctcgagaaagggatacaagtcggagactcctggccgagaaggagcgcgaaatggctgagatgagagcaagaatgcagcagcaactggatgaatatcaggaactgctcgacatcaaactggcactcgacatggagattcatgcttatcggaagcttctagaaggggaggaggagagattgcggttgtctccctctccgacttctcagcggtcccgagggagggcttccagccacagttcccagacacaggggggtggcagcgtgactaaaaagaggaagctggagagcacagagtcacggtcttctttctcccagcatgcacgaaccagcggcagggtggccgtggaggaggtagacgaagaaggcaaatttgtacgcctgcggaataaatctaatgaagaccagtcgatggggaattggcaaattaaacgtcagaacggcgacgaccctctgttgacctatcgctttccccctaagttcactctaaaagctggacaggtggtaacaatttgggcggctggcgctggtgcaacacactctcctccaaccgatctggtgtggaaggcacagaatacatggggatgtggaaatagcctccgcaccgccttgattaatagcacgggagaagaggttgccatgcggaagctggtgcggagcgtgaccgtcgtggaggatgatgaagacgaggatggagatgatcttctgcaccaccatcatgtttcaggcagtcgcaggtag

SEQ ID NO: 101939 - DNA, 1464 bp, Artificial Sequence
  derived and/or modified sequence
atggagacaccaagccagcggagagccacacggtcgggggcacaagcatcctctactccgttaagccccactcgaattaccagactgcaggaaaaagaggacctacaggagcttaatgaccgattggctgtgtacattgaccgtgtaagaagcttggaaaccgaaaatgcaggtctacggttaaggattacggagtctgaggaggtcgtttcaagagaggtgagcggaataaaggccgcttatgaagcagagctcggcgatgccaggaagactcttgacagcgtggccaaggaaagagctagattgcaactggagctttccaaagtgagggaagagtttaaagagctgaaggcgcgaaatactaagaaggaaggcgacttgatcgctgcacaggccaggctcaaggacttggaagcactgcttaactctaaggaggccgcactcagtactgccctttccgaaaagcggactctggagggagaattacatgacctccgaggacaagtggcaaaactggaggcagctttgggcgaggcgaagaagcaattgcaggacgagatgctgcgtagagtagatgctgagaacaggttacagaccatgaaggaggagctcgatttccagaaaaatatctattctgaagaactccgcgagacgaaacgacgacacgagactagactggtcgagatcgataacgggaagcagcgggaattcgagagccgcttggccgacgccctgcaagagctaagggcccaacacgaggaccaggtggagcagtacaagaaagagcttgagaagacatatagtgcaaagctggataatgccagacaaagcgcagagcgcaactcaaatttagtcggagccgctcatgaagagcttcagcagtctagaataagaatcgactctctgtctgcccagctgtcccagctgcagaaacaattggctgctaaggaagccaaactgagggaccttgaggactctctcgctagggaaagggacacaagcagacgcctgctggctgaaaaggaaagggaaatggcagagatgcgcgcaaggatgcagcaacagctggacgagtaccaagaacttcttgatatcaaactggccctcgacatggagatccatgcgtacaggaagttgttggagggggaagaggagcgcttacgactaagtccttctcctacctctcagaggtcccggggtagggcttcttcccattccagccagacacagggcggaggctctgtgaccaagaaacggaagctcgaatctacagaaagtcgcagcagcttctcgcagcacgctcgaacttcaggaaactccctgcgcaccgcactcattaattccactggggaggaagtggccatgcggaagttggttagatctgtcacggtcgtcgaagatgacgaagacgaagacggagacgatctgctgcatcatcatcacgtaagtggatctagacgttag

SEQ ID NO: 101940 - DNA, 1398 bp, Artificial Sequence
  derived and/or modified sequence
atggagacccccagccagagaagagccaccagaagcggcgcccaggccagcagcacccccctgagccccaccagaatcaccagactgcaggagaaggaggacctgcaggagctgaacgacagactggccgtgtacatcgacagagtgagaagcctggagaccgagaacgccggcctgagactgagaatcaccgagagcgaggaggtggtgagcagagaggtgagcggcatcaaggccgcctacgaggccgagctgggcgacgccagaaagaccctggacagcgtggccaaggagagagccagactgcagctggagctgagcaaggtgagagaggagttcaaggagctgaaggccagaaacaccaagaaggagggcgacctgatcgccgcccaggccagactgaaggacctggaggccctgctgaacagcaaggaggccgccctgagcaccgccctgagcgagaagagaaccctggagggcgagctgcacgacctgagaggccaggtggccaagctggaggccgccctgggcgaggccaagaagcagctgcaggacgagatgctgagaagagtggacgccgagaacagactgcagaccatgaaggaggagctggacttccagaagaacatctacagcgaggagctgagagagaccaagagaagacacgagaccagactggtggagatcgacaacggcaagcagagagagttcgagagcagactggccgacgccctgcaggagctgagagcccagcacgaggaccaggtggagcagtacaagaaggagctggagaagacctacagcgccaagctggacaacgccagacagagcgccgagagaaacagcaacctggtgggcgccgcccacgaggagctgcagcagagcagaatcagaatcgacagcctgagcgcccagctgagccagctgcagaagcagctggccgccaaggaggccaagctgagagacctggaggacagcctggccagagagagagacaccagcagaagactgctggccgagaaggagagagagatggccgagatgagagccagaatgcagcagcagctggacgagtaccaggagctgctggacatcaagctggccctggacatggagatccacgcctacagaaagctgctggagggcgaggaggagagactgagactgagccccagccccaccagccagagaagcagaggcagagccagcagccacagcagccagacccagggcggcggcagcgtgaccaagaagagaaagctggagagcaccgagagcagaagcagcttcagccagcacgccagaaccagcggcagagtggccgtggaggaggtggacgaggacgaggacggcgacgacctgctgcaccaccaccacgtgagcggcagcagaagatag

SEQ ID NO: 101941 - DNA, 1719 bp, Artificial Sequence
  derived and/or modified sequence
atggagacccccagccagagaagagccaccagaagcggcgcccaggccagcagcacccccctgagccccaccagaatcaccagactgcaggagaaggaggacctgcaggagctgaacgacagactggccgtgtacatcgacagagtgagaagcctggagaccgagaacgccggcctgagactgagaatcaccgagagcgaggaggtggtgagcagagaggtgagcggcatcaaggccgcctacgaggccgagctgggcgacgccagaaagaccctggacagcgtggccaaggagagagccagactgcagctggagctgagcaaggtgagagaggagttcaaggagctgaaggccagaaacaccaagaaggagggcgacctgatcgccgcccaggccagactgaaggacctggaggccctgctgaacagcaaggaggccgccctgagcaccgccctgagcgagaagagaaccctggagggcgagctgcacgacctgagaggccaggtggccaagctggaggccgccctgggcgaggccaagaagcagctgcaggacgagatgctgagaagagtggacgccgagaacagactgcagaccatgaaggaggagctggacttccagaagaacatctacagcgaggagctgagagagaccaagagaagacacgagaccagactggtggagatcgacaacggcaagcagagagagttcgagagcagactggccgacgccctgcaggagctgagagcccagcacgaggaccaggtggagcagtacaagaaggagctggagaagacctacagcgccaagctggacaacgccagacagagcgccgagagaaacagcaacctggtgggcgccgcccacgaggagctgcagcagagcagaatcagaatcgacagcctgagcgcccagctgagccagctgcagaagcagctggccgccaaggaggccaagctgagagacctggaggacagcctggccagagagagagacaccagcagaagactgctggccgagaaggagagagagatggccgagatgagagccagaatgcagcagcagctggacgagtaccaggagctgctggacatcaagctggccctggacatggagatccacgcctacagaaagctgctggagggcgaggaggagagactgagactgagccccagccccaccagccagagaagcagaggcagagccagcagccacagcagccagacccagggcggcggcagcgtgaccaagaagagaaagctggagagcaccgagagcagaagcagcttcagccagcacgccagaaccagcggcagagtggccgtggaggaggtggacgaggagggcaagttcgtgagactgagaaacaagagcaacgaggaccagagcatgggcaactggcagatcaagagacagaacggcgacgaccccctgctgacctacagattcccccccaagttcaccctgaaggccggccaggtggtgaccatctgggccgccggcgccggcgccacccacagcccccccaccgacctggtgtggaaggcccagaacacctggggctgcggcaacagcctgagaaccgccctgatcaacagcaccggcgaggaggtggccatgagaaagctggtgagaagcgtgaccgtggtggaggacgacgaggacgaggacggcgacgacctgctgcaccaccaccacgtgagcggcagcagaagatag

SEQ ID NO: 101942 - DNA, 1464 bp, Artificial Sequence
  derived and/or modified sequence
atggagacccccagccagagaagagccaccagaagcggcgcccaggccagcagcacccccctgagccccaccagaatcaccagactgcaggagaaggaggacctgcaggagctgaacgacagactggccgtgtacatcgacagagtgagaagcctggagaccgagaacgccggcctgagactgagaatcaccgagagcgaggaggtggtgagcagagaggtgagcggcatcaaggccgcctacgaggccgagctgggcgacgccagaaagaccctggacagcgtggccaaggagagagccagactgcagctggagctgagcaaggtgagagaggagttcaaggagctgaaggccagaaacaccaagaaggagggcgacctgatcgccgcccaggccagactgaaggacctggaggccctgctgaacagcaaggaggccgccctgagcaccgccctgagcgagaagagaaccctggagggcgagctgcacgacctgagaggccaggtggccaagctggaggccgccctgggcgaggccaagaagcagctgcaggacgagatgctgagaagagtggacgccgagaacagactgcagaccatgaaggaggagctggacttccagaagaacatctacagcgaggagctgagagagaccaagagaagacacgagaccagactggtggagatcgacaacggcaagcagagagagttcgagagcagactggccgacgccctgcaggagctgagagcccagcacgaggaccaggtggagcagtacaagaaggagctggagaagacctacagcgccaagctggacaacgccagacagagcgccgagagaaacagcaacctggtgggcgccgcccacgaggagctgcagcagagcagaatcagaatcgacagcctgagcgcccagctgagccagctgcagaagcagctggccgccaaggaggccaagctgagagacctggaggacagcctggccagagagagagacaccagcagaagactgctggccgagaaggagagagagatggccgagatgagagccagaatgcagcagcagctggacgagtaccaggagctgctggacatcaagctggccctggacatggagatccacgcctacagaaagctgctggagggcgaggaggagagactgagactgagccccagccccaccagccagagaagcagaggcagagccagcagccacagcagccagacccagggcggcggcagcgtgaccaagaagagaaagctggagagcaccgagagcagaagcagcttcagccagcacgccagaaccagcggcaacagcctgagaaccgccctgatcaacagcaccggcgaggaggtggccatgagaaagctggtgagaagcgtgaccgtggtggaggacgacgaggacgaggacggcgacgacctgctgcaccaccaccacgtgagcggcagcagaagatag

SEQ ID NO: 101943 - protein, 614 aa, Artificial Sequence
  derived and/or modified sequence
METPSQRRATRSGAQASSTPLSPTRITRLQEKEDLQELNDRLAVYIDRVRSLETENAGLRLRITESEEVVSREVSGIKAAYEAELGDARKTLDSVAKERARLQLELSKVREEFKELKARNTKKEGDLIAAQARLKDLEALLNSKEAALSTALSEKRTLEGELHDLRGQVAKLEAALGEAKKQLQDEMLRRVDAENRLQTMKEELDFQKNIYSEELRETKRRHETRLVEIDNGKQREFESRLADALQELRAQHEDQVEQYKKELEKTYSAKLDNARQSAERNSNLVGAAHEELQQSRIRIDSLSAQLSQLQKQLAAKEAKLRDLEDSLARERDTSRRLLAEKEREMAEMRARMQQQLDEYQELLDIKLALDMEIHAYRKLLEGEEERLRLSPSPTSQRSRGRASSHSSQTQGGGSVTKKRKLESTESRSSFSQHARTSGRVAVEEVDEEGKFVRLRNKSNEDQSMGNWQIKRQNGDDPLLTYRFPPKFTLKAGQVVTIWAAGAGATHSPPTDLVWKAQNTWGCGNSLRTALINSTGEEVAMRKLVRSVTVVEDDEDEDGDDLLHHHHGSHCSSSGDPAEYNLRSRTVLCGTCGQPADKASASGSGAQSPQNCSIM

SEQ ID NO: 101944 - protein, 487 aa, Artificial Sequence
  derived and/or modified sequence
METPSQRRATRSGAQASSTPLSPTRITRLQEKEDLQELNDRLAVYIDRVRSLETENAGLRLRITESEEVVSREVSGIKAAYEAELGDARKTLDSVAKERARLQLELSKVREEFKELKARNTKKEGDLIAAQARLKDLEALLNSKEAALSTALSEKRTLEGELHDLRGQVAKLEAALGEAKKQLQDEMLRRVDAENRLQTMKEELDFQKNIYSEELRETKRRHETRLVEIDNGKQREFESRLADALQELRAQHEDQVEQYKKELEKTYSAKLDNARQSAERNSNLVGAAHEELQQSRIRIDSLSAQLSQLQKQLAAKEAKLRDLEDSLARERDTSRRLLAEKEREMAEMRARMQQQLDEYQELLDIKLALDMEIHAYRKLLEGEEERLRLSPSPTSQRSRGRASSHSSQTQGGGSVTKKRKLESTESRSSFSQHARTSGNSLRTALINSTGEEVAMRKLVRSVTVVEDDEDEDGDDLLHHHHVSGSRR

SEQ ID NO: 101945 - DNA, 1845 bp, Artificial Sequence
  derived and/or modified sequence
atggagaccccctcgcagaggagagcaacccggagtggcgcgcaggccagcagcacccctttatcccccacaaggatcacccggttgcaggagaaggaggatctccaggaactaaatgataggctggcagtgtacattgacagggtccgtagtctcgagaccgagaatgccggcctcagactacgaattactgaaagcgaagaggttgtgagtcgcgaggtgtctggcattaaggctgcgtatgaggcagagttgggcgacgcgagaaaaacactggacagtgtggcgaaggagagagccagactccaactcgagctgtctaaggtgagagaagagttcaaggaactgaaggcaagaaatactaagaaagagggggatctgattgcagcgcaggctcgactgaaagacctggaggccctactgaacagtaaggaggccgcactttcgacagcactgtcagaaaaacggactctggaaggagagcttcacgacttacgcggccaggtagcaaaactcgaagccgctctcggggaggcgaaaaagcagttgcaggatgagatgttgaggcgtgtcgacgctgagaaccggctccagaccatgaaggaggaactggatttccagaaaaacatctattcagaggagttgcgagagacgaagcggcgtcatgagactcgcctggtcgaaatagacaacggaaaacagcgcgaattcgaatcaagactagccgacgctctgcaggagctccgggctcagcacgaggatcaagtggagcaatataaaaaggaactggagaaaacctactcagccaagcttgacaacgcaaggcagtctgccgaaaggaacagcaacttggtgggggccgcgcatgaagagttgcaacagtcacggatcaggattgattccctgtcggcacagctcagccagttgcagaagcaattggcggcaaaggaagctaaactgcgggatttggaagattccctagcaagagagcgcgataccagcagacggcttctggctgagaaagagagggaaatggccgagatgagagctcgcatgcagcagcaactcgatgagtatcaggagctgctcgatatcaagttggcactggatatggagatccacgcttaccgaaaactcctcgaaggcgaagaggagcggctccgactgtcccccagccccacctcccaacggtctcgaggtcgggcctcctctcactctagtcagacacagggtggcgggagtgtcacgaagaaaaggaaactagagagcaccgagtctcgctcaagttttagccagcacgctcggacatcggggagggtagccgtcgaagaggtggatgaggaggggaagttcgttcgcctgagaaacaagagtaacgaagatcagtctatggggaattggcaaattaagagacagaacggagacgatcccctcctaacctaccgctttccgcccaaatttacacttaaggcaggacaggtcgtaactatctgggcggcaggagcaggcgccacccatagccccccaaccgacttggtttggaaggctcaaaacacctggggctgtggaaactcccttcgcacggctttgatcaactcaacaggtgaagaagtcgcaatgagaaagctggtgaggtccgttacagtggtggaagacgacgaggacgaagatggcgatgacctgctccatcatcatcacggctcccattgttccagctccggcgatcccgcagagtacaatctgaggtctcggactgtgttgtgtggcacttgtgggcaacccgccgataaggcctccgcctcaggttccggtgcgcagagccctcagaattgctcaatcatgtag

SEQ ID NO: 101946 - DNA, 2253 bp, Artificial Sequence
  derived and/or modified sequence
gagcgccgcacctacaccagccaacccagatcccgaggtccgacagcgcccggcccagatccccacgcctgccaggagcaagccgagagccagccggccggcgcactccgactccgagcagtctctgtccttcgacccgagccccgcgccctttccgggacccctgccccgcgggcagcgctgccaacctgccggccatggagaccccgtcccagcggcgcgccacccgcagcggggcgcaggccagctccactccgctgtcgcccacccgcatcacccggctgcaggagaaggaggacctgcaggagctcaatgatcgcttggcggtctacatcgaccgtgtgcgctcgctggaaacggagaacgcagggctgcgccttcgcatcaccgagtctgaagaggtggtcagccgcgaggtgtccggcatcaaggccgcctacgaggccgagctcggggatgcccgcaagacccttgactcagtagccaaggagcgcgcccgcctgcagctggagctgagcaaagtgcgtgaggagtttaaggagctgaaagcgcgcaataccaagaaggagggtgacctgatagctgctcaggctcggctgaaggacctggaggctctgctgaactccaaggaggccgcactgagcactgctctcagtgagaagcgcacgctggagggcgagctgcatgatctgcggggccaggtggccaagcttgaggcagccctaggtgaggccaagaagcaacttcaggatgagatgctgcggcgggtggatgctgagaacaggctgcagaccatgaaggaggaactggacttccagaagaacatctacagtgaggagctgcgtgagaccaagcgccgtcatgagacccgactggtggagattgacaatgggaagcagcgtgagtttgagagccggctggcggatgcgctgcaggaactgcgggcccagcatgaggaccaggtggagcagtataagaaggagctggagaagacttattctgccaagctggacaatgccaggcagtctgctgagaggaacagcaacctggtgggggctgcccacgaggagctgcagcagtcgcgcatccgcatcgacagcctctctgcccagctcagccagctccagaagcagctggcagccaaggaggcgaagcttcgagacctggaggactcactggcccgtgagcgggacaccagccggcggctgctggcggaaaaggagcgggagatggccgagatgcgggcaaggatgcagcagcagctggacgagtaccaggagcttctggacatcaagctggccctggacatggagatccacgcctaccgcaagctcttggagggcgaggaggagaggctacgcctgtcccccagccctacctcgcagcgcagccgtggccgtgcttcctctcactcatcccagacacagggtgggggcagcgtcaccaaaaagcgcaaactggagtccactgagagccgcagcagcttctcacagcacgcacgcactagcgggcgcgtggccgtggaggaggtggatgaggagggcaagtttgtccggctgcgcaacaagtccaatgaggaccagtccatgggcaattggcagatcaagcgccagaatggagatgatcccttgctgacttaccggttcccaccaaagttcaccctgaaggctgggcaggtggtgacgatctgggctgcaggagctggggccacccacagcccccctaccgacctggtgtggaaggcacagaacacctggggctgcgggaacagcctgcgtacggctctcatcaactccactggggaagaagtggccatgcgcaagctggtgcgctcagtgactgtggttgaggacgacgaggatgaggatggagatgacctgctccatcaccaccacggctcccactgcagcagctcgggggaccccgctgagtacaacctgcgctcgcgcaccgtgctgtgcgggacctgcgggcagcctgccgacaaggcatctgccagcggctcaggagcccagagcccccagaactgcagcatcatgtaatctgggacctgccaggcaggggtgggggtggaggcttcctgcgtcctcctcacctcatgcccaccccctgccctgcacgtcatgggagggggcttgaagccaaagaaaaataaccctttggtttttttcttctgtatttttttttctaagagaagttattttctacagtggttttatactgaaggaaaaacacaagcaaaaaaaaaaaaaa

SEQ ID NO: 101947 - DNA, 1845 bp, Artificial Sequence
  derived and/or modified sequence
atggagacccccagccagaggcgggccaccaggtctggggcccaggccagcagcacccccctgagccccacccgcatcacccggctgcaggagaaggaggacctgcaggagctgaatgaccggctggccgtgtacatcgacagagtgcgcagcctggagacagaaaatgccggcctgcggctgcgcatcacagagagcgaggaggtggtgtcccgggaggtgtctggcatcaaggccgcctatgaagctgagctgggagatgccaggaagaccctggacagcgtggccaaggagcgggcccggctgcagctggagctgagcaaggtgcgggaggagttcaaggagctgaaggccaggaacaccaagaaggagggggacctgattgctgcccaggcccggctgaaggacctggaggccctgctgaacagcaaggaggccgccctgagcacagccctgtctgagaagaggaccctggagggggagctgcatgacctgcggggccaggtggccaagctggaggccgccctgggggaggccaagaagcagctgcaggatgagatgctgcggcgggtggatgctgagaaccggctgcagaccatgaaggaggagctggacttccagaagaacatctacagcgaggagctgcgggagaccaagagaagacatgagacccggctggtggagattgacaatggcaagcagcgggagtttgagagccggctggctgatgccctgcaggagctgcgggcccagcacgaggaccaggtggagcagtacaagaaggagctggagaagacctacagcgccaagctggacaatgcccggcagagcgctgagaggaacagcaacctggtgggcgccgcccacgaggagctgcagcagagccgcatcagaattgacagcctgagcgcccagctgagccagctgcagaagcagctggccgccaaggaggccaagctgcgggacctggaggacagcctggcccgggagcgggacaccagccggcggctgctggccgagaaggagcgggagatggccgagatgagggccaggatgcagcagcagctggatgagtaccaggagctgctggacatcaagctggccctggacatggagatccacgcctacaggaagctgctggagggggaggaggagcggctgcggctgagccccagccccaccagccagaggagccggggccgggccagcagccacagcagccagacccagggcggcggctctgtgaccaagaagaggaagctggagagcacagagagccgcagcagcttcagccagcacgcccggaccagcggccgggtggccgtggaggaggtggatgaggagggcaagtttgtgcggctgaggaacaagagcaatgaagaccagagcatgggcaactggcagatcaagaggcagaatggagatgaccccctgctgacctaccgcttcccccccaagttcaccctgaaggccggccaggtggtgaccatctgggccgccggggccggggccacccacagccccccaacagacctggtgtggaaggcccagaacacctggggctgcggcaacagcctgaggacagccctgatcaacagcactggagaggaggtggccatgaggaagctggtgcgctctgtgacagtggtggaggatgatgaagatgaagatggagatgacctgctgcaccaccaccacggcagccactgcagcagcagcggggaccctgctgagtacaacctgcggagcaggacagtgctgtgtggcacctgtggccagcctgctgacaaggccagcgccagcggcagcggggcccagagcccccagaactgcagcatcatgtag

SEQ ID NO: 101948 - DNA, 1845 bp, Artificial Sequence
  derived and/or modified sequence
atggagacccccagccagcggcgggccacccggagcggcgcccaggcttcatctactcccctttctccaacgagaattacgaggctccaagaaaaagaggatctgcaggaactcaatgaccgcctcgccgtttatatcgatagagttcgctccctggaaaccgaaaacgcaggcttgaggctgaggatcacagagtctgaagaagtcgtctcccgcgaagtctcagggatcaaagccgcatatgaggcggagctaggcgatgcccgcaaaacattggacagcgtcgctaaagaacgtgccagactgcaattggagctcagcaaagtcagagaggagtttaaggaacttaaggctcggaacaccaagaaggaaggcgatctgatcgcggcccaggccaggctgaaggatctggaggccctattaaactctaaggaggcagcgctgtcgacggcactatctgagaagaggacactcgagggtgagctgcacgatctgcgcggacaggtagccaagctcgaagcagcactcggcgaggccaaaaagcagctgcaggatgagatgctccggagggtggacgctgagaacaggctgcagaccatgaaagaggaactggatttccagaaaaatatctacagtgaggagctccgggaaactaaaaggcgtcatgaaactaggcttgtggagatcgacaacggaaaacagcgcgaattcgaaagtaggctggccgatgccctgcaggagcttcgggcccagcacgaggaccaagtggagcagtacaaaaaagagctggaaaagacctatagcgccaagctagacaatgccaggcagagcgccgaaagaaacagcaatttagttggcgcagcccacgaagaacttcagcagtcacgtatcaggatagactcgctgtctgcacagctctcccaactgcagaagcagcttgccgctaaggaggccaaactgagagacctagaggacagcttagcacgcgagagggacacctctagacgactcctcgctgagaaggagagagagatggcagagatgcgcgcccgaatgcagcaacagctggacgaataccaggagctgttggacattaagctggccctggatatggagatacacgcgtaccgcaaattgcttgagggagaggaagagagacttcgcttgtcgccctctcccacatctcagcgttcacgaggcagggcttcgagccattcatctcaaactcaaggcggaggaagtgtgactaaaaaacggaaactcgagtcaacagagagcagatcttctttcagtcaacacgccagaacgtccggcagagtcgcagtggaggaagtggacgaggagggcaaatttgtgagactccgcaataagtccaacgaagatcagtccatgggaaactggcagatcaaaagacagaatggggacgatccattacttacttaccggtttcccccaaaattcaccctaaaggctggccaagtcgtgactatatgggcagccggggcgggcgccactcattctccgcctacagatttggtatggaaggcccagaatacatggggctgcgggaattccctacgaacagccctgatcaactcaacaggcgaggaagtggccatgcgcaaactggtacggtcagtcacagtggtagaagacgacgaggacgaagacggcgacgatttgctgcatcatcaccacggctcacactgttcctcttccggagatcctgcagagtacaacctccgcagcaggaccgtgttgtgcggtacttgcggacaacccgcagataaggccagtgcgtctggctcaggggcacaaagtccccaaaattgtagcattatgtag

SEQ ID NO: 101949 - DNA, 1845 bp, Artificial Sequence
  derived and/or modified sequence
atggagactccttcacagcgtcgagctacccgatcaggtgcccaggcttcatccactcccctgagccccactagaataacgcgcctgcaggagaaggaagatttacaggaactgaacgaccgactggctgtctatatcgaccgagtgcgctcgctggagaccgagaatgccggactgagactgagaattaccgaatccgaagaggtagtaagccgggaagtgtctggaataaaagccgcttacgaagctgaacttggagacgctagaaagaccctggactcggtggcgaaggagcgagctaggctgcagctcgaactgtccaaagtgagggaggagttcaaggagttgaaagccaggaacaccaagaaggagggcgaccttatcgctgcgcaggccaggctgaaggacttggaagcgctcctcaactcaaaggaggccgcactcagcaccgcactgagcgagaaaaggacactagagggcgagctccatgacctgagaggccaggtggccaagttagaagccgctcttggcgaggcgaaaaagcagctacaagacgagatgctgcgtcgcgtggacgcagagaacaggctccagaccatgaaggaggagctggactttcagaagaacatctactccgaagaactccgggaaaccaagcgcagacacgagaccagattggtggaaatagacaacggaaaacagagggaatttgaatctaggctggccgatgcactacaggagctaagagcccagcacgaggaccaagtcgagcaatataagaaggagttggaaaaaacctacagtgcgaagctagacaacgccagacagtctgccgagcgtaattccaacctcgttggcgctgctcatgaggaactccaacaaagtaggatccgcattgattctctatctgcccaactcagtcagctgcagaaacagttagctgcgaaagaggccaagctccgcgacctcgaagactcactcgctcgggagcgggatacctcaagaagactgctggcagaaaaggagcgcgagatggccgaaatgcgcgctaggatgcagcaacaactggatgaatatcaggagttgctggatatcaagctagctctcgatatggagatacacgcttatcgtaagctgttggagggcgaggaggaaagacttcgattgagcccatcccccacgtcacagcgttccaggggtagagcaagctcccactcctctcaaactcagggaggcggtagcgtgaccaagaaacgcaagctggaaagcactgaatccagatcaagctttagccagcacgccaggacctcgggacgggtcgcggttgaggaagtcgacgaagaaggcaagttcgtaagactgcgcaataaatcgaacgaagatcagtccatgggaaactggcagattaaacgacagaacggagacgatcctctgctaacctatcggtttccacctaagttcaccctcaaggcaggacaagtggtcactatatgggcggcaggcgctggcgctacccactcaccccctacggacttggtgtggaaggcccagaatacatgggggtgcggcaattcccttcgcaccgctctcattaactccactggagaggaggtggctatgaggaagctcgtcagaagtgtgacagtggtggaggatgacgaagatgaagacggcgacgacctgctgcaccatcatcacggatctcactgcagctcatctggggatcctgcggaatacaatctgagatctcgaacagtcctatgcgggacttgcggacagccagccgataaggctagcgcatcaggctctggggctcaatcacctcaaaactgtagcatcatgtag

SEQ ID NO: 101950 - DNA, 1845 bp, Artificial Sequence
  derived and/or modified sequence
atggagacccccagccagagaagagccaccagaagcggcgcccaggccagcagcacccccctgagccccaccagaatcaccagactgcaggagaaggaggacctgcaggagctgaacgacagactggccgtgtacatcgacagagtgagaagcctggagaccgagaacgccggcctgagactgagaatcaccgagagcgaggaggtggtgagcagagaggtgagcggcatcaaggccgcctacgaggccgagctgggcgacgccagaaagaccctggacagcgtggccaaggagagagccagactgcagctggagctgagcaaggtgagagaggagttcaaggagctgaaggccagaaacaccaagaaggagggcgacctgatcgccgcccaggccagactgaaggacctggaggccctgctgaacagcaaggaggccgccctgagcaccgccctgagcgagaagagaaccctggagggcgagctgcacgacctgagaggccaggtggccaagctggaggccgccctgggcgaggccaagaagcagctgcaggacgagatgctgagaagagtggacgccgagaacagactgcagaccatgaaggaggagctggacttccagaagaacatctacagcgaggagctgagagagaccaagagaagacacgagaccagactggtggagatcgacaacggcaagcagagagagttcgagagcagactggccgacgccctgcaggagctgagagcccagcacgaggaccaggtggagcagtacaagaaggagctggagaagacctacagcgccaagctggacaacgccagacagagcgccgagagaaacagcaacctggtgggcgccgcccacgaggagctgcagcagagcagaatcagaatcgacagcctgagcgcccagctgagccagctgcagaagcagctggccgccaaggaggccaagctgagagacctggaggacagcctggccagagagagagacaccagcagaagactgctggccgagaaggagagagagatggccgagatgagagccagaatgcagcagcagctggacgagtaccaggagctgctggacatcaagctggccctggacatggagatccacgcctacagaaagctgctggagggcgaggaggagagactgagactgagccccagccccaccagccagagaagcagaggcagagccagcagccacagcagccagacccagggcggcggcagcgtgaccaagaagagaaagctggagagcaccgagagcagaagcagcttcagccagcacgccagaaccagcggcagagtggccgtggaggaggtggacgaggagggcaagttcgtgagactgagaaacaagagcaacgaggaccagagcatgggcaactggcagatcaagagacagaacggcgacgaccccctgctgacctacagattcccccccaagttcaccctgaaggccggccaggtggtgaccatctgggccgccggcgccggcgccacccacagcccccccaccgacctggtgtggaaggcccagaacacctggggctgcggcaacagcctgagaaccgccctgatcaacagcaccggcgaggaggtggccatgagaaagctggtgagaagcgtgaccgtggtggaggacgacgaggacgaggacggcgacgacctgctgcaccaccaccacggcagccactgcagcagcagcggcgaccccgccgagtacaacctgagaagcagaaccgtgctgtgcggcacctgcggccagcccgccgacaaggccagcgccagcggcagcggcgcccagagcccccagaactgcagcatcatgtag

SEQ ID NO: 101951 - DNA, 2667 bp, Artificial Sequence
  derived and/or modified sequence
atggtgagcaagggcgccgagctgttcaccggcatcgtgcccatcctgatcgagctgaatggcgatgtgaatggccacaagttcagcgtgagcggcgagggcgagggcgatgccacctacggcaagctgaccctgaagttcatctgcaccaccggcaagctgcctgtgccctggcccaccctggtgaccaccctgagctacggcgtgcagtgcttctcacgctaccccgatcacatgaagcagcacgacttcttcaagagcgccatgcctgagggctacatccaggagcgcaccatcttcttcgaggatgacggcaactacaagtcgcgcgccgaggtgaagttcgagggcgataccctggtgaatcgcatcgagctgaccggcaccgatttcaaggaggatggcaacatcctgggcaataagatggagtacaactacaacgcccacaatgtgtacatcatgaccgacaaggccaagaatggcatcaaggtgaacttcaagatccgccacaacatcgaggatggcagcgtgcagctggccgaccactaccagcagaatacccccatcggcgatggccctgtgctgctgcccgataaccactacctgtccacccagagcgccctgtccaaggaccccaacgagaagcgcgatcacatgatctacttcggcttcgtgaccgccgccgccatcacccacggcatggatgagctgtacaagtccggacttaaggcctctgtcgacagcagtctctgtccttcgacccgagccccgcgccctttccgggacccctgccccgcgggcagcgctgccaacctgccggccatggagaccccgtcccagcggcgcgccacccgcagcggggcgcaggccagctccactccgctgtcgcccacccgcatcacccggctgcaggagaaggaggacctgcaggagctcaatgatcgcttggcggtctacatcgaccgtgtgcgctcgctggaaacggagaacgcagggctgcgccttcgcatcaccgagtctgaagaggtggtcagccgcgaggtgtccggcatcaaggccgcctacgaggccgagctcggggatgcccgcaagacccttgactcagtagccaaggagcgcgcccgcctgcagctggagctgagcaaagtgcgtgaggagtttaaggagctgaaagcgcgcaataccaagaaggagggtgacctgatagctgctcaggctcggctgaaggacctggaggctctgctgaactccaaggaggccgcactgagcactgctctcagtgagaagcgcacgctggagggcgagctgcatgatctgcggggccaggtggccaagcttgaggcagccctaggtgaggccaagaagcaacttcaggatgagatgctgcggcgggtggatgctgagaacaggctgcagaccatgaaggaggaactggacttccagaagaacatctacagtgaggagctgcgtgagaccaagcgccgtcatgagacccgactggtggagattgacaatgggaagcagcgtgagtttgagagccggctggcggatgcgctgcaggaactgcgggcccagcatgaggaccaggtggagcagtataagaaggagctggagaagacttattctgccaagctggacaatgccaggcagtctgctgagaggaacagcaacctggtgggggctgcccacgaggagctgcagcagtcgcgcatccgcatcgacagcctctctgcccagctcagccagctccagaagcagctggcagccaaggaggcgaagcttcgagacctggaggactcactggcccgtgagcgggacaccagccggcggctgctggcggaaaaggagcgggagatggccgagatgcgggcaaggatgcagcagcagctggacgagtaccaggagcttctggacatcaagctggccctggacatggagatccacgcctaccgcaagctcttggagggcgaggaggagaggctacgcctgtcccccagccctacctcgcagcgcagccgtggccgtgcttcctctcactcatcccagacacagggtgggggcagcgtcaccaaaaagcgcaaactggagtccactgagagccgcagcagcttctcacagcacgcacgcactagcgggcgcgtggccgtggaggaggtggatgaggagggcaagtttgtccggctgcgcaacaagtccaatgaggaccagtccatgggcaattggcagatcaagcgccagaatggagatgatcccttgctgacttaccggttcccaccaaagttcaccctgaaggctgggcaggtggtgacgatctgggctgcaggagctggggccacccacagcccccctaccgacctggtgtggaaggcacagaacacctggggctgcgggaacagcctgcgtacggctctcatcaactccactggggaagaagtggccatgcgcaagctggtgcgctcagtgactgtggttgaggacgacgaggatgaggatggagatgacctgctccatcaccaccatggctcccactgcagcagctcgggggaccccgctgagtacaacctgcgctcgcgcaccgtgctgtgcgggacctgcgggcagcctgccgacaaggcatctgccagcggctcaggagcccagagcccccagaactgcagcatcatgtaa

SEQ ID NO: 101952 - DNA, 2858 bp, Artificial Sequence
  derived and/or modified sequence
aagcttttggaccctcgtacagaagctaatacgactcactatagggaaataagagagaaaagaagagtaagaagaaatataagagccaccatggtgagcaagggcgccgagctgttcaccggcatcgtgcccatcctgatcgagctgaatggcgatgtgaatggccacaagttcagcgtgagcggcgagggcgagggcgatgccacctacggcaagctgaccctgaagttcatctgcaccaccggcaagctgcctgtgccctggcccaccctggtgaccaccctgagctacggcgtgcagtgcttctcacgctaccccgatcacatgaagcagcacgacttcttcaagagcgccatgcctgagggctacatccaggagcgcaccatcttcttcgaggatgacggcaactacaagtcgcgcgccgaggtgaagttcgagggcgataccctggtgaatcgcatcgagctgaccggcaccgatttcaaggaggatggcaacatcctgggcaataagatggagtacaactacaacgcccacaatgtgtacatcatgaccgacaaggccaagaatggcatcaaggtgaacttcaagatccgccacaacatcgaggatggcagcgtgcagctggccgaccactaccagcagaatacccccatcggcgatggccctgtgctgctgcccgataaccactacctgtccacccagagcgccctgtccaaggaccccaacgagaagcgcgatcacatgatctacttcggcttcgtgaccgccgccgccatcacccacggcatggatgagctgtacaagtccggacttaaggcctctgtcgacagcagtctctgtccttcgacccgagccccgcgccctttccgggacccctgccccgcgggcagcgctgccaacctgccggccatggagaccccgtcccagcggcgcgccacccgcagcggggcgcaggccagctccactccgctgtcgcccacccgcatcacccggctgcaggagaaggaggacctgcaggagctcaatgatcgcttggcggtctacatcgaccgtgtgcgctcgctggaaacggagaacgcagggctgcgccttcgcatcaccgagtctgaagaggtggtcagccgcgaggtgtccggcatcaaggccgcctacgaggccgagctcggggatgcccgcaagacccttgactcagtagccaaggagcgcgcccgcctgcagctggagctgagcaaagtgcgtgaggagtttaaggagctgaaagcgcgcaataccaagaaggagggtgacctgatagctgctcaggctcggctgaaggacctggaggctctgctgaactccaaggaggccgcactgagcactgctctcagtgagaagcgcacgctggagggcgagctgcatgatctgcggggccaggtggccaagcttgaggcagccctaggtgaggccaagaagcaacttcaggatgagatgctgcggcgggtggatgctgagaacaggctgcagaccatgaaggaggaactggacttccagaagaacatctacagtgaggagctgcgtgagaccaagcgccgtcatgagacccgactggtggagattgacaatgggaagcagcgtgagtttgagagccggctggcggatgcgctgcaggaactgcgggcccagcatgaggaccaggtggagcagtataagaaggagctggagaagacttattctgccaagctggacaatgccaggcagtctgctgagaggaacagcaacctggtgggggctgcccacgaggagctgcagcagtcgcgcatccgcatcgacagcctctctgcccagctcagccagctccagaagcagctggcagccaaggaggcgaagcttcgagacctggaggactcactggcccgtgagcgggacaccagccggcggctgctggcggaaaaggagcgggagatggccgagatgcgggcaaggatgcagcagcagctggacgagtaccaggagcttctggacatcaagctggccctggacatggagatccacgcctaccgcaagctcttggagggcgaggaggagaggctacgcctgtcccccagccctacctcgcagcgcagccgtggccgtgcttcctctcactcatcccagacacagggtgggggcagcgtcaccaaaaagcgcaaactggagtccactgagagccgcagcagcttctcacagcacgcacgcactagcgggcgcgtggccgtggaggaggtggatgaggagggcaagtttgtccggctgcgcaacaagtccaatgaggaccagtccatgggcaattggcagatcaagcgccagaatggagatgatcccttgctgacttaccggttcccaccaaagttcaccctgaaggctgggcaggtggtgacgatctgggctgcaggagctggggccacccacagcccccctaccgacctggtgtggaaggcacagaacacctggggctgcgggaacagcctgcgtacggctctcatcaactccactggggaagaagtggccatgcgcaagctggtgcgctcagtgactgtggttgaggacgacgaggatgaggatggagatgacctgctccatcaccaccatggctcccactgcagcagctcgggggaccccgctgagtacaacctgcgctcgcgcaccgtgctgtgcgggacctgcgggcagcctgccgacaaggcatctgccagcggctcaggagcccagagcccccagaactgcagcatcatgtaagctgccttctgcggggcttgccttctggccatgcccttcttctctcccttgcacctgtacctcttggtctttgaataaagcctgagtaggaaggcggccgc

SEQ ID NO: 101953 - protein, 614 aa, Artificial Sequence
  derived and/or modified sequence
MRPVINRCAPGSLDLMLPQAASEGIVFHSLQISLCFRSWLPAMLAVLLSLAPSASSDISASRPNILLLMADDLGIGDIGCYGNNTMRTPNIDRLAEDGVKLTQHISAASLCTPSRAAFLTGRYPVRSGMVSSIGYRVLQWTGASGGLPTNETTFAKILKEKGYATGLIGKWHLGLNCESASDHCHHPLHHGFDHFYGMPFSLMGDCARWELSEKRVNLEQKLNFLFQVLALVALTLVAGKLTHLIPVSWMPVIWSALSAVLLLASSYFVGALIVHADCFLMRNHTITEQPMCFQRTTPLILQEVASFLKRNKHGPFLLFVSFLHVHIPLITMENFLGKSLHGLYGDNVEEMDWMVGRILDTLDVEGLSNSTLIYFTSDHGGSLENQLGNTQYGGWNGIYKGGKGMGGWEGGIRVPGIFRWPGVLPAGRVIGEPTSLMDVFPTVVRLAGGEVPQDRVIDGQDLLPLLLGTAQHSDHEFLMHYCERFLHAARWHQRDRGTMWKVHFVTPVFQPEGAGACYGRKVCPCFGEKVVHHDPPLLFDLSRDPSETHILTPASEPVFYQVMERVQQAVWEHQRTLSPVPLQLDRLGNIWRPWLQPCCGPFPLCWCLREDDPQ

SEQ ID NO: 101954 - DNA, 1845 bp, Artificial Sequence
  derived and/or modified sequence
atgcggcctgttattaataggtgcgcccccggctccctggacttaatgctgccgcaagctgcgtcagaggggatcgtgttccactcactgcagatctccctgtgcttccggtcatggctgccagcaatgctcgctgtgctgctcagcctggccccatccgccagctctgacattagcgccagccgtccaaacattctcctgctgatggcagatgacctcggtattggcgatataggctgctacggcaacaataccatgaggacacccaatatcgataggttggctgaggatggtgtgaagttgacacagcacatcagcgcagcgtctctttgcaccccttccagggctgctttcctgaccggaaggtatccagtgcgctccggaatggtgtcatcaattggttatagagtcttgcagtggactggtgcgtcagggggcctgcccacaaacgaaaccacatttgctaaaatcctcaaagaaaaaggttacgcgaccggactgatcggcaagtggcacttagggttgaattgtgaaagcgcttccgaccattgtcaccatcccctacaccacggcttcgatcacttctatggtatgccattcagtttaatgggcgactgtgctcgatgggagctttccgaaaaacgagtgaacttggagcagaagcttaacttcctttttcaagtcctggcactagtggccctgaccctggtcgccggaaagctgactcacctgatcccagtatcatggatgccagttatctggtccgcactttccgccgtgctgctgctggccagtagctactttgtgggggctctgatcgttcacgctgactgtttccttatgcggaatcatacaatcaccgagcagcctatgtgtttccagcggaccacacccttgatcctacaagaggttgcatctttcttaaaacggaacaagcacggaccatttctactgtttgtgagctttctgcatgtacacattcctctgatcacaatggaaaattttcttgggaagagtctccacggactttatggggataatgtggaagagatggattggatggtcggacggatcctggacacgctggacgtggagggcctgtcaaactcaacactgatttactttacaagcgatcacggtgggtcacttgagaaccagctcggcaatacacagtacggtggctggaacggcatctataagggagggaaaggtatgggcggttgggagggcggcatcagagttcctgggatctttcgatggcctggggtactgcccgcgggacgggttatcggcgagcctaccagcctcatggatgtgttccctaccgtggtgcgacttgctggaggtgaggtgccccaggatcgggtgatcgacggccaggatttgctacctctcttattaggtactgctcagcatagtgaccatgagtttctgatgcactactgtgaacgctttttacacgccgctaggtggcaccagcgtgaccggggcacgatgtggaaggtgcacttcgtaacaccagttttccagccggagggagcaggggcttgttacggacgcaaagtgtgtccctgcttcggggagaaggtggttcatcatgatcccccgctccttttcgacttaagccgcgatccttcagaaacacatatactgacacccgcatctgaaccggtcttttatcaggtcatggagcgcgtccagcaggcagtgtgggagcatcagcgtacactgtctcctgtacctctgcagctcgatcggcttgggaacatttggcgaccgtggttgcaaccatgttgtgggccttttcctctttgctggtgtctgagagaggatgaccctcagtag

SEQ ID NO: 101955 - DNA, 1845 bp, Artificial Sequence
  derived and/or modified sequence
atgaggcctgtgatcaacagatgtgcccctggcagcctggacctgatgctgccccaggccgccagcgagggcatcgtgttccacagcctgcagatcagcctgtgcttccgctcctggctgcctgccatgctggccgtgctgctgagcctggcccccagcgccagcagtgacatcagcgccagccggcccaacatcctgctgctgatggctgatgacctgggcattggagacatcggctgctacggcaacaacaccatgaggacccccaacatcgaccggctggccgaggatggagtgaagctgacccagcacatctctgctgccagcctgtgcacccccagccgggccgccttcctgaccggccgctaccctgtgcgcagcggcatggtgagcagcatcggctacagagtgctgcagtggacaggagccagcggcggcctgcccaccaatgagaccacctttgccaagatcctgaaggagaagggctacgccaccggcctcatcggcaagtggcacctgggcctgaactgtgagagcgccagtgaccactgccaccaccccctgcaccacggctttgaccacttctacggcatgcccttcagcctgatgggagactgtgcccgctgggagctgtctgagaagagggtgaacctggagcagaagctgaacttcctgttccaggtgctggccctggtggccctgaccctggtggccggcaagctgacccacctgatccctgtgtcctggatgcctgtgatctggagcgccctgtctgctgtgctgctgctggccagcagctactttgtgggcgccctgattgtgcacgccgactgcttcctgatgaggaaccacaccatcacagagcagcccatgtgcttccagaggaccacccccctcatcctgcaggaggtggccagcttcctgaagaggaacaagcacggccccttcctgctgtttgtgtccttcctgcacgtgcacatccccctcatcaccatggagaacttcctgggcaagagcctgcacggcctgtatggagacaacgtggaggagatggactggatggtgggccgcatcctggacaccctggatgtggagggcctgagcaacagcaccctcatctacttcaccagtgaccatggaggcagcctggagaaccagctgggcaacacccagtatggaggctggaatggcatctacaagggcggcaagggcatgggcggctgggagggcggcatccgggtgcccggcatcttccgctggccaggagtgctgcctgctggccgggtcatcggggagcccaccagcctgatggatgtgttccccaccgtggtgcggctggccggcggggaggtgccccaggacagagtgattgatggccaggacctgctgcccctgctgctgggcacagcccagcacagcgaccacgagttcctgatgcactactgtgagcgcttcctgcacgccgcccgctggcaccagagggaccggggcaccatgtggaaggtgcactttgtgacccctgtgttccagcctgagggcgctggggcctgctacggcaggaaggtgtgcccctgcttcggggagaaggtggtgcaccacgacccccccctgctgtttgacctgagccgggaccccagcgagacccacatcctgaccccagccagcgagcctgtgttctaccaggtgatggagcgggtgcagcaggccgtgtgggagcaccagaggaccctgagccctgtgcccctgcagctggaccggctgggcaacatctggaggccctggctgcagccctgctgcggccccttccccctgtgctggtgcctgcgggaggatgacccccagtag

SEQ ID NO: 101956 - DNA, 1845 bp, Artificial Sequence
  derived and/or modified sequence
atgcggcccgtgatcaaccggtgcgcccccggcagcctggacctgatgttaccccaggccgcatctgagggcattgtttttcattcactgcagatcagcttgtgtttcaggagctggctgcctgccatgctcgctgtgctactgtctctcgccccctctgcttcaagtgatatttctgcctcccggccaaacatcctgctgctgatggcagatgacctagggattggagatataggttgctacggaaataatacaatgcgcactccgaatatagaccgactcgcagaggatggcgtgaagttgacccagcatattagcgctgcgagcctctgtacaccaagcagagcagcctttttgacaggccggtaccccgtgcgctccggtatggtgtcctccattggctaccgagtcctgcaatggactggtgcgtcaggaggactccccaccaacgagacaactttcgccaagatcttgaaagagaaaggttacgccaccgggctcattgggaagtggcacctcggattaaattgtgagagtgctagcgaccactgtcatcaccccctgcaccacggcttcgatcatttttacggtatgcctttttctctcatgggcgactgtgcacgctgggaactttcagagaagcgggtaaatctcgagcagaagttaaatttccttttccaggttctcgccctggtcgctctcaccctggtggccggtaaacttactcatctcatccctgtgagttggatgccagtgatttggagcgcactgagcgctgtgttactcttagcctcttcctacttcgtaggcgctttgatagtccacgccgactgtttcctgatgcgaaatcatactatcacggaacagccgatgtgctttcaacgcaccacccctctgatacttcaggaagtggcatcctttctgaaaagaaacaagcatggacccttccttttattcgtgtccttccttcacgtccacattcccctgattacaatggagaatttcctcggcaagagtcttcatggcctatatggggataatgtagaggaaatggattggatggtaggccgcattctggataccttggacgtggaaggactttccaactcaacactgatttacttcacgtccgaccacgggggtagcctggagaaccagctcggtaacactcaatatggtggatggaacggcatttacaaaggaggaaagggaatgggcggttgggagggcggcattcgggtccctggcatctttcgttggccaggtgttctgcccgccggccgggtcattggtgaaccgacctccttaatggacgtattccccactgtggttcggctggccggcggtgaagtgccgcaggatagagttatcgacgggcaagatcttctgccactcctgctagggactgctcagcacagtgatcatgaatttctgatgcattattgcgagcgcttcttacatgctgctaggtggcaccagagagacagaggaacaatgtggaaagtgcactttgttactcctgtcttccaaccagagggagccggcgcctgttacggccgcaaggtgtgtccctgttttggcgagaaagtggtgcaccacgatccacccctgttgtttgacctcagccgggatccgtcggagacccacatcctgacccctgcctccgagccagttttttatcaagtcatggagcgggtgcaacaagccgtgtgggaacaccagagaacactgagtccagtcccattgcagctggaccggctgggaaacatctggcgcccatggttgcagccttgctgtggtcccttccctttgtgttggtgcctccgagaagacgacccccagtag

SEQ ID NO: 101957 - DNA, 1845 bp, Artificial Sequence
  derived and/or modified sequence
atgcggcctgttataaatagatgtgcccctggtagcctagacctaatgcttccacaggcagctagcgagggtatcgtctttcacagtctgcagatttccctgtgctttcgctcatggctcccagctatgctggccgtgctcttgtccttggcccctagcgccagctccgatatcagtgcttcgaggcctaacattcttctgcttatggcagacgatttagggatcggtgacatcggttgctacggcaacaacacaatgcgtacacctaatattgacagactcgccgaagacggcgtaaaacttacacagcatatcagcgctgcctctctatgcacgccatccagggcagcctttctaactgggagataccccgtccgctctggaatggtctcctcaattggctatcgtgtacttcagtggactggcgctagtgggggactcccaacgaacgagacaactttcgctaagatcctcaaggagaagggatatgctaccggcctgataggcaagtggcacctcgggctcaactgtgagagtgcctccgatcactgtcaccaccctctccatcatgggtttgaccacttctatgggatgcccttctctctgatgggagactgtgcacgatgggagttatcggagaaacgcgtgaatctggaacagaagctgaacttcctttttcaggtgcttgcactggtggcactcactcttgttgcgggaaagctgactcacctgatccccgtgtcatggatgcccgtgatctggtcagcgttgagcgccgtcctgctgctcgcttcatcgtattttgtcggcgctctgatcgtccatgcggactgttttttaatgaggaaccatactatcactgagcagccaatgtgcttccagagaactaccccattgatcttgcaggaggtggcgtcttttctcaagaggaataagcatggacccttcctgttattcgtgagcttccttcatgtgcacataccactgattactatggagaattttttgggcaaaagtctgcacggtctgtatggcgataacgtggaagagatggattggatggtaggtcgaattttggacacactagatgttgagggcctgagcaattccaccctcatctacttcacaagcgatcatggcggaagcctggagaaccagttaggcaacactcagtacgggggttggaacggaatctataaaggaggaaagggcatgggcggatgggagggcggaattcgagttcccggaatctttcgctggcctggagtgctgccggctgggagggtcatcggggaacccacctcgctgatggatgtttttcctactgtggtccgactcgccggaggcgaagtcccacaggacagagtcatcgacggccaggacctactgccccttttactcggcacggcccaacattctgaccatgagttcctgatgcattattgtgaaaggttcctccacgctgccaggtggcaccagcgagataggggcaccatgtggaaggtgcattttgtgacgccagtgtttcaacctgagggagcgggagcgtgttacggcagaaaggtgtgcccctgctttggggagaaggtagtgcaccacgatcccccattgctcttcgacctgtcccgcgacccctcagagacccacatcctgactccagcttccgaaccagttttttaccaggttatggaacgcgttcagcaggcggtctgggagcaccagcgtacactcagccctgtgcctctgcaacttgatagactcggaaacatctggcggccttggctgcagccatgctgtgggcctttccctctttgctggtgcctgagagaggatgatccgcaatag

SEQ ID NO: 101958 - DNA, 2158 bp, Artificial Sequence
  derived and/or modified sequence
cctttgggagagaaccttcctcttcttgatcggggattcaggaaggagcccaggagcagaggaagtagagagagagacaacatgttacatctgcaccattcttgagacagggtctcaccatgttgctcaagctggtcttaaacacctgggctcaggcaatgctcccaccttggcctcccaacgtgctcagataatgggcatgagccaccacgcctgaccgcttctggatctcttgatggtgctttctcagaatgcactgatagtgatttatcctgcatctggagaatgaagcatgagacccgtgattaatagatgtgctccaggctcccttgatttgatgttgccccaggcagcctcagaaggaattgtatttcattctctgcaaatcagtttgtgtttcaggagctggctgccagcgatgctcgctgtactgctaagtttggcaccatcagcttccagcgacatttccgcctcccgaccgaacatccttcttctgatggcggacgaccttggcattggggacattggctgctatggcaacaacaccatgaggactccgaatattgaccgccttgcagaggacggcgtgaagctgacccaacacatctctgccgcatctttgtgcaccccaagcagagccgccttcctcacgggcagataccctgtgcgatcagggatggtttccagcattggttaccgtgttcttcagtggaccggagcatctggaggtcttccaacaaatgagacaacttttgcaaaaatactgaaagagaaaggctatgccactggactcattggaaaatggcatctgggtctcaactgtgagtcagccagtgatcattgccaccaccctctccatcatggctttgaccatttctacggaatgcctttctccttgatgggtgattgcgcccgctgggaactctcagagaagcgtgtcaacctggaacaaaaactcaacttcctcttccaagtcctggccttggttgccctcacactggtagcagggaagctcacacacctgatacccgtctcgtggatgccggtcatctggtcagccctttcggccgtcctcctcctcgcaagctcctattttgtgggtgctctgattgtccatgccgattgctttctgatgagaaaccacaccatcacggagcagcccatgtgcttccaaagaacgacaccccttattctgcaggaggttgcgtcctttctcaaaaggaataagcatgggcctttcctcctctttgtttcctttctacacgttcacatccctcttatcactatggagaacttcctcgggaagagtctccacgggctgtatggggacaacgtagaggagatggactggatggtaggacggatccttgacactttggacgtggagggtttgagcaacagcaccctcatttattttacgtcggatcacggcggttccctagagaatcaacttggaaacacccagtatggtggctggaatggaatttataaaggtgggaagggcatgggaggatgggaaggtgggatccgcgtgcccgggatcttccgctggcccggggtgctcccggccggccgagtgattggcgagcccacgagtctgatggacgtgttccccaccgtggtccggctggcgggcggcgaggtgccccaggacagagtgattgacggccaagaccttctgcccttgctcctggggacagcccaacactcagaccacgagttcctgatgcattattgtgagaggtttctgcacgcagccaggtggcatcaacgggacagaggaacaatgtggaaagtccactttgtgacgcctgtgttccagccagagggagccggtgcctgctatggaagaaaggtctgcccgtgctttggggaaaaagtagtccaccacgatccacctttgctctttgacctctcaagagacccttctgagacccacatcctcacaccagcctcagagcccgtgttctatcaggtgatggaacgagtccagcaggcggtgtgggaacaccagcggacactcagcccagttcctctgcagctggacaggctgggcaacatctggagaccgtggctgcagccctgctgtggcccgttccccctctgctggtgccttagggaagatgacccacaataaatgtctgcagtgaaaagctgg

SEQ ID NO: 101959 - DNA, 1845 bp, Artificial Sequence
  derived and/or modified sequence
atgagacccgtgatcaacagatgcgcccccggcagcctggacctgatgctgccccaggccgccagcgagggcatcgtgttccacagcctgcagatcagcctgtgcttcagaagctggctgcccgccatgctggccgtgctgctgagcctggcccccagcgccagcagcgacatcagcgccagcagacccaacatcctgctgctgatggccgacgacctgggcatcggcgacatcggctgctacggcaacaacaccatgagaacccccaacatcgacagactggccgaggacggcgtgaagctgacccagcacatcagcgccgccagcctgtgcacccccagcagagccgccttcctgaccggcagataccccgtgagaagcggcatggtgagcagcatcggctacagagtgctgcagtggaccggcgccagcggcggcctgcccaccaacgagaccaccttcgccaagatcctgaaggagaagggctacgccaccggcctgatcggcaagtggcacctgggcctgaactgcgagagcgccagcgaccactgccaccaccccctgcaccacggcttcgaccacttctacggcatgcccttcagcctgatgggcgactgcgccagatgggagctgagcgagaagagagtgaacctggagcagaagctgaacttcctgttccaggtgctggccctggtggccctgaccctggtggccggcaagctgacccacctgatccccgtgagctggatgcccgtgatctggagcgccctgagcgccgtgctgctgctggccagcagctacttcgtgggcgccctgatcgtgcacgccgactgcttcctgatgagaaaccacaccatcaccgagcagcccatgtgcttccagagaaccacccccctgatcctgcaggaggtggccagcttcctgaagagaaacaagcacggccccttcctgctgttcgtgagcttcctgcacgtgcacatccccctgatcaccatggagaacttcctgggcaagagcctgcacggcctgtacggcgacaacgtggaggagatggactggatggtgggcagaatcctggacaccctggacgtggagggcctgagcaacagcaccctgatctacttcaccagcgaccacggcggcagcctggagaaccagctgggcaacacccagtacggcggctggaacggcatctacaagggcggcaagggcatgggcggctgggagggcggcatcagagtgcccggcatcttcagatggcccggcgtgctgcccgccggcagagtgatcggcgagcccaccagcctgatggacgtgttccccaccgtggtgagactggccggcggcgaggtgccccaggacagagtgatcgacggccaggacctgctgcccctgctgctgggcaccgcccagcacagcgaccacgagttcctgatgcactactgcgagagattcctgcacgccgccagatggcaccagagagacagaggcaccatgtggaaggtgcacttcgtgacccccgtgttccagcccgagggcgccggcgcctgctacggcagaaaggtgtgcccctgcttcggcgagaaggtggtgcaccacgacccccccctgctgttcgacctgagcagagaccccagcgagacccacatcctgacccccgccagcgagcccgtgttctaccaggtgatggagagagtgcagcaggccgtgtgggagcaccagagaaccctgagccccgtgcccctgcagctggacagactgggcaacatctggagaccctggctgcagccctgctgcggccccttccccctgtgctggtgcctgagagaggacgacccccagtag

SEQ ID NO: 101960 - protein, 294 aa, Artificial Sequence
  derived and/or modified sequence
MHRRRLALGLGFCLLAGTSLSVLWVYLENWLPVSYVPYYLPCPEIFNMKLHYKREKPLQPVVWSQYPQPKLLEHRPTQLLTLTPWLAPIVSEGTFNPELLQHIYQPLNLTIGVTVFAVGNPSWSQPRSSSCVGTGCTTTSSLTTLQPFPGSRWVPTGFSAPSPSRVTPTGRRHPCAGWRPSASTLLRGLTGRWTTSSALMWTWCFGTRGALRPWETWWLPFTQATTPFPASSSPMSAGVFPLPLWQTAKGTSIMVGQSSGGRWPGYMSLLGAATWPSWRTRPMASWLPGGRKAT

SEQ ID NO: 101961 - DNA, 483 bp, Artificial Sequence
  derived and/or modified sequence
atgcaccggcgcaggctcgcactgggattagggttctgtttgttggcaggcacgtccctgtccgtgctgtgggtatatctcgagaactggctccccgtgagctacgtcccgtactatctcccgtgcccagaaattctgcccatgatgatggctctaagctgtctgtgccaccagcagcatgaagcggccttgcaggaaggcgaggcaacacccgcacgtggtatggtgacagtcccctctgcacaggccgcaggcgctcaggcccatacggccgcggacactcacacactcgtcggggctcacaggctgagaggtaacttacagcctagagcctctgcagcgcacttgccggcaactgaaccagatcactggggccatggggtctgccgaggggaggtgcattcctttcatccagtcctgcccggcgtctcccggggcgtgcttcatgcttgggtgcccggtgcactcctgcatttgcactag

SEQ ID NO: 101962 - DNA, 885 bp, Artificial Sequence
  derived and/or modified sequence
atgcacagaagacgactagctttagggctgggattctgcctgcttgctgggacatccctctcagtgctctgggtgtacttagagaattggctgcctgtgtcttatgtgccatattatttaccctgtcctgagattttcaacatgaaactgcactacaaacgcgaaaagcccctacagccagttgtttggtcccagtatccgcagccaaaacttctggaacataggcccacccagctcctgaccctgactccctggcttgcaccaatagtcagcgagggcactttcaatcctgaacttttgcagcatatctatcaacccctgaaccttaccatcggcgtgactgtttttgccgtcggtaacccctcttggtcgcagcccagatcatcctcctgcgtgggaactggctgtacgactacatcctccctaacgacgttacaaccatttcctgggtccaggtgggttcccacggggttctccgccccatccccttctagggttacacctacggggcgccgacacccatgtgctggttggagaccttccgcttccacattgctcagggggttgacaggacggtggacaactagtagtgccctcatgtggacatggtgcttcgggactcgaggagcattgcggccctgggaaacttggtggctcccctttacccaggcaacgacaccttttcccgcttcatcctcaccaatgtcggcaggtgtctttccactaccgctgtggcagacagccaaaggaactagcataatggtgggtcagagctctggaggtaggtggccagggtacatgtcgctgctgggggcagcaacgtggcctagctggaggactcgtcctatggcctcgtggctacccggagggaggaaagcaacctag

SEQ ID NO: 101963 - DNA, 483 bp, Artificial Sequence
  derived and/or modified sequence
atgcacagaagaaggctggccctgggcctgggcttctgcctgctggccggcaccagcctgtctgtgctgtgggtgtacctggagaactggctgcctgtgtcctatgtgccctactacctgccctgcccagagatcctgcccatgatgatggccctgagctgcctgtgccaccagcagcacgaggccgccctgcaggagggggaggccaccccagcccggggcatggtgacagtgcccagcgcccaggccgccggggcccaggcccacacagctgctgacacccacaccctggtgggcgcccaccggctgcggggcaacctgcagccccgggccagcgctgcccacctgcctgccacagagccagaccactggggccacggcgtgtgccgcggggaggtgcacagcttccaccctgtgctgcccggggtgtcccggggcgtgctgcacgcctgggtgcctggggccctgctgcacctgcactag

SEQ ID NO: 101964 - DNA, 885 bp, Artificial Sequence
  derived and/or modified sequence
atgcacagaagaaggctggccctgggcctgggcttctgcctgctggccggcaccagcctgtctgtgctgtgggtgtacctggagaactggctgcctgtgtcctatgtgccctactacctgccctgcccagagatcttcaacatgaagctgcactacaagcgggagaagcccctgcagcctgtggtgtggagccagtacccccagcccaagctgctggagcaccggcccacccagctgctgaccctgaccccctggctggcccccatcgtgtctgagggcaccttcaaccctgagctgctgcagcacatctaccagcccctgaacctgaccatcggcgtgacagtgtttgctgtgggcaaccccagctggagccagcccaggagcagcagctgtgtgggcaccggctgcaccaccaccagcagcctgaccaccctgcagcccttccctggcagccgctgggtgcccaccggcttcagcgcccccagccccagccgggtgacccccactggaagaagacacccctgtgccggctggaggccttctgccagcaccctgctgcggggcctgaccggccgctggaccaccagcagcgccctgatgtggacctggtgcttcggcaccaggggggccctgcggccctgggagacctggtggctgcccttcacccaggccaccacccccttccctgccagcagcagccccatgtctgctggggtcttccccctgcccctgtggcagacagccaagggcaccagcatcatggtgggccagagcagcggcggccgctggccaggctacatgagcctgctgggcgccgccacctggcccagctggaggacccggcccatggcctcctggctgcccggcggcaggaaggccacctag

SEQ ID NO: 101965 - DNA, 483 bp, Artificial Sequence
  derived and/or modified sequence
atgcaccggcggcggctggccctgggcctgggcttctgcctgctggcaggtactagtttgagcgtgctgtgggtgtatttagagaactggctgccggtgtcctatgtcccctattatctaccttgccccgagatcttgcctatgatgatggccctctcctgcttatgtcatcagcagcacgaagccgctctgcaggagggcgaagcgacccccgcaagaggaatggtgacagtcccatccgcgcaggctgccggcgcccaagcccataccgctgccgacactcatacactagtcggcgcacacaggctgaggggcaatctacagccacgagcttctgccgctcacctccctgccacagagcccgaccattgggggcacggggtgtgcagaggcgaagttcacagcttccacccagtgttgccaggggtaagtaggggtgtactgcacgcttgggttcccggagcccttctgcatcttcattag

SEQ ID NO: 101966 - DNA, 885 bp, Artificial Sequence
  derived and/or modified sequence
atgcaccggcggcggctggccctgggcctgggcttctgcctgctggcggggacaagtctgtcagtgttatgggtatatctggagaactggttacccgtctcctacgtcccttactaccttccgtgtccagagatctttaacatgaagctccattataaaagagagaaacctctgcaacctgttgtatggtcccagtatcctcagcccaaactactcgagcaccgacccacacagctgctgacactgaccccttggttagctcccatcgtgtccgaaggaacgtttaatcccgagctcctgcagcacatttaccaaccacttaaccttaccataggagtcacagtgttcgctgtgggcaaccccagttggagccagccgcgttcatcttcctgtgtgggaactgggtgcaccacaacttcttccctgaccacgctgcagccctttcccggctctagatgggttcctactgggttttctgcaccctctccatctcgggtgacgccaactggaagacgtcatccatgtgccggttggcgcccaagcgcaagcaccctgctgagaggcctgactggtcgctggacaacctcaagcgccctcatgtggacctggtgtttcgggacaaggggtgctctgcggccttgggagacttggtggttaccttttacacaggcaaccacacctttccctgcctcctcttctcccatgtcagccggggtctttccactgccactgtggcagacagctaagggaacctctatcatggtgggacagtccagtggcgggcgatggcccggatacatgtcgttgctcggggccgcgacatggcccagttggcggactagaccgatggcctcctggctgcccgggggacgcaaggcaacatag

SEQ ID NO: 101967 - DNA, 483 bp, Artificial Sequence
  derived and/or modified sequence
atgcacagacgccgactggccctcggactcggcttctgtctattggctggcaccagcctgagcgtcttgtgggtatatttagagaattggctgcccgtaagctatgtgccttactacctgccttgtcccgaaatcctaccaatgatgatggcattgtcatgcctgtgccatcagcaacacgaggcagcacttcaggagggcgaagctacacctgctcgtggcatggtcacggtgcccagcgcgcaggctgccggtgcccaagcccacactgcagcagatacacacacactggtgggcgctcacagactaaggggcaatctgcagcccagagccagtgccgctcacctgccagctacagagccagaccattggggacacggggtgtgccgcggagaggttcatagtttccatcctgttttgccgggtgtgtctaggggagtcctgcatgcatgggtgcccggtgccctgctacacctgcactag

SEQ ID NO: 101968 - DNA, 885 bp, Artificial Sequence
  derived and/or modified sequence
atgcacaggcggaggctggccctcggcctgggcttctgtcttctggccggtacatccctgtctgtgctttgggtctacctggaaaactggctacccgtgtcttatgtaccttattacctgccctgtcccgaaatattcaacatgaaactccactacaaaagggagaagcccctgcagcctgtggtgtggagccagtatccccagccaaaactactggaacacaggcccacacaactgttgactctgaccccgtggcttgcacccatcgtgagcgagggcactttcaatcccgaactgctgcagcacatatatcagcctctgaacctgacgattggcgttactgtcttcgcagtgggtaatccctcgtggagccaaccacggagtagttcatgtgtggggactgggtgcactactacttcgtctctgacaaccctccaacctttccctggcagcagatgggtgccgactggctttagcgctccctcgccctctcgggtgacccctactggtagaaggcatccttgcgctgggtggagacccagtgcatcaaccctgcttagggggctcacagggaggtggaccacttcttccgctctgatgtggacctggtgcttcggcacacgtggcgcactccgcccatgggaaacctggtggctgcccttcactcaagccaccacaccttttcctgcgagcagcagtccaatgtcagccggagttttcccgcttccgctctggcagacagcaaaaggaacttctataatggtgggccagtccagcggtggaaggtggcctgggtacatgtcgctgctgggagcagcaacatggccctcttggcgaactaggcctatggcgagttggttgcccggaggtcgtaaggccacttag

SEQ ID NO: 101969 - DNA, 483 bp, Artificial Sequence
  derived and/or modified sequence
atgcacagaagaagactggccctgggcctgggcttctgcctgctggccggcaccagcctgagcgtgctgtgggtgtacctggagaactggctgcccgtgagctacgtgccctactacctgccctgccccgagatcctgcccatgatgatggccctgagctgcctgtgccaccagcagcacgaggccgccctgcaggagggcgaggccacccccgccagaggcatggtgaccgtgcccagcgcccaggccgccggcgcccaggcccacaccgccgccgacacccacaccctggtgggcgcccacagactgagaggcaacctgcagcccagagccagcgccgcccacctgcccgccaccgagcccgaccactggggccacggcgtgtgcagaggcgaggtgcacagcttccaccccgtgctgcccggcgtgagcagaggcgtgctgcacgcctgggtgcccggcgccctgctgcacctgcactag

SEQ ID NO: 101970 - DNA, 885 bp, Artificial Sequence
  derived and/or modified sequence
atgcacagaagaagactggccctgggcctgggcttctgcctgctggccggcaccagcctgagcgtgctgtgggtgtacctggagaactggctgcccgtgagctacgtgccctactacctgccctgccccgagatcttcaacatgaagctgcactacaagagagagaagcccctgcagcccgtggtgtggagccagtacccccagcccaagctgctggagcacagacccacccagctgctgaccctgaccccctggctggcccccatcgtgagcgagggcaccttcaaccccgagctgctgcagcacatctaccagcccctgaacctgaccatcggcgtgaccgtgttcgccgtgggcaaccccagctggagccagcccagaagcagcagctgcgtgggcaccggctgcaccaccaccagcagcctgaccaccctgcagcccttccccggcagcagatgggtgcccaccggcttcagcgcccccagccccagcagagtgacccccaccggcagaagacacccctgcgccggctggagacccagcgccagcaccctgctgagaggcctgaccggcagatggaccaccagcagcgccctgatgtggacctggtgcttcggcaccagaggcgccctgagaccctgggagacctggtggctgcccttcacccaggccaccacccccttccccgccagcagcagccccatgagcgccggcgtgttccccctgcccctgtggcagaccgccaagggcaccagcatcatggtgggccagagcagcggcggcagatggcccggctacatgagcctgctgggcgccgccacctggcccagctggagaaccagacccatggccagctggctgcccggcggcagaaaggccacctag

SEQ ID NO: 101971 - protein, 534 aa, Artificial Sequence
  derived and/or modified sequence
MGEGGQKEGDSQQAGALPLLCQLDTFSPKATVFGVSINPACGPKLTNSPTVIVMVGLPARGKTYISKKLTRYLNWIGVPTKVFNVGEYRREAVKQYSSYNFFRPDNEEAMKVRKQCALAALRDVKSYLAKEGGQIAVFDATNTTRERRHMILHFAKENDFKAFFIESVCDDPTVVASNIMEVKISSPDYKDCNSAEAMDDFMKRISCYEASYQPLDPDKCDRDLSLIKVIDVGRRFLVNRVQDHIQSRIVYYLMNIHVQPRTIYLCRHGENEHNLQGRIGGDSGLSSRGKKFASALSKFVEEQNLKDLRVWTSQLKSTIQTAEALRLPYEQWKALNEIDAGVCEELTYEEIRDTYPEEYALREQDKYYYRYPTGESYQDLVQRLEPVIMELERQENVLVICHQAVLRCLLAYFLDKSAEEMPYLKCPLHTVLKLTPVAYGCRVESIYLNVESVCTHRERSEDAKKGPNPLMRRNSVTPLASPEPTKKPRINSFEEHVASTSAALPSCLPPEVPTQLPGQNMKGSRSSADSSRKH

SEQ ID NO: 101972 - DNA, 1605 bp, Artificial Sequence
  derived and/or modified sequence
atgggggaaggaggacagaaagaaggggatagccagcaagccggcgctcttcccttgctctgtcagctagacacattcagtccaaaggccaccgtgttcggggtgtccattaatcccgcatgtgggccgaagctcaccaacagcccaacagttatagtgatggtgggactaccagcacgaggtaagacctacatttctaaaaagctcacgagatatctgaactggatcggggtgcctaccaaagtgttcaatgtgggggaataccgaagggaggctgtgaagcagtactcttcctataatttttttcgcccggacaacgaggaagctatgaaggtccggaaacagtgcgccctggccgccctaagggacgttaagtcctacctcgccaaggagggggggcagatcgcagtgtttgatgccaccaacacaacgagggaacgcaggcacatgatcctgcatttcgccaaggagaatgacttcaaagccttttttattgagtccgtttgcgatgatcccaccgtagttgctagcaatatcatggaagtcaaaatctcctctcccgactataaggactgtaacagcgccgaagccatggacgactttatgaaaagaatctcttgttacgaggcttcctaccaacctctggaccctgacaagtgtgatagagacctgtctcttattaaggtgatcgatgtgggcagacgatttcttgttaaccgcgtacaggaccatattcagagtcggatcgtgtactatctcatgaatatacacgtccagccccgaaccatatacctctgccgccatggcgaaaacgagcacaatctccaggggcggattggtggagactctgggctttccagcagaggcaaaaagttcgcatccgcattgtcaaaattcgtggaagagcagaacctcaaagacctccgagtatggactagccagctgaagtctactatccagactgctgaggcgctgcgactgccctacgaacaatggaaggccctgaatgaaatagacgcgggggtctgtgaggaactgacatatgaagagatccgggacacctatccggaggaatatgcactgcgtgagcaagataaatactactatcggtacccaacaggagaaagctaccaggatctagttcaacggttggagcctgtcattatggagctggagcgtcaggaaaacgtgttggtgatctgccatcaggcagtgctgagatgcctcttggcttattttcttgacaaaagtgcagaggaaatgccttatcttaagtgtccactgcatacagttctgaaattgacacctgtcgcatatggttgcagggtggaaagcatctacctgaacgtcgagagcgtttgtacccaccgagaacgctctgaggatgcaaaaaagggtcccaatcccttaatgagaaggaactctgtcacccccctcgcctcaccagagcctacaaaaaaacctagaatcaattcattcgaggagcacgtagcctcgacttctgcagctcttccttcttgtttaccccctgaagtgcctacccagttgccaggccagaatatgaaaggctcgaggagcagtgctgattcatcccgaaagcattag

SEQ ID NO: 101973 - DNA, 1605 bp, Artificial Sequence
  derived and/or modified sequence
atgggagagggcggccagaaggagggggacagccagcaggccggggccctgcccctgctgtgccagctggacaccttcagccccaaggccaccgtgtttggagtgtccatcaacccagcctgtggccccaagctgaccaacagccccaccgtcatcgtgatggtgggcctgcctgcccggggcaagacctacatcagcaagaagctgacccgctacctgaactggattggagtgcccaccaaggtgttcaacgtgggggagtacagaagagaggccgtgaagcagtacagcagctacaacttcttccggccagacaatgaggaggccatgaaggtgaggaagcagtgtgccctggccgccctgagagatgtgaagagctacctggccaaggagggcggccagattgctgtgtttgatgccaccaacaccacccgggagaggaggcacatgatcctgcactttgccaaggaaaatgacttcaaggccttcttcattgaatctgtgtgtgatgaccccaccgtggtggccagcaacatcatggaggtgaagatcagcagcccagactacaaggactgcaacagcgctgaggccatggatgacttcatgaagaggatcagctgctatgaggccagctaccagcccctggaccctgacaagtgtgaccgggacctgagcctcatcaaggtgattgatgtgggccgccgcttcctggtgaacagagtgcaggaccacatccagagcagaattgtgtactacctgatgaacatccacgtgcagcccaggaccatctacctgtgccgccacggggagaatgagcacaacctgcagggcagaattggaggagacagcggcctgagcagccggggcaagaagtttgccagcgccctgagcaagtttgtggaggagcagaacctgaaggacctgcgggtgtggaccagccagctgaagagcaccatccagacagctgaggccctgcggctgccctatgagcagtggaaggccctgaatgaaattgatgctggggtgtgtgaggagctgacctatgaggagatccgggacacctacccagaggagtatgccctgcgggagcaggacaagtactactaccgctaccccactggagagagctaccaggacctggtgcagaggctggagcccgtcatcatggagctggagcggcaggagaatgtgctggtgatctgccaccaggccgtgctgcgctgcctgctggcctacttcctggacaagtctgctgaggagatgccctacctgaagtgccccctgcacacagtgctgaagctgacccctgtggcctacggctgccgggtggagagcatctacctgaatgtggagagcgtgtgcacccaccgggagaggagtgaagatgccaagaagggccccaaccccctgatgagaagaaattctgtgacccccctggccagccctgagcccaccaagaagccccgcatcaacagctttgaggagcacgtggccagcaccagcgctgccctgcccagctgcctgcccccagaggtgcccacccagctgcccggccagaacatgaagggcagccgcagcagcgctgacagcagcaggaagcactag

SEQ ID NO: 101974 - DNA, 1605 bp, Artificial Sequence
  derived and/or modified sequence
atgggcgagggcggccagaaggagggcgacagccagcaggccggcgctctcccactgttgtgccaactagataccttcagcccaaaagccacagtgttcggcgtatccatcaatcctgcctgtgggcccaagttgaccaactcccccacggtgatcgtaatggtggggctccctgcgaggggaaaaacgtacatctctaaaaaactcacgagatacctcaactggatcggcgttcctacaaaagttttcaatgtaggagagtatcgccgggaggccgtgaagcagtatagtagttataactttttccgcccggacaacgaggaggcaatgaaagtgagaaagcagtgtgcccttgcagccttgcgcgatgtcaagtcttacctcgctaaagaaggaggacagattgccgtattcgacgcaaccaacacaactcgggaacgcagacacatgattctgcactttgcaaaggaaaacgattttaaggccttcttcatcgaatctgtttgcgacgatcctacagtcgtcgcctctaacataatggaagtgaaaattagttcccctgattacaaggactgtaactctgctgaagcaatggatgactttatgaaaaggatcagctgctatgaagcgtcctaccagcccctcgatcccgataagtgtgacagggacctgtccttgattaaggtgattgacgtcggtagaaggtttctcgtcaaccgcgtccaggatcatatccaatctcgaatcgtatactacctcatgaacattcatgtgcagcctagaaccatttacctgtgtagacatggagagaatgagcacaatctgcagggccggattggaggcgattccggactgagctccaggggaaaaaaatttgccagcgcactgagcaagttcgtggaagaacaaaacttgaaggaccttcgggtttggaccagccagcttaaatccactatccaaacagccgaggcactccgcttgccatatgaacagtggaaggccctgaacgaaattgatgccggggtttgcgaggagcttacatacgaggagattagggatacctacccagaggaatacgcattgcgcgagcaggataaatactactaccggtaccctaccggggagtcctaccaggacctcgttcagcgtcttgagccagttatcatggaacttgaacgccaagagaacgtgctggtaatttgccaccaggccgtgcttcggtgtctgctcgcttatttcctcgataagtcggccgaagaaatgccctacctgaaatgcccacttcataccgtccttaaattaactccggtcgcttatggttgtcgggtggaaagtatctatctcaatgtcgaatccgtctgtactcatagggagcgtagcgaagatgccaagaaaggcccgaatcctctgatgcggcggaactccgtgactccactggcctcaccggagcccactaaaaagcccaggatcaactcttttgaagaacacgtcgctagcacctcggccgcgcttccaagttgtctgcctcccgaagtgcccacccaattgcctggccaaaacatgaaggggagccggtcctctgcagatagttcacggaagcattag

SEQ ID NO: 101975 - DNA, 1605 bp, Artificial Sequence
  derived and/or modified sequence
atgggcgaggggggtcaaaaagaaggggattcccagcaggccggtgctttgcccctgttgtgccaattggacacgtttagtcccaaagctaccgttttcggcgtttccattaacccggcatgcggtcccaaactgactaatagtccgacagtgattgtcatggtggggctgccggctcgcggaaagacgtacattagtaagaaactcacccgctacctaaactggataggggtgcccacaaaggtgtttaatgtcggcgaataccgcagagaggcagtgaaacagtactcctcatacaatttctttagaccggataatgaggaggccatgaaggtgagaaaacagtgtgcgttggcagccctccgtgatgtaaaatcttatctggctaaggaggggggacagatcgcagtgttcgacgctacgaatacaacacgcgaaaggcgacacatgattctgcacttcgccaaggagaacgactttaaagcctttttcatcgagtcagtgtgcgatgatccaaccgtcgtggcgtctaacatcatggaagtcaaaatctcgagtccagattataaagactgcaacagtgctgaagcaatggatgacttcatgaagcgaatctcctgttacgaggcctcttatcagcctctcgaccctgacaagtgcgaccgtgatctgagtctgatcaaggtcattgatgtcggtcgaaggttccttgtcaaccgggtccaggaccatatacagtcgagaatagtttattacctcatgaatatccacgttcagccccgtacaatctatttatgtcggcacggcgaaaatgaacacaaccttcagggacgcataggcggtgatagtggactctcctcacgtgggaaaaagtttgcatcagctctttccaagttcgtagaagaacagaaccttaaggacctgagggtgtggacgtcacagctgaagagcaccatccagactgctgaggctctgcgcctgccctacgagcagtggaaggcactcaatgagatcgatgccggtgtatgcgaagagctcacatacgaagagattcgggatacatatcctgaggagtatgcacttcgcgagcaggataaatactattaccgctaccctaccggtgaaagctaccaggaccttgtacagcgcctggagcctgtgattatggaactggaaaggcaagaaaatgtgctcgtcatctgccaccaggctgttctgaggtgtctcctggcatactttctggataagtccgctgaagagatgccttatctcaagtgccccctacatacagtgcttaagctgacgcctgtagcgtatggttgcagggtggaaagcatctacctgaatgtcgaatcggtgtgcacacacagagaacggagcgaagacgctaaaaaagggcctaatcctttaatgcgtcggaactctgtgacacccttggcctctccagaacctaccaagaagcccagaatcaactccttcgaggaacacgtggcctccacatctgccgcactcccatcctgtctgcctcctgaggtgcctacccaactcccgggtcaaaacatgaaaggaagtcgttcatccgctgactcttctcgtaagcactag

SEQ ID NO: 101976 - DNA, 1677 bp, Artificial Sequence
  derived and/or modified sequence
agcgtgggctcctggcggtgaagggggtggctgctgactctcctgtcccgttggggtagagagatgggggagggtggccagaaggaaggtgacagccagcaagcaggggctctgccactcctctgtcagctggacacgtttagtcccaaggccactgtcttcggtgtctccattaatccagcctgtgggccaaagctgaccaactcccccaccgtcatcgtcatggtgggcctccccgcccggggcaagacctacatctccaagaagctgactcgctacctcaactggattggcgtccccacaaaagtgttcaacgtcggggagtatcgccgggaggctgtgaagcagtacagctcctacaacttcttccgccccgacaatgaggaagccatgaaagtccggaagcaatgtgccttagctgccttgagagatgtcaaaagctacctggcgaaagaagggggacaaattgcggttttcgatgccaccaatactactagagagaggagacacatgatccttcattttgccaaagaaaatgactttaaggcgtttttcatcgagtcggtgtgcgacgaccctacagttgtggcctccaatatcatggaagttaaaatctccagcccggattacaaagactgcaactcggcagaagccatggacgacttcatgaagaggatcagttgctatgaagccagctaccagcccctcgaccccgacaaatgcgacagggacttgtcgctgatcaaggtgattgacgtgggccggaggttcctggtgaaccgggtgcaggaccacatccagagccgcatcgtgtactacctgatgaacatccacgtgcagccgcgtaccatctacctgtgccggcacggcgagaacgagcacaacctccagggccgcatcgggggcgactcaggcctgtccagccggggcaagaagtttgccagtgctctgagcaagttcgtggaggagcagaacctgaaggacctgcgcgtgtggaccagccagctgaagagcaccatccagacggccgaggcgctgcggctgccctacgagcagtggaaggcgctcaatgagatcgacgcgggcgtctgtgaggagctgacctacgaggagatcagggacacctaccctgaggagtatgcgctgcgggagcaggacaagtactattaccgctaccccaccggggagtcctaccaggacctggtccagcgcttggagccagtgatcatggagctggagcggcaggagaatgtgctggtcatctgccaccaggccgtcctgcgctgcctgcttgcctacttcctggataagagtgcagaggagatgccctacctgaaatgccctcttcacaccgtcctgaaactgacgcctgtcgcttatggctgccgtgtggaatccatctacctgaacgtggagtccgtctgcacacaccgggagaggtcagaggatgcaaagaagggacctaacccgctcatgagacgcaatagtgtcaccccgctagccagccccgaacccaccaaaaagcctcgcatcaacagctttgaggagcatgtggcctccacctcggccgccctgcccagctgcctgcccccggaggtgcccacgcagctgcctggacaacctttgctagggcaagcctgtctaaactggaaaggtgtgatgaggaatgcagcctga

SEQ ID NO: 101977 - DNA, 2094 bp, Artificial Sequence
  derived and/or modified sequence
agcgtgggctcctggcggtgaagggggtggctgctgactctcctgtcccgttggggtagagagatgggggagggtggccagaaggaaggtgacagccagcaagcaggggctctgccactcctctgtcagctggacacgtttagtcccaaggccactgtcttcggtgtctccattaatccagcctgtgggccaaagctgaccaactcccccaccgtcatcgtcatggtgggcctccccgcccggggcaagacctacatctccaagaagctgactcgctacctcaactggattggcgtccccacaaaagtgttcaacgtcggggagtatcgccgggaggctgtgaagcagtacagctcctacaacttcttccgccccgacaatgaggaagccatgaaagtccggaagcaatgtgccttagctgccttgagagatgtcaaaagctacctggcgaaagaagggggacaaattgcggttttcgatgccaccaatactactagagagaggagacacatgatccttcattttgccaaagaaaatgactttaaggcgtttttcatcgagtcggtgtgcgacgaccctacagttgtggcctccaatatcatggaagttaaaatctccagcccggattacaaagactgcaactcggcagaagccatggacgacttcatgaagaggatcagttgctatgaagccagctaccagcccctcgaccccgacaaatgcgacagggacttgtcgctgatcaaggtgattgacgtgggccggaggttcctggtgaaccgggtgcaggaccacatccagagccgcatcgtgtactacctgatgaacatccacgtgcagccgcgtaccatctacctgtgccggcacggcgagaacgagcacaacctccagggccgcatcgggggcgactcaggcctgtccagccggggcaagaagtttgccagtgctctgagcaagttcgtggaggagcagaacctgaaggacctgcgcgtgtggaccagccagctgaagagcaccatccagacggccgaggcgctgcggctgccctacgagcagtggaaggcgctcaatgagatcgacgcgggcgtctgtgaggagctgacctacgaggagatcagggacacctaccctgaggagtatgcgctgcgggagcaggacaagtactattaccgctaccccaccggggagtcctaccaggacctggtccagcgcttggagccagtgatcatggagctggagcggcaggagaatgtgctggtcatctgccaccaggccgtcctgcgctgcctgcttgcctacttcctggataagagtgcagaggagatgccctacctgaaatgccctcttcacaccgtcctgaaactgacgcctgtcgcttatggctgccgtgtggaatccatctacctgaacgtggagtccgtctgcacacaccgggagaggtcagaggatgcaaagaagggacctaacccgctcatgagacgcaatagtgtcaccccgctagccagccccgaacccaccaaaaagcctcgcatcaacagctttgaggagcatgtggcctccacctcggccgccctgcccagctgcctgcccccggaggtgcccacgcagctgcctggacaaaacatgaaaggctcccggagcagcgctgactcctccaggaaacactgaggcagacgtgtcggttccattccatttccatttctgcagcttagcttgtgtcctgccctccgcccgaggcaaaacgtatcctgaggacttcttccggagagggtggggtggagcagcgggggagccttggccgaagagaaccatgcttggcaccgtctgtgtcccctcggccgctggacaccagaaagccacgtgggtccctggcgccctgcctttagccgtggggcccccacctccactctctgggtttcctaggaatgtccagcctcggagaccttcacaaagccttgggagggtgatgagtgctggtcctgacaggaggccgctggggacactgtgctgttttgtttcgtttctgtgatctcccggcacgtttggagctgggaagaccacactggtggcagaatcctaaaattaaaggaggca

SEQ ID NO: 101978 - DNA, 1605 bp, Artificial Sequence
  derived and/or modified sequence
atgggcgagggcggccagaaggagggcgacagccagcaggccggcgccctgcccctgctgtgccagctggacaccttcagccccaaggccaccgtgttcggcgtgagcatcaaccccgcctgcggccccaagctgaccaacagccccaccgtgatcgtgatggtgggcctgcccgccagaggcaagacctacatcagcaagaagctgaccagatacctgaactggatcggcgtgcccaccaaggtgttcaacgtgggcgagtacagaagagaggccgtgaagcagtacagcagctacaacttcttcagacccgacaacgaggaggccatgaaggtgagaaagcagtgcgccctggccgccctgagagacgtgaagagctacctggccaaggagggcggccagatcgccgtgttcgacgccaccaacaccaccagagagagaagacacatgatcctgcacttcgccaaggagaacgacttcaaggccttcttcatcgagagcgtgtgcgacgaccccaccgtggtggccagcaacatcatggaggtgaagatcagcagccccgactacaaggactgcaacagcgccgaggccatggacgacttcatgaagagaatcagctgctacgaggccagctaccagcccctggaccccgacaagtgcgacagagacctgagcctgatcaaggtgatcgacgtgggcagaagattcctggtgaacagagtgcaggaccacatccagagcagaatcgtgtactacctgatgaacatccacgtgcagcccagaaccatctacctgtgcagacacggcgagaacgagcacaacctgcagggcagaatcggcggcgacagcggcctgagcagcagaggcaagaagttcgccagcgccctgagcaagttcgtggaggagcagaacctgaaggacctgagagtgtggaccagccagctgaagagcaccatccagaccgccgaggccctgagactgccctacgagcagtggaaggccctgaacgagatcgacgccggcgtgtgcgaggagctgacctacgaggagatcagagacacctaccccgaggagtacgccctgagagagcaggacaagtactactacagataccccaccggcgagagctaccaggacctggtgcagagactggagcccgtgatcatggagctggagagacaggagaacgtgctggtgatctgccaccaggccgtgctgagatgcctgctggcctacttcctggacaagagcgccgaggagatgccctacctgaagtgccccctgcacaccgtgctgaagctgacccccgtggcctacggctgcagagtggagagcatctacctgaacgtggagagcgtgtgcacccacagagagagaagcgaggacgccaagaagggccccaaccccctgatgagaagaaacagcgtgacccccctggccagccccgagcccaccaagaagcccagaatcaacagcttcgaggagcacgtggccagcaccagcgccgccctgcccagctgcctgccccccgaggtgcccacccagctgcccggccagaacatgaagggcagcagaagcagcgccgacagcagcagaaagcactag

SEQ ID NO: 101979 - protein, 544 aa, Artificial Sequence
  derived and/or modified sequence
MSGSRERDNMLHLHHSWTPNIDRLAEDGVKLTQHISAASLCTPSRAAFLTGRYPVRSGMVSSIGYRVLQWTGASGGLPTNETTFAKILKEKGYATGLIGKWHLGLNCESASDHCHHPLHHGFDHFYGMPFSLMGDCARWELSEKRVNLEQKLNFLFQVLALVALTLVAGKLTHLIPVSWMPVIWSALSAVLLLASSYFVGALIVHADCFLMRNHTITEQPMCFQRTTPLILQEVASFLKRNKHGPFLLFVSFLHVHIPLITMENFLGKSLHGLYGDNVEEMDWMVGRILDTLDVEGLSNSTLIYFTSDHGGSLENQLGNTQYGGWNGIYKGGKGMGGWEGGIRVPGIFRWPGVLPAGRVIGEPTSLMDVFPTVVRLAGGEVPQDRVIDGQDLLPLLLGTAQHSDHEFLMHYCERFLHAARWHQRDRGTMWKVHFVTPVFQPEGAGACYGRKVCPCFGEKVVHHDPPLLFDLSRDPSETHILTPASEPVFYQVMERVQQAVWEHQRTLSPVPLQLDRLGNIWRPWLQPCCGPFPLCWCLREDDPQ

SEQ ID NO: 101980 - DNA, 1635 bp, Artificial Sequence
  derived and/or modified sequence
atgtctggttccagggaaagggataacatgctccacctgcatcattcctggacacccaacatcgatcgattagccgaagacggggtgaaactcactcagcatatttcagccgcttcactctgcacacctagcagggcggctttcctcacaggacggtaccccgtaagaagcggaatggttagtagcatcggctatagggtgctgcaatggaccggggcctctggcggcctccctaccaacgagaccacctttgccaagattctgaaggaaaagggctacgccaccgggctgattggaaagtggcatctgggcctgaactgtgagtccgcgagcgaccactgccaccatcctctccatcacggatttgaccatttctatggtatgcccttcagccttatgggtgactgtgctaggtgggagttgagcgagaaacgagttaacctggagcagaagctgaatttcctcttccaggtcctggctctcgtggcccttacactggttgcagggaaactgactcacctgatccccgtatcttggatgcctgtgatatggtccgccctgagcgcagttcttcttctggcttcttcatacttcgttggagctcttattgtgcacgccgattgctttctaatgaggaatcataccataacagagcagcctatgtgctttcaacgcacaaccccgttgattttacaggaagtggctagctttctcaagaggaacaagcatggcccgttcttactctttgtgtcatttctccacgtgcatatacctctgattactatggaaaactttttgggcaaaagtttacacggcctctacggcgataacgtcgaggagatggactggatggtgggccgcatcctggatacccttgatgtagagggactctccaattctacactgatatactttacaagcgaccacggcggcagcctggagaatcaactgggtaatacccagtacgggggatggaatggaatttataagggaggcaaggggatgggcggatgggagggagggatccgggttccaggtatttttcgctggcctggggtactgccagccggtagggtgattggggaaccaacttctctcatggatgtgttccccaccgtagtgcgcctggcgggcggagaagtccctcaagatcgcgttatcgatgggcaggaccttcttccgctactgttgggaaccgcccaacactccgaccatgaattcctcatgcactactgcgaacgctttttgcatgcagcccgttggcatcagagagaccggggcaccatgtggaaagttcattttgtgacaccagtcttccagcccgaaggcgccggagcatgctacggaagaaaagtatgtccatgttttggagaaaaagtcgtgcatcatgaccctccacttctgtttgacttgtcccgtgatccctccgagacacacattctcactcccgctagcgagcccgttttttatcaggttatggaaagggtacaacaggctgtatgggagcaccagcgtacattgtcaccagttccgctccagctggatcggcttgggaatatctggcgaccctggctgcaaccgtgttgtgggcccttccctctgtgctggtgtctgcgcgaggatgatccacaatag

SEQ ID NO: 101981 - DNA, 1635 bp, Artificial Sequence
  derived and/or modified sequence
atgagcggcagccgggagcgggacaacatgctgcacctgcaccacagctggacccccaacatcgaccggctggccgaggatggagtgaagctgacccagcacatctctgctgccagcctgtgcacccccagccgggccgccttcctgaccggccgctaccctgtgcgcagcggcatggtgagcagcatcggctacagagtgctgcagtggacaggagccagcggcggcctgcccaccaatgagaccacctttgccaagatcctgaaggagaagggctacgccaccggcctcatcggcaagtggcacctgggcctgaactgtgagagcgccagtgaccactgccaccaccccctgcaccacggctttgaccacttctacggcatgcccttcagcctgatgggagactgtgcccgctgggagctgtctgagaagagggtgaacctggagcagaagctgaacttcctgttccaggtgctggccctggtggccctgaccctggtggccggcaagctgacccacctgatccctgtgtcctggatgcctgtgatctggagcgccctgtctgctgtgctgctgctggccagcagctactttgtgggcgccctgattgtgcacgccgactgcttcctgatgaggaaccacaccatcacagagcagcccatgtgcttccagaggaccacccccctcatcctgcaggaggtggccagcttcctgaagaggaacaagcacggccccttcctgctgtttgtgtccttcctgcacgtgcacatccccctcatcaccatggagaacttcctgggcaagagcctgcacggcctgtatggagacaacgtggaggagatggactggatggtgggccgcatcctggacaccctggatgtggagggcctgagcaacagcaccctcatctacttcaccagtgaccatggaggcagcctggagaaccagctgggcaacacccagtatggaggctggaatggcatctacaagggcggcaagggcatgggcggctgggagggcggcatccgggtgcccggcatcttccgctggccaggagtgctgcctgctggccgggtcatcggggagcccaccagcctgatggatgtgttccccaccgtggtgcggctggccggcggggaggtgccccaggacagagtgattgatggccaggacctgctgcccctgctgctgggcacagcccagcacagcgaccacgagttcctgatgcactactgtgagcgcttcctgcacgccgcccgctggcaccagagggaccggggcaccatgtggaaggtgcactttgtgacccctgtgttccagcctgagggcgctggggcctgctacggcaggaaggtgtgcccctgcttcggggagaaggtggtgcaccacgacccccccctgctgtttgacctgagccgggaccccagcgagacccacatcctgaccccagccagcgagcctgtgttctaccaggtgatggagcgggtgcagcaggccgtgtgggagcaccagaggaccctgagccctgtgcccctgcagctggaccggctgggcaacatctggaggccctggctgcagccctgctgcggccccttccccctgtgctggtgcctgcgggaggatgacccccagtag

SEQ ID NO: 101982 - DNA, 1635 bp, Artificial Sequence
  derived and/or modified sequence
atgagcggcagccgggagcgggacaacatgctgcacctgcaccactcctggacacccaacatagatcgacttgccgaagatggcgtgaagctcactcagcacatctcagccgcatccctctgtacaccgtcaagggctgctttcctgaccggacgttaccccgtaagatctggaatggtgagttcaataggataccgtgtgctgcagtggaccggcgcaagcggcgggctccctactaatgagaccacattcgccaagatcctcaaggaaaaagggtacgccaccggcctcattgggaaatggcaccttggtctgaactgcgaatctgcgtcggatcattgccaccatcctctccatcatggctttgaccatttttacggcatgccctttagtctgatgggcgattgcgccagatgggaactctctgagaagagggtgaacctggagcagaaactgaacttcttattccaggtcctagccctcgttgccctaacactcgtcgcgggaaagcttactcacttgataccggtctcctggatgccagtgatctggtcggccctctctgcagtcttgttactggcaagttcctactttgtgggtgcccttatcgtccacgcagactgcttcctcatgcgaaatcacactatcacagaacaacccatgtgttttcagaggaccaccccactcatactccaggaagtggcttcgttcctgaagcgcaacaaacacggcccctttttgctctttgtatcatttcttcatgtccacataccacttatcaccatggaaaatttcctggggaagtcactgcatggcctctacggcgacaacgtcgaagaaatggactggatggtgggtcgtattctcgacactctcgatgtggaggggttgagcaattctactctgatatactttacttcagaccacggcggctcgctcgaaaatcagcttggcaatactcagtacggcggctggaacggaatttacaaaggggggaaaggaatgggtggatgggagggaggcatccgtgtccctggcatatttaggtggccgggcgttcttcctgccgggcgagttataggggagcccacatctctaatggacgtgttccctactgtggtgaggttggccggcggagaggtgcctcaggatcgcgtgatcgatggacaggatctgctgcccctcttactgggtacagctcaacactctgatcacgagtttcttatgcactactgcgaacgattcttacacgccgcccggtggcatcagcgcgacagagggacgatgtggaaagtgcatttcgtgacaccggtgttccagcccgaaggagcaggggcttgctacggaaggaaggtatgtccttgtttcggcgagaaagtggtgcaccacgatcccccattactgttcgatctttcccgcgacccctccgaaacccacattttgacacctgcgagcgagcccgtgttttaccaggttatggagagggttcaacaggccgtgtgggagcaccagcgaacattgtctccagtgcctctgcaactggaccggttaggcaacatctggcggccctggttgcaaccctgctgtggccctttccctttgtgctggtgcctaagagaggatgacccacagtag

SEQ ID NO: 101983 - DNA, 1635 bp, Artificial Sequence
  derived and/or modified sequence
atgagcggatcaagagagcgagacaacatgctgcacttgcaccactcgtggaccccaaacatcgatcgactggccgaggatggtgtcaaacttacccagcacatttctgcagctagtctttgcaccccgagccgcgctgcattcctgaccggaaggtatccagtgaggtcaggaatggtcagtagcatcggttatagagtgctccagtggaccggcgcttcgggcggtctgccaactaatgagactaccttcgctaagatcttgaaagagaaaggatatgccaccggactgatcgggaaatggcaccttggacttaactgcgaatcagcatctgatcactgtcaccaccctctacaccacggcttcgaccatttttatggaatgccattctctctgatgggagattgcgccagatgggagctgtctgagaagcgcgtaaatcttgaacagaaattaaactttctgtttcaggtgttggctttggttgctctcaccctggtagccggtaaattaactcaccttatccccgtatcctggatgccagtcatatggtccgcactaagcgccgttctgctgctggcgtcctcttattttgtcggcgcattgattgtgcatgccgactgctttctgatgagaaaccacacaataaccgagcagcccatgtgctttcagcgaactaccccactgatcctccaagaagttgcttcatttctcaagcgcaacaagcatgggccttttctgttattcgtctcctttctacacgtgcatatccctcttattacaatggaaaactttcttggcaagtctctccatggtttatacggagacaacgttgaagaaatggattggatggtcggaagaattctggatactcttgatgtggaaggcttatccaatagtaccttaatatatttcacctcagatcacggcggtagcctggaaaaccagcttggaaatactcagtacggaggctggaacggtatttacaaaggcggaaaagggatgggcggatgggaaggtgggattcgagtcccgggtatattccgctggccgggagtgctacccgctggtagggtcattggtgaacctaccagcttaatggacgtgtttccaaccgtagtgagacttgccggaggggaggtcccacaggaccgtgttatcgacgggcaggacctattgcctctcctgctcgggacagctcagcattctgatcatgaattcttaatgcattactgcgaaagattcctccacgccgcaagatggcatcaaagagacaggggcaccatgtggaaggtgcacttcgtaacgccagtattccagcccgaaggcgcaggggcatgttacggcagaaaggtatgtccctgcttcggcgagaaagtggtgcaccacgatcctcctctcctgttcgatctctctagggatccgagtgaaactcatatacttactcctgcgagcgaaccagtgttttatcaggtcatggaaagggttcaacaggctgtttgggaacatcaaaggaccctgtctccagttccacttcaactggacaggcttggaaacatatggcgcccatggctccaaccttgttgtgggcctttcccactgtgctggtgcctgcgggaggatgatcctcagtag

SEQ ID NO: 101984 - DNA, 1899 bp, Artificial Sequence
  derived and/or modified sequence
agtgcgtgtctgttttggcaggaagaagacgtttcttccaaggagcagcctccccgctacatccagccagtgtcgcccttacacagctgcatgtcaggaagtagagagagagacaacatgttacatctgcaccattcttggactccgaatattgaccgccttgcagaggacggcgtgaagctgacccaacacatctctgccgcatctttgtgcaccccaagcagagccgccttcctcacgggcagataccctgtgcgatcagggatggtttccagcattggttaccgtgttcttcagtggaccggagcatctggaggtcttccaacaaatgagacaacttttgcaaaaatactgaaagagaaaggctatgccactggactcattggaaaatggcatctgggtctcaactgtgagtcagccagtgatcattgccaccaccctctccatcatggctttgaccatttctacggaatgcctttctccttgatgggtgattgcgcccgctgggaactctcagagaagcgtgtcaacctggaacaaaaactcaacttcctcttccaagtcctggccttggttgccctcacactggtagcagggaagctcacacacctgatacccgtctcgtggatgccggtcatctggtcagccctttcggccgtcctcctcctcgcaagctcctattttgtgggtgctctgattgtccatgccgattgctttctgatgagaaaccacaccatcacggagcagcccatgtgcttccaaagaacgacaccccttattctgcaggaggttgcgtcctttctcaaaaggaataagcatgggcctttcctcctctttgtttcctttctacacgttcacatccctcttatcactatggagaacttcctcgggaagagtctccacgggctgtatggggacaacgtagaggagatggactggatggtaggacggatccttgacactttggacgtggagggtttgagcaacagcaccctcatttattttacgtcggatcacggcggttccctagagaatcaacttggaaacacccagtatggtggctggaatggaatttataaaggtgggaagggcatgggaggatgggaaggtgggatccgcgtgcccgggatcttccgctggcccggggtgctcccggccggccgagtgattggcgagcccacgagtctgatggacgtgttccccaccgtggtccggctggcgggcggcgaggtgccccaggacagagtgattgacggccaagaccttctgcccttgctcctggggacagcccaacactcagaccacgagttcctgatgcattattgtgagaggtttctgcacgcagccaggtggcatcaacgggacagaggaacaatgtggaaagtccactttgtgacgcctgtgttccagccagagggagccggtgcctgctatggaagaaaggtctgcccgtgctttggggaaaaagtagtccaccacgatccacctttgctctttgacctctcaagagacccttctgagacccacatcctcacaccagcctcagagcccgtgttctatcaggtgatggaacgagtccagcaggcggtgtgggaacaccagcggacactcagcccagttcctctgcagctggacaggctgggcaacatctggagaccgtggctgcagccctgctgtggcccgttccccctctgctggtgccttagggaagatgacccacaataaatgtctgcagtgaaaagctggagccccgattcctaaattttgtcactcaaattgaaacaaaccagctggccatggtggttgtcatcccagcactttaggaggccaccacaggaggatcactcccgtgatcaaaaccaacctgggcaacatgatgaaactctagctctacaaaac

SEQ ID NO: 101985 - DNA, 1635 bp, Artificial Sequence
  derived and/or modified sequence
atgagcggcagcagagagagagacaacatgctgcacctgcaccacagctggacccccaacatcgacagactggccgaggacggcgtgaagctgacccagcacatcagcgccgccagcctgtgcacccccagcagagccgccttcctgaccggcagataccccgtgagaagcggcatggtgagcagcatcggctacagagtgctgcagtggaccggcgccagcggcggcctgcccaccaacgagaccaccttcgccaagatcctgaaggagaagggctacgccaccggcctgatcggcaagtggcacctgggcctgaactgcgagagcgccagcgaccactgccaccaccccctgcaccacggcttcgaccacttctacggcatgcccttcagcctgatgggcgactgcgccagatgggagctgagcgagaagagagtgaacctggagcagaagctgaacttcctgttccaggtgctggccctggtggccctgaccctggtggccggcaagctgacccacctgatccccgtgagctggatgcccgtgatctggagcgccctgagcgccgtgctgctgctggccagcagctacttcgtgggcgccctgatcgtgcacgccgactgcttcctgatgagaaaccacaccatcaccgagcagcccatgtgcttccagagaaccacccccctgatcctgcaggaggtggccagcttcctgaagagaaacaagcacggccccttcctgctgttcgtgagcttcctgcacgtgcacatccccctgatcaccatggagaacttcctgggcaagagcctgcacggcctgtacggcgacaacgtggaggagatggactggatggtgggcagaatcctggacaccctggacgtggagggcctgagcaacagcaccctgatctacttcaccagcgaccacggcggcagcctggagaaccagctgggcaacacccagtacggcggctggaacggcatctacaagggcggcaagggcatgggcggctgggagggcggcatcagagtgcccggcatcttcagatggcccggcgtgctgcccgccggcagagtgatcggcgagcccaccagcctgatggacgtgttccccaccgtggtgagactggccggcggcgaggtgccccaggacagagtgatcgacggccaggacctgctgcccctgctgctgggcaccgcccagcacagcgaccacgagttcctgatgcactactgcgagagattcctgcacgccgccagatggcaccagagagacagaggcaccatgtggaaggtgcacttcgtgacccccgtgttccagcccgagggcgccggcgcctgctacggcagaaaggtgtgcccctgcttcggcgagaaggtggtgcaccacgacccccccctgctgttcgacctgagcagagaccccagcgagacccacatcctgacccccgccagcgagcccgtgttctaccaggtgatggagagagtgcagcaggccgtgtgggagcaccagagaaccctgagccccgtgcccctgcagctggacagactgggcaacatctggagaccctggctgcagccctgctgcggccccttccccctgtgctggtgcctgagagaggacgacccccagtag

SEQ ID NO: 101986 - protein, 72 aa, Artificial Sequence
  derived and/or modified sequence
MHRRRLALGLGFCLLAGTSLSVLWVYLENWLPVSYVPYYLPCPEILLEYRGVISAHCNLHLPGSSNCHASAT

SEQ ID NO: 101987 - protein, 330 aa, Artificial Sequence
  derived and/or modified sequence
MHRRRLALGLGFCLLAGTSLSVLWVYLENWLPVSYVPYYLPCPEILSQYPQPKLLEHRPTQLLTLTPWLAPIVSEGTFNPELLQHIYQPLNLTIGVTVFAVGKYTHFIQSFLESAEEFFMRGYRVHYYIFTDNPAAVPGVPLGPHRLLSSIPIQGHSHWEETSMRRMETISQHIAKRAHREVDYLFCLDVDMVFRNPWGPETLGDLVAAIHPSYYAVPRQQFPYERRRVSTAFVADSEGDFYYGGAVFGGQVARVYEFTRGCHMAILADKANGIMAAWREESHLNRHFISNKPSKVLSPEYLWDDRKPQPPSLKLIRFSTLDKDISCLRS

SEQ ID NO: 101988 - DNA, 219 bp, Artificial Sequence
  derived and/or modified sequence
atgcaccgcaggcgtctagcattgggacttggcttctgtttgctcgcaggtaccagcctctccgtgctctgggtgtatttagaaaattggctgccagtatcctacgtgccttactatttgccctgtcctgagattctcctcgagtataggggtgtgatatctgctcactgtaacctgcacctaccaggctctagcaattgtcatgcttcagccacctag

SEQ ID NO: 101989 - DNA, 993 bp, Artificial Sequence
  derived and/or modified sequence
atgcaccgaaggagattggctctcggacttgggttctgcctcctggccgggaccagcctctctgtgctgtgggtctacctcgaaaattggctgcccgtgtcgtacgtgccttactatctaccttgcccggagattctgagccagtatccccaacccaaattgttggaacatcgtcccacgcagctgcttacattgacaccttggttggcccccatcgtgagcgaagggactttcaacccagaactgttacagcatatctaccagccgcttaatttgactattggcgtgacagttttcgccgtgggtaagtacacgcacttcattcagtcttttttagagtcagcagaagaattctttatgcgaggatatcgagtacactactatatcttcaccgacaatccggctgctgtcccgggcgtccccctgggaccacatcgtctcctgtcttctatccctatccaaggacacagtcattgggaagagacatccatgcgcagaatggaaacgatttcacaacacattgccaagcgcgcacatagggaagtcgactacctgttttgtctcgacgtggatatggtctttagaaacccctgggggcctgagaccctcggcgatctggtcgccgccatacatccctcatactatgcagtgcctagacagcagttcccttacgaaagacggagagtgagcactgccttcgttgctgattcagagggagacttttattatggtggggccgtgtttggcggccaggtcgctcgagtgtacgagttcacacgcggatgccacatggccatcctggcagacaaggccaatgggattatggcggcctggagagaagaaagtcacctgaaccgccatttcatttccaacaaaccctcgaaggtgctgtctcctgagtacctctgggatgaccgtaaaccccaacctccttctttgaagctcattagattcagtacacttgataaggatattagttgcctgcgcagttag

SEQ ID NO: 101990 - DNA, 1449 bp, Artificial Sequence
  derived and/or modified sequence
ctcttttctgtctggcccgcggccccgctgcctgccctgctccaggctccacctgcgccgccgatcgcccgggtatcgcgggggcccaggccagctgagtccgttttccgcgccggggtggcgcccctccaaccgtcctaacgccgggccggcagcaaggagtgttcctgggacctcagagaccaggctcagagcctgacatccctgcgaggggacagcctcatccgcccaggccagtgggggtctctacaagtgcccaggctcaggtgcagcccccagcaatgcatcgccggagactggccctgggtctggggttctgcctgttggcgggcacaagcctcagtgtcctgtgggtgtatcttgagaactggctgccagtctcctatgtcccctattatctcccctgcccagagatcttgtcacagtaccctcagcccaagctgctggagcacaggcccacacagctgctgacactcacaccctggttggcgcccatcgtctccgagggaaccttcaacccagagcttctgcagcacatctaccagccactgaacctgaccattggggtcacggtgtttgccgtggggaagtacactcatttcatccagtccttcctggagtcagccgaggagttcttcatgcgtgggtaccgggtgcactactacatcttcactgacaaccctgcagccgttcccggggtcccgctgggtccccaccggcttctcagctccatccccatccagggtcactcccactgggaggagacatccatgcgccggatggagaccatcagccagcacattgctaagagggctcaccgggaggtggactacctcttctgccttgatgtggacatggtgtttcggaacccgtggggccctgagaccttgggagacctggtggctgccattcacccaagctactacgccgttccccgccagcagttcccctatgagcgcaggcgtgtttccactgcctttgtggcagacagcgaaggggacttctattatggtggggcagtcttcggggggcaggtggccagggtatatgagtttactaggggctgccacatggccatcctggcggacaaggccaatggcatcatggctgcctggcgggaggaaagccacctgaaccgtcacttcatctcaaacaagccgtccaaggtgctgtcccccgagtacctctgggacgacaggaagccccagccacccagcctgaagctgatccgcttttctacactggacaaggatatcagctgcctgaggagctgaccacggagctgggggttgccatggatggggacccaaagacctgcagccaccagtgcttcactagcgtgcagaccagccctgtcccgcctccctgtcagtcaggcgaattcaaccggaaaagggacgtggaaaggccactgtgaactgcagagggctgtgcacacagtagcacaca

SEQ ID NO: 101991 - DNA, 219 bp, Artificial Sequence
  derived and/or modified sequence
atgcacagaagaaggctggccctgggcctgggcttctgcctgctggccggcaccagcctgtctgtgctgtgggtgtacctggagaactggctgcctgtgtcctatgtgccctactacctgccctgcccagagatcctgctggagtacagaggagtcatcagcgcccactgcaacctgcacctgcccggcagcagcaactgccacgccagcgccacctag

SEQ ID NO: 101992 - DNA, 993 bp, Artificial Sequence
  derived and/or modified sequence
atgcacagaagaaggctggccctgggcctgggcttctgcctgctggccggcaccagcctgtctgtgctgtgggtgtacctggagaactggctgcctgtgtcctatgtgccctactacctgccctgcccagagatcctgagccagtacccccagcccaagctgctggagcaccggcccacccagctgctgaccctgaccccctggctggcccccatcgtgtctgagggcaccttcaaccctgagctgctgcagcacatctaccagcccctgaacctgaccatcggcgtgacagtgtttgctgtgggcaagtacacccacttcatccagagcttcctggagagcgctgaggagttcttcatgaggggctacagagtgcactactacatcttcacagacaacccagctgctgtgcctggggtgcccctgggcccccaccggctgctgagcagcatccccatccagggccacagccactgggaggagacctccatgaggaggatggagaccatcagccagcacatcgccaagagggcccaccgggaggtggactacctgttctgcctggatgtggacatggtgttcaggaacccctggggccctgagaccctgggggacctggtggccgccatccaccccagctactatgctgtgccccggcagcagttcccctatgaaagaagaagagtgtccacagcctttgtggccgacagcgagggggacttctactatggaggagctgtgtttggaggccaggtggcccgggtgtatgagttcacccggggctgccacatggccatcctggccgacaaggccaacggcatcatggccgcctggagggaggagagccacctgaacagacacttcatcagcaacaagcccagcaaggtgctgagccctgagtacctgtgggatgacaggaagccccagccccccagcctgaagctgatccgcttcagcaccctggacaaggacatcagctgcctgcggagctag

SEQ ID NO: 101993 - DNA, 219 bp, Artificial Sequence
  derived and/or modified sequence
atgcaccggcggcggctggccctgggcctgggcttctgcctgctggccggtactagccttagtgtgttgtgggtgtacttagaaaactggctacccgtgagttatgtgccttattatttgccctgccccgaaattctccttgagtacagaggagttatatctgctcactgcaacctccacctgcccgggagtagcaattgtcatgcaagcgcaacttag

SEQ ID NO: 101994 - DNA, 993 bp, Artificial Sequence
  derived and/or modified sequence
atgcaccggcggcggctggccctgggcctgggcttctgcctgctggcgggaacaagcctgtccgtactttgggtgtacctggagaactggctcccagtttcctatgtgccttactatctcccatgtcctgagatcctgtcccagtacccgcagccaaagctgctggagcaccggcctacccagttgcttacgctgaccccttggctggcccctatcgtgtcggaggggactttcaaccctgagctgctccagcacatctaccaacccttgaacctgacaattggggttactgttttcgcagttggaaaatatactcactttatccagtccttcctggaaagtgccgaggagttcttcatgaggggctaccgggtgcattactacatcttcaccgataacccagccgcggtgcctggcgtccccctaggacctcatcgcctactctcaagcattcccatacaaggacactcccactgggaggagacctccatgaggcggatggagaccatttcgcaacacatcgctaagcgcgcacacagagaagtcgactacttgttctgcctggatgtcgacatggtatttcggaacccttggggcccagagacactcggcgatttggtcgctgccatacatccatcttattacgccgtgccccgccagcagtttccgtacgagagaagacgggtgtcaacagcatttgtagctgacagcgaaggggacttttactacggtggtgccgtttttgggggtcaggtggcaagagtgtatgagttcacgagaggttgtcatatggccatcctggccgacaaggccaacggaatcatggcggcatggagggaagaatcacatctgaacagacacttcatctccaataaacctagcaaagtgcttagtccagagtacttatgggacgataggaaacctcagccaccctcactgaaacttatccgatttagtacactggataaggatatttcgtgtttgcggtcctag

SEQ ID NO: 101995 - DNA, 219 bp, Artificial Sequence
  derived and/or modified sequence
atgcaccgccgtagactggctctgggacttggcttttgtctgcttgcaggcacgagcctcagcgtcttgtgggtgtacctcgagaactggctgccggtgagttacgtgccctactatctcccatgtccagagatccttcttgagtaccgcggtgtcatatccgcacactgtaacctgcatctgcccggttcttcgaattgtcacgcttctgccacgtag

SEQ ID NO: 101996 - DNA, 993 bp, Artificial Sequence
  derived and/or modified sequence
atgcatcgaagacggttagctttggggctgggattctgtttactcgccggtacctcattgtctgtcctgtgggtttatctggaaaattggctacccgtcagttacgtgccgtattacctgccttgtccggagattctgtcccagtacccacaacccaagctgctggaacacaggcccacccaacttctgactcttaccccatggcttgcacctatcgtatctgaaggcacatttaaccctgagctgctgcagcacatttatcagccacttaatctgacaattggtgtcactgtatttgcagtgggtaaatatacccatttcattcagtctttcttagagagcgcggaggagttcttcatgagaggctaccgcgtgcactattatattttcacggacaatcccgctgctgtccccggagtgccactgggacctcaccggctcctttccagcatacctattcaggggcatagccactgggaggagacttctatgagaaggatggaaacgatttcgcaacatattgcaaaaagggctcatcgcgaagtggattacctgttttgtctggacgtagacatggtgttccggaacccgtgggggccagaaacactcggcgatctcgtggccgcaatacacccctcatattatgctgtcccccgacagcagttcccctatgaacggagaagagtttccacagcatttgtggcagattccgagggcgacttttattatggcggagccgtcttcggagggcaggttgcgagagtctacgaattcaccaggggttgtcacatggcgatcctggctgataaggctaatggcatcatggctgcttggagagaggaatcacacttgaaccggcactttatctctaacaagccttccaaggtgttgtcgcctgagtacttgtgggatgatcgcaagcctcagcccccatccctgaaactgattcggtttagcacattagacaaagacattagctgtcttcgttcttag

SEQ ID NO: 101997 - DNA, 219 bp, Artificial Sequence
  derived and/or modified sequence
atgcacagaagaagactggccctgggcctgggcttctgcctgctggccggcaccagcctgagcgtgctgtgggtgtacctggagaactggctgcccgtgagctacgtgccctactacctgccctgccccgagatcctgctggagtacagaggcgtgatcagcgcccactgcaacctgcacctgcccggcagcagcaactgccacgccagcgccacctag

SEQ ID NO: 101998 - DNA, 993 bp, Artificial Sequence
  derived and/or modified sequence
atgcacagaagaagactggccctgggcctgggcttctgcctgctggccggcaccagcctgagcgtgctgtgggtgtacctggagaactggctgcccgtgagctacgtgccctactacctgccctgccccgagatcctgagccagtacccccagcccaagctgctggagcacagacccacccagctgctgaccctgaccccctggctggcccccatcgtgagcgagggcaccttcaaccccgagctgctgcagcacatctaccagcccctgaacctgaccatcggcgtgaccgtgttcgccgtgggcaagtacacccacttcatccagagcttcctggagagcgccgaggagttcttcatgagaggctacagagtgcactactacatcttcaccgacaaccccgccgccgtgcccggcgtgcccctgggcccccacagactgctgagcagcatccccatccagggccacagccactgggaggagaccagcatgagaagaatggagaccatcagccagcacatcgccaagagagcccacagagaggtggactacctgttctgcctggacgtggacatggtgttcagaaacccctggggccccgagaccctgggcgacctggtggccgccatccaccccagctactacgccgtgcccagacagcagttcccctacgagagaagaagagtgagcaccgccttcgtggccgacagcgagggcgacttctactacggcggcgccgtgttcggcggccaggtggccagagtgtacgagttcaccagaggctgccacatggccatcctggccgacaaggccaacggcatcatggccgcctggagagaggagagccacctgaacagacacttcatcagcaacaagcccagcaaggtgctgagccccgagtacctgtgggacgacagaaagccccagccccccagcctgaagctgatcagattcagcaccctggacaaggacatcagctgcctgagaagctag

SEQ ID NO: 101999 - protein, 757 aa, Artificial Sequence
  derived and/or modified sequence
MGRGPWDAGPSRRLLPLLLLLGLARGAAGAPGPDGLDVCATCHEHATCQQREGKKICICNYGFVGNGRTQCVDKNECQFGATLVCGNHTSCHNTPGGFYCICLEGYRATNNNKTFIPNDGTFCTDIDECEVSGLCRHGGRCVNTHGSFECYCMDGYLPRNGPEPFHPTTDATSCTEIDCGTPPEVPDGYIIGNYTSSLGSQVRYACREGFFSVPEDTVSSCTGLGTWESPKLHCQEINCGNPPEMRHAILVGNHSSRLGGVARYVCQEGFESPGGKITSVCTEKGTWRESTLTCTEILTKINDVSLFNDTCVRWQINSRRINPKISYVISIKGQRLDPMESVREETVNLTTDSRTPEVCLALYPGTNYTVNISTAPPRRSMPAVIGFQTAEVDLLEDDGSFNISIFNETCLKLNRRSRKVGSEHMYQFTVLGQRWYLANFSHATSFNFTTREQVPVVCLDLYPTTDYTVNVTLLRSPKRHSVQITIATPPAVKQTISNISGFNETCLRWRSIKTADMEEMYLFHIWGQRWYQKEFAQEMTFNISSSSRDPEVCLDLRPGTNYNVSLRALSSELPVVISLTTQITEPPLPEVEFFTVHRGPLPRLRLRKAKEKNGPISSYQVLVLPLALQSTFSCDSEGASSFFSNASDADGYVAAELLAKDVPDDAMEIPIGDRLYYGEYYNAPLKRGSDYCIILRITSEWNKVRRHSCAVWAQVKEIPCNCNFLRLHIHRANSGDTQIRHSCCCRWRVLDWVPWLL

SEQ ID NO: 102000 - DNA, 2274 bp, Artificial Sequence
  derived and/or modified sequence
atgggcagaggcccctgggacgccggccccagcagaagactgctgcccctgctgctgctgctgggcctggccagaggcgccgccggcgcccccggccccgacggcctggacgtgtgcgccacctgccacgagcacgccacctgccagcagagagagggcaagaagatctgcatctgcaactacggcttcgtgggcaacggcagaacccagtgcgtggacaagaacgagtgccagttcggcgccaccctggtgtgcggcaaccacaccagctgccacaacacccccggcggcttctactgcatctgcctggagggctacagagccaccaacaacaacaagaccttcatccccaacgacggcaccttctgcaccgacatcgacgagtgcgaggtgagcggcctgtgcagacacggcggcagatgcgtgaacacccacggcagcttcgagtgctactgcatggacggctacctgcccagaaacggccccgagcccttccaccccaccaccgacgccaccagctgcaccgagatcgactgcggcaccccccccgaggtgcccgacggctacatcatcggcaactacaccagcagcctgggcagccaggtgagatacgcctgcagagagggcttcttcagcgtgcccgaggacaccgtgagcagctgcaccggcctgggcacctgggagagccccaagctgcactgccaggagatcaactgcggcaacccccccgagatgagacacgccatcctggtgggcaaccacagcagcagactgggcggcgtggccagatacgtgtgccaggagggcttcgagagccccggcggcaagatcaccagcgtgtgcaccgagaagggcacctggagagagagcaccctgacctgcaccgagatcctgaccaagatcaacgacgtgagcctgttcaacgacacctgcgtgagatggcagatcaacagcagaagaatcaaccccaagatcagctacgtgatcagcatcaagggccagagactggaccccatggagagcgtgagagaggagaccgtgaacctgaccaccgacagcagaacccccgaggtgtgcctggccctgtaccccggcaccaactacaccgtgaacatcagcaccgccccccccagaagaagcatgcccgccgtgatcggcttccagaccgccgaggtggacctgctggaggacgacggcagcttcaacatcagcatcttcaacgagacctgcctgaagctgaacagaagaagcagaaaggtgggcagcgagcacatgtaccagttcaccgtgctgggccagagatggtacctggccaacttcagccacgccaccagcttcaacttcaccaccagagagcaggtgcccgtggtgtgcctggacctgtaccccaccaccgactacaccgtgaacgtgaccctgctgagaagccccaagagacacagcgtgcagatcaccatcgccaccccccccgccgtgaagcagaccatcagcaacatcagcggcttcaacgagacctgcctgagatggagaagcatcaagaccgccgacatggaggagatgtacctgttccacatctggggccagagatggtaccagaaggagttcgcccaggagatgaccttcaacatcagcagcagcagcagagaccccgaggtgtgcctggacctgagacccggcaccaactacaacgtgagcctgagagccctgagcagcgagctgcccgtggtgatcagcctgaccacccagatcaccgagccccccctgcccgaggtggagttcttcaccgtgcacagaggccccctgcccagactgagactgagaaaggccaaggagaagaacggccccatcagcagctaccaggtgctggtgctgcccctggccctgcagagcaccttcagctgcgacagcgagggcgccagcagcttcttcagcaacgccagcgacgccgacggctacgtggccgccgagctgctggccaaggacgtgcccgacgacgccatggagatccccatcggcgacagactgtactacggcgagtactacaacgcccccctgaagagaggcagcgactactgcatcatcctgagaatcaccagcgagtggaacaaggtgagaagacacagctgcgccgtgtgggcccaggtgaaggagatcccctgcaactgcaacttcctgagactgcacatccacagagccaacagcggcgacacccagatcagacacagctgctgctgcagatggagagtgctggactgggtgccctggctgctgtag

SEQ ID NO: 102001 - DNA, 2274 bp, Artificial Sequence
  derived and/or modified sequence
atgggccgcggcccttgggacgcaggcccatccaggagattgcttccactgctcctactcctcggcttagctcggggggcggccggtgccccggggcccgacgggctggacgtttgcgccacatgtcacgagcatgccacatgccaacagcgggaggggaagaagatatgtatttgcaattatgggttcgtgggaaacggaagaacacagtgcgtggataaaaatgaatgtcagttcggtgctaccctcgtgtgtgggaaccatacttcttgccataacacccccggtggtttctattgcatctgtctggaaggataccgagcaaccaataataacaagacattcatcccgaatgatgggactttctgcaccgacattgacgagtgcgaagtgtctggactgtgccgacatggcggacggtgtgtaaacacccacggttccttcgagtgctactgcatggatggctatcttcccagaaatggacctgaacctttccaccctactacagacgcaacatcatgcacggaaatcgattgtggaactcccccagaagtgccagatgggtatattatcgggaactacacttcaagcttgggttctcaggtgaggtacgcttgcagggaaggattctttagcgttccagaagacacagtctcgagctgtactggactgggtacttgggagtcccctaaactccattgtcaagaaatcaattgcggcaaccctcccgagatgcgtcacgccatcctggttgggaatcattctagcagacttgggggagtggccaggtatgtgtgtcaggaaggcttcgagtcccccggggggaaaataacatcagtatgtactgagaaggggacctggagggagtcaactttgacttgtaccgagattctgacaaaaattaacgatgtaagtcttttcaacgacacctgtgtgaggtggcagatcaattcccgacgcattaaccccaagatcagctacgtcataagcatcaagggccaacggcttgatcccatggaaagcgtccgcgaggagaccgtaaacctcaccacagacagcaggacgccagaagtctgtctggcattgtatccaggcactaactacacagtcaatatctccacggcaccgccaagaaggagtatgcctgcggtcatcggcttccaaaccgccgaggttgacctgttggaagacgatggcagcttcaatatcagcatatttaatgagacgtgtcttaaactcaacagaaggtccaggaaagttgggagtgaacatatgtaccagtttacagtcctgggccaacgctggtacctggccaacttcagtcacgccacctcttttaattttaccaccagggagcaggtgcctgtggtttgtctcgatctgtatccgacgaccgattataccgttaatgttaccctgcttcgctccccgaagcgtcattccgtgcaaataacaatcgcgaccccccccgccgtgaagcaaacaattagtaacatttcaggttttaacgagacatgcctgcgttggcggagcatcaagacggctgatatggaagagatgtatttgttccacatctggggacagcgctggtatcagaaagagttcgcacaggagatgacatttaatattagcagctcaagccgcgaccctgaggtgtgtctcgacttacgccccggcacaaattacaatgtgtcattgagagccctctcatcagagctcccagtggtaattagccttaccactcaaattactgaacctccactgccagaggtggaatttttcaccgttcatcgaggccccctgcccagactgcgcctacgtaaggcaaaagagaaaaacggcccaatttcttcttatcaagttctggttctgcccctcgctctgcagtcaacattctcctgcgattcagagggcgctagctcttttttttctaacgcttcagacgcggacggatacgtcgccgccgaactccttgcgaaagacgtgccagacgacgctatggaaatccctattggagaccggctgtattatggagagtactataacgctccactcaaaagagggtccgattattgcattatcctccgaatcactagtgagtggaataaagtgcggcgccactcctgcgctgtgtgggcgcaggtaaaagagataccatgcaattgcaactttttgcgcctccacatccacagggctaactccggagacactcaaatccggcacagctgttgttgtagatggcgggtgctggactgggtaccctggcttttatag

SEQ ID NO: 102002 - DNA, 2274 bp, Artificial Sequence
  derived and/or modified sequence
atgggccggggcccctgggatgctggccccagccggcggctgctgcccctgctgctgctgctgggcctggcccggggagctgctggggcccctggcccagatggcctggatgtgtgtgccacctgccatgaacatgccacctgccagcagcgggagggcaagaagatctgcatctgcaactacggctttgtgggcaatggccgcacccagtgtgtggacaagaatgaatgccagtttggagccaccctggtgtgtggcaaccacaccagctgccacaacaccccaggcggcttctactgcatctgcctggagggctaccgggccaccaacaacaacaagaccttcatccccaatgatggcaccttctgcacagacattgatgaatgtgaggtgtctggcctgtgcagacatggaggccgctgtgtgaacacccacggcagctttgagtgctactgcatggatggctacctgcccagaaatggacctgagcccttccaccccaccacagatgccaccagctgcacagaaattgactgtggcaccccacctgaggtgcctgatggctacatcatcggcaactacaccagcagcctgggcagccaggtgcgctatgcctgccgggagggcttcttctctgtgcctgaagatactgtgagcagctgcaccggcctgggcacctgggagagccccaagctgcactgccaggagatcaactgtggcaaccccccagagatgagacatgccatcctggtgggcaaccacagcagccggctgggcggcgtggcccgctacgtgtgccaggagggctttgagagccctgggggcaagatcacctctgtgtgcacagagaagggcacctggagggagagcaccctgacctgcacagagatcctgaccaagatcaatgatgtgtccctcttcaatgacacctgtgtgcgctggcagatcaacagccgccgcatcaaccccaagatctcctatgtgatcagcatcaagggccagaggctggaccccatggagagcgtgcgggaggagaccgtgaacctgaccacagacagcaggaccccagaggtgtgcctggccctgtacccaggcaccaactacacagtgaacatcagcacagccccaccccggcgctccatgcctgctgtgattggcttccagacagctgaggtggacctgctggaggatgatggcagcttcaacatcagcatcttcaatgagacctgcctgaagctgaacagaagaagcaggaaggtgggcagcgagcacatgtaccagttcaccgtgctgggccagcgctggtacctggccaacttcagccacgccaccagcttcaacttcaccacccgggagcaggtgcctgtggtgtgcctggacctgtaccccaccacagactacacagtgaatgtgaccctgctgcggagccccaagaggcacagcgtgcagatcaccatcgccaccccacctgctgtgaagcagaccatcagcaacatcagcggcttcaatgagacctgcctgcgctggaggagcatcaagacagctgacatggaggagatgtacctgttccacatctggggccagcgctggtaccagaaggagtttgcccaggagatgaccttcaacatcagcagcagcagccgggaccctgaggtgtgcctggacctgcggcccggcaccaactacaacgtgtccctgcgggccctgagcagcgagctgcctgtggtgatcagcctgaccacccagatcacagagccccccctgcctgaggtggagttcttcaccgtgcaccggggccccctgccccggctgcggctgaggaaggccaaggagaagaatggccccatcagcagctaccaggtgctggtgctgcccctggccctgcagagcaccttcagctgtgacagcgagggcgccagcagcttcttcagcaatgccagtgatgctgatggctacgtggccgctgagctgctggccaaggatgtgcctgatgatgccatggagatccccatcggggaccggctgtactatggagagtactacaatgcccccctgaagaggggcagtgactactgcatcatcctgcgcatcaccagcgagtggaacaaggtgagaagacacagctgtgctgtgtgggcccaggtgaaggagatcccctgcaactgcaacttcctgcggctgcacatccaccgggccaacagcggggacacccagatccgccacagctgctgctgccgctggagggtgctggactgggtgccctggctgctgtag

SEQ ID NO: 102003 - DNA, 2274 bp, Artificial Sequence
  derived and/or modified sequence
atgggccggggcccctgggacgccggccccagccggcggctgctgcctctgctattgctgctcggacttgcacgtggcgctgccggcgccccagggcccgatggactcgatgtttgtgctacatgccacgaacacgccacatgccagcaaagggaaggcaaaaaaatatgcatctgtaactacggcttcgtggggaatggaagaacccagtgcgtggataaaaatgaatgccaatttggcgcaacgctcgtttgtggaaatcacacatcgtgccacaatacccccggagggttctattgcatctgcctcgaggggtatagagccacgaataacaacaagacatttattccaaatgatggtacgttctgtaccgacattgacgaatgcgaggtcagcggcctctgtcgacacggaggtcgttgcgtcaatacccacggttcttttgagtgctactgtatggatggctatctgcctcggaatggccctgaaccctttcatccaactaccgacgcaacaagctgcacggagattgattgcgggaccccgccggaggtccccgatggatatattatcggcaactacacctcctccctgggcagccaggtgcgctacgcatgccgagaagggtttttttcagttccagaggacaccgtcagctcttgcaccggtctggggacatgggagtccccaaaactccattgtcaggagattaattgcgggaacccccctgagatgaggcacgccatccttgtgggaaatcactctagtaggttggggggagtggcccgatacgtctgtcaggaggggtttgagagtcccggtggaaaaattacaagtgtgtgcaccgaaaaaggcacctggagagagtccactcttacttgcaccgagatcctgactaaaattaatgacgtgtctttatttaacgacacctgcgtgcggtggcagatcaactctagaaggataaaccctaagatctcctacgtaatatctataaagggccagcgcctagaccccatggaatctgtccgagaggagactgtaaacctgactacagattcacgaacccctgaggtctgcctcgctctttatcctggtactaactataccgtgaacatttcaaccgcccctccacgccgatcaatgcccgcggtcattggatttcagacggcggaggtggacttgctagaggacgatggttctttcaacatctctatcttcaacgagacatgcctgaaacttaaccgccggtctcgaaaggtgggttctgaacacatgtaccagttcaccgtccttggccagcggtggtacttggcaaacttttcacatgcaacgagctttaactttactacccgggaacaggtgcccgttgtttgcttggatctgtaccccacaacagactacacagtcaatgtaactctattaagatctccaaagagacattccgtgcagattactatcgccacgccacccgctgttaagcagacgatatccaacatcagcggctttaacgaaacgtgccttaggtggcggtccataaagaccgcggacatggaggaaatgtacctgttccacatctggggccagcgctggtaccagaaggagtttgctcaggagatgacatttaacatcagtagtagtagtagggatccagaagtctgtttggatctgcggcctgggacgaattacaatgtcagcctcagagccctgagtagcgagttacctgtggtgatttcgctgacaacccagattaccgaaccgcctttgccggaggtggagtttttcaccgtacaccgcggccccctgccccggcttcggctacgcaaagctaaggagaagaacgggcccataagtagctaccaggttctggtcttacccctcgcacttcagagtacattctcttgcgactctgagggggcctccagttttttctccaatgctagtgacgcggacggttacgtggcggccgagctgctggcaaaggatgtgccagacgacgccatggagattcctattggagaccgcctgtactacggggagtattacaacgctccgctgaagcgaggatccgattattgtattattctgaggattacttccgaatggaacaaggtgcgcagacacagctgtgccgtgtgggcccaggtgaaagaaattccttgcaactgcaatttcctgcgactgcacatacatcgagccaacagcggcgatacccagatccggcactcatgttgttgtagatggcgtgttctagattgggtgccatggctcctgtag

SEQ ID NO: 102004 - DNA, 2274 bp, Artificial Sequence
  derived and/or modified sequence
atggggagaggcccatgggatgctggtccctcacgacgcttgctaccacttctactcctgttagggctggcacggggagctgccggtgctccgggtccagacggtctggacgtgtgcgcaacatgtcatgaacacgccacctgccaacagcgagaaggaaaaaagatatgcatctgcaactacggattcgtgggaaatgggcgaactcagtgtgtggacaagaacgagtgccagtttggagccactcttgtttgtggaaatcacacttcatgccataatacacccggtggcttctactgcatctgtctggagggatatcgagccactaacaataataagacatttattcctaacgacggcacattctgcactgatattgacgagtgcgaggtctctggactttgtagacacggaggtaggtgcgtgaacactcatggtagtttcgaatgttactgtatggatggctatttacctcggaatggccctgagccatttcatcctacaaccgatgctacctcctgtactgaaatcgactgtgggacaccgcctgaggtccccgacggctatattatagggaattatacctcctccttggggagtcaagtccgctacgcctgtcgggagggctttttctccgttcccgaagacactgttagtagctgcacaggattaggcacctgggaaagcccgaagctgcactgtcaggaaattaactgtggcaatcctccagagatgcggcatgccatactggtcgggaatcattctagccgtctcgggggagtggcccgatatgtatgtcaagaagggtttgaaagccctggtgggaaaattacatcagtttgtaccgaaaaggggacttggagggaatctacacttacgtgcaccgagatccttaccaagatcaatgacgtgtctctgttcaatgatacttgcgtccgctggcaaattaacagtcgaagaatcaacccgaagatatcctacgtcattagtattaaaggacagcggctagaccccatggaaagcgtgcgagaggaaaccgtgaacttaaccaccgatagccgcactccagaggtgtgtttggccttatatccgggaaccaactacaccgtgaacatttcaaccgctccccctcgaaggagtatgcctgctgtcatcggtttccagaccgctgaggtggacctccttgaggacgacggaagtttcaacattagcatatttaatgagacatgcttgaaactgaaccgtcggagcagaaaggtggggtctgagcatatgtatcagttcacagtgttgggccagcggtggtaccttgctaacttttctcatgctacttcattcaatttcacaacgcgcgagcaggtgcctgtggtatgcctggacctgtatcccaccacagactacactgtcaacgtcacccttttgaggagccccaaaagacactccgtgcagataactatcgccaccccacctgcggttaaacagacgatatccaatatttctggatttaacgagacatgcctgcgttggcggagcataaagactgcggatatggaggaaatgtacttgttccacatctggggccaaaggtggtatcagaaggagttcgctcaggagatgaccttcaatattagtagctcctccagagatccagaagtgtgcctggatctgcgccctggcacaaattacaatgtttcattaagagctctttcgagtgagcttcctgtggtgatttcgttgacgacccaaattaccgaacctccgctgcccgaggtcgaattcttcaccgtgcatagaggccctctgcccaggcttagactacgtaaagcaaaggagaagaatgggccaatctcctcatatcaggtgctggtgctacctttagccttgcagagcaccttctcctgtgattcggagggtgcttcaagcttctttagcaacgcctccgatgccgacggctatgtagcagccgaactgttagctaaggacgtccctgatgacgccatggagatcccaatcggggaccgcctgtactatggcgagtactataatgctccattgaagcgcggtagcgactactgcattatactccgcatcacctccgaatggaacaaggtgcggagacatagctgtgcagtgtgggctcaggtcaaggagattccctgtaattgtaacttcctacgtcttcacatacatcgggctaatagcggtgacactcagatacgccactcttgctgctgcaggtggagagtgcttgattgggtgccttggctcttgtag

SEQ ID NO: 102005 - DNA, 2754 bp, Artificial Sequence
  derived and/or modified sequence
gcgcgggcgcgccgggagggaccggcggcggcatgggccgggggccctgggatgcgggcccgtctcgccgcctgctgccgctgttgctgctgctcggcctggcccgcggcgccgcgggagcgccgggccccgacggtttagacgtctgtgccacttgccatgaacatgccacatgccagcaaagagaagggaagaagatctgtatttgcaactatggatttgtagggaacgggaggactcagtgtgttgataaaaatgagtgccagtttggagccactcttgtctgtgggaaccacacatcttgccacaacacccccgggggcttctattgcatttgcctggaaggatatcgagccacaaacaacaacaagacattcattcccaacgatggcaccttttgtacagacatagatgagtgtgaagtttctggcctgtgcaggcatggagggcgatgcgtgaacactcatgggagctttgaatgctactgtatggatggatacttgccaaggaatggacctgaacctttccacccgaccaccgatgccacatcatgcacagaaatagactgtggtacccctcctgaggttccagatggctatatcataggaaattatacgtctagtctgggcagccaggttcgttatgcttgcagagaaggattcttcagtgttccagaagatacagtttcaagctgcacaggcctgggcacatgggagtccccaaaattacattgccaagagatcaactgtggcaaccctccagaaatgcggcacgccatcttggtaggaaatcacagctccaggctgggcggtgtggctcgctatgtctgtcaagagggctttgagagccctggaggaaagatcacttctgtttgcacagagaaaggcacctggagagaaagtactttaacatgcacagaaattctgacaaagattaatgatgtatcactgtttaatgatacctgtgtgagatggcaaataaactcaagaagaataaaccccaagatctcatatgtgatatccataaaaggacaacggttggaccctatggaatcagttcgtgaggagacagtcaacttgaccacagacagcaggaccccagaagtgtgcctagccctgtacccaggcaccaactacaccgtgaacatctccacagcacctcccaggcgctcgatgccagccgtcatcggtttccagacagctgaagttgatctcttagaagatgatggaagtttcaatatttcaatatttaatgaaacttgtttgaaattgaacaggcgttctaggaaagttggatcagaacacatgtaccaatttaccgttctgggtcagaggtggtatctggctaacttttctcatgcaacatcgtttaacttcacaacgagggaacaagtgcctgtagtgtgtttggatctgtaccctacgactgattatacggtgaatgtgaccctgctgagatctcctaagcggcactcagtgcaaataacaatagcaactcccccagcagtaaaacagaccatcagtaacatttcaggatttaatgaaacctgcttgagatggagaagcatcaagacagctgatatggaggagatgtatttattccacatttggggccagagatggtatcagaaggaatttgcccaggaaatgacctttaatatcagtagcagcagccgagatcccgaggtgtgcttggacctacgtccgggtaccaactacaatgtcagtctccgggctctgtcttcggaacttcctgtggtcatctccctgacaacccagataacagagcctcccctcccggaagtagaattttttacggtgcacagaggacctctaccacgcctcagactgaggaaagccaaggagaaaaatggaccaatcagttcatatcaggtgttagtgcttcccctggccctccaaagcacattttcttgtgattctgaaggcgcttcctccttctttagcaacgcctctgatgctgatggatacgtggctgcagaactactggccaaagatgttccagatgatgccatggagatacctataggagacaggctgtactatggggaatattataatgcacccttgaaaagagggagtgattactgcattatattacgaatcacaagtgaatggaataaggtgagaagacactcctgtgcagtttgggctcaggtgaaagaaataccttgtaactgtaatttcctgaggctgcatatccacagggccaactcaggggacacacagattcgtcactcatgctgctgcagatggcgggtgttggactgggttccctggctgttgtgatcattctcacattcctctccttctcagcggtgtgatggcagatggacactgagtggggaggatgcactgctgctgggcaggtgttctggcagcttctcaggtgcccgcacagaggctccgtgtgacttccgtccagggagcatgtgggcctgcaactttctccattcccagctgggccccattcctggatttaagatggtggctatccctgaggagtcaccataaggagaaaactcaggaattctgagtcttccctgctacaggaccagttctgtgcaatgaacttgagactcctgatgtacactgtgatattgaccgaaggctacatacagatctgtgaatcttggctgggacttcctctgagtgatgcctgagggtcagctcctctagacattgactgcaagagaatctctgcaacctcctatataaaagcatttctgttaattca

SEQ ID NO: 102006 - protein, 722 aa, Artificial Sequence
  derived and/or modified sequence
MGRGPWDAGPSRRLLPLLLLLGLARGAAGAPGPDGLDVCATCHEHATCQQREGKKICICNYGFVGNGRTQCVDKNECQFGATLVCGNHTSCHNTPGGFYCICLEGYRATNNNKTFIPNDGTFCTDIDECEVSGLCRHGGRCVNTHGSFECYCMDGYLPRNGPEPFHPTTDATSCTEIDCGTPPEVPDGYIIGNYTSSLGSQVRYACREGFFSVPEDTVSSCTGLGTWESPKLHCQEINCGNPPEMRHAILVGNHSSRLGGVARYVCQEGFESPGGKITSVCTEKGTWRESTLTCTEILTKINDVSLFNDTCVRWQINSRRINPKISYVISIKGQRLDPMESVREETVNLTTDSRTPEVCLALYPGTNYTVNISTAPPRRSMPAVIGFQTAEVDLLEDDGSFNISIFNETCLKLNRRSRKVGSEHMYQFTVLGQRWYLANFSHATSFNFTTREQVPVVCLDLYPTTDYTVNVTLLRSPKRHSVQITIATPPAVKQTISNISGFNETCLRWRSIKTADMEEMYLFHIWGQRWYQKEFAQEMTFNISSSSRDPEVCLDLRPGTNYNVSLRALSSELPVVISLTTQITEPPLPEVEFFTVHRGPLPRLRLRKAKEKNGPISSYQVLVLPLALQSTFSCDSEGASSFFSNASDADGYVAAELLAKDVPDDAMEIPIGDRLYYGEYYNAPLKRGSDYCIILRITSEWNKIRHSCCCRWRVLDWVPWLL

SEQ ID NO: 102007 - DNA, 2169 bp, Artificial Sequence
  derived and/or modified sequence
atgggcagaggcccctgggacgccggccccagcagaagactgctgcccctgctgctgctgctgggcctggccagaggcgccgccggcgcccccggccccgacggcctggacgtgtgcgccacctgccacgagcacgccacctgccagcagagagagggcaagaagatctgcatctgcaactacggcttcgtgggcaacggcagaacccagtgcgtggacaagaacgagtgccagttcggcgccaccctggtgtgcggcaaccacaccagctgccacaacacccccggcggcttctactgcatctgcctggagggctacagagccaccaacaacaacaagaccttcatccccaacgacggcaccttctgcaccgacatcgacgagtgcgaggtgagcggcctgtgcagacacggcggcagatgcgtgaacacccacggcagcttcgagtgctactgcatggacggctacctgcccagaaacggccccgagcccttccaccccaccaccgacgccaccagctgcaccgagatcgactgcggcaccccccccgaggtgcccgacggctacatcatcggcaactacaccagcagcctgggcagccaggtgagatacgcctgcagagagggcttcttcagcgtgcccgaggacaccgtgagcagctgcaccggcctgggcacctgggagagccccaagctgcactgccaggagatcaactgcggcaacccccccgagatgagacacgccatcctggtgggcaaccacagcagcagactgggcggcgtggccagatacgtgtgccaggagggcttcgagagccccggcggcaagatcaccagcgtgtgcaccgagaagggcacctggagagagagcaccctgacctgcaccgagatcctgaccaagatcaacgacgtgagcctgttcaacgacacctgcgtgagatggcagatcaacagcagaagaatcaaccccaagatcagctacgtgatcagcatcaagggccagagactggaccccatggagagcgtgagagaggagaccgtgaacctgaccaccgacagcagaacccccgaggtgtgcctggccctgtaccccggcaccaactacaccgtgaacatcagcaccgccccccccagaagaagcatgcccgccgtgatcggcttccagaccgccgaggtggacctgctggaggacgacggcagcttcaacatcagcatcttcaacgagacctgcctgaagctgaacagaagaagcagaaaggtgggcagcgagcacatgtaccagttcaccgtgctgggccagagatggtacctggccaacttcagccacgccaccagcttcaacttcaccaccagagagcaggtgcccgtggtgtgcctggacctgtaccccaccaccgactacaccgtgaacgtgaccctgctgagaagccccaagagacacagcgtgcagatcaccatcgccaccccccccgccgtgaagcagaccatcagcaacatcagcggcttcaacgagacctgcctgagatggagaagcatcaagaccgccgacatggaggagatgtacctgttccacatctggggccagagatggtaccagaaggagttcgcccaggagatgaccttcaacatcagcagcagcagcagagaccccgaggtgtgcctggacctgagacccggcaccaactacaacgtgagcctgagagccctgagcagcgagctgcccgtggtgatcagcctgaccacccagatcaccgagccccccctgcccgaggtggagttcttcaccgtgcacagaggccccctgcccagactgagactgagaaaggccaaggagaagaacggccccatcagcagctaccaggtgctggtgctgcccctggccctgcagagcaccttcagctgcgacagcgagggcgccagcagcttcttcagcaacgccagcgacgccgacggctacgtggccgccgagctgctggccaaggacgtgcccgacgacgccatggagatccccatcggcgacagactgtactacggcgagtactacaacgcccccctgaagagaggcagcgactactgcatcatcctgagaatcaccagcgagtggaacaagatcagacacagctgctgctgcagatggagagtgctggactgggtgccctggctgctgtag

SEQ ID NO: 102008 - DNA, 2169 bp, Artificial Sequence
  derived and/or modified sequence
atgggaaggggaccctgggacgccggcccatcacgccggctgttgccactgctgctccttctcggtttagcaaggggtgcagctggagcccccgggcccgatgggctggacgtttgcgctacgtgtcacgagcatgctacctgtcagcagcgcgaaggcaagaaaatttgcatctgcaattacggtttcgttgggaatgggaggactcagtgtgtagacaaaaacgaatgtcagttcggagcaacattagtctgtggcaatcataccagctgccacaatactcccggggggttttactgcatttgtctcgaagggtatcgagctaccaacaacaataaaacctttatccccaacgacgggaccttttgtactgacatagatgagtgtgaggtgagcgggctgtgccggcatggaggacggtgcgtgaacacacatggctcttttgaatgttactgcatggacgggtatctcccacgtaacggccctgagccttttcacccaaccactgacgccaccagttgcacagaaattgattgcggcaccccacccgaggtacccgatggctatatcattggcaattacacgtctagtctcggcagtcaggttaggtacgcgtgcagagaagggtttttctccgtccctgaggataccgtcagctcctgtactgggttgggtacctgggagtcacccaagctccattgccaggaaattaattgcggtaaccctcctgagatgcggcacgcgattctggtgggtaatcactctagtcggctgggcggagtggcacgatacgtgtgtcaggagggcttcgaaagtcccggaggaaaaataacctctgtctgtaccgagaagggaacatggcgcgagtcgacactgacatgtactgaaatcttgactaaaattaacgacgtatctttatttaacgacacatgcgtccgctggcagatcaacagccggcgtatcaacccaaaaatatcatacgtgatttctattaagggccagagactcgatcccatggaaagtgtcagggaggaaacagtcaacctgaccaccgactccaggacccccgaggtgtgtctcgctttatacccaggaactaattacacagtcaacatctccactgccccacctcgaagatctatgcccgcggtcattggatttcagacagctgaggtggacctgctagaggacgacggaagctttaacatcagcattttcaacgagacatgtcttaagcttaataggcgctcccgcaaagtgggcagcgagcacatgtatcagtttaccgtcctcggacaacgttggtatcttgctaacttcagtcacgcgacatcgtttaatttcactacccgggaacaggtccctgtggtttgcttagacctgtatcctacaacagactacacggtaaacgtgactctgcttcgaagccccaagagacatagtgtgcagattaccatagccactccgccggctgtgaagcaaactatctcgaacatcagcgggtttaacgaaacctgcctacggtggagatccatcaagacggctgacatggaagaaatgtacctgtttcatatttgggggcagagatggtaccagaaggagtttgctcaagaaatgacattcaatatcagcagcagttcacgggatcccgaggtgtgcctggatctgcgccccggcacaaattataacgtgagcttaagagccctttcgtcggaattgccagtggtcatctccctaacaacccagataacagaaccaccgctgcccgaagtcgagttctttaccgtgcatcggggaccactaccccggttgaggctccggaaggcaaaggaaaaaaatggacccattagctcttatcaggttttggtcttacccctggctcttcagagcacattctcatgtgactctgaaggcgcctcttcttttttttcaaatgccagtgatgccgacggctacgtggccgccgagttgctcgcgaaggacgtgcctgacgatgccatggaaattcccattggagaccgcctgtactatggggaatattacaacgcccccctgaaaagagggtccgactattgcatcattctgcggataacatccgaatggaacaagatcaggcacagttgttgctgcaggtggagagtgctggactgggtaccttggctcctgtag

SEQ ID NO: 102009 - DNA, 2169 bp, Artificial Sequence
  derived and/or modified sequence
atgggccggggcccctgggatgctggccccagccggcggctgctgcccctgctgctgctgctgggcctggcccggggagctgctggggcccctggcccagatggcctggatgtgtgtgccacctgccatgaacatgccacctgccagcagcgggagggcaagaagatctgcatctgcaactacggctttgtgggcaatggccgcacccagtgtgtggacaagaatgaatgccagtttggagccaccctggtgtgtggcaaccacaccagctgccacaacaccccaggcggcttctactgcatctgcctggagggctaccgggccaccaacaacaacaagaccttcatccccaatgatggcaccttctgcacagacattgatgaatgtgaggtgtctggcctgtgcagacatggaggccgctgtgtgaacacccacggcagctttgagtgctactgcatggatggctacctgcccagaaatggacctgagcccttccaccccaccacagatgccaccagctgcacagaaattgactgtggcaccccacctgaggtgcctgatggctacatcatcggcaactacaccagcagcctgggcagccaggtgcgctatgcctgccgggagggcttcttctctgtgcctgaagatactgtgagcagctgcaccggcctgggcacctgggagagccccaagctgcactgccaggagatcaactgtggcaaccccccagagatgagacatgccatcctggtgggcaaccacagcagccggctgggcggcgtggcccgctacgtgtgccaggagggctttgagagccctgggggcaagatcacctctgtgtgcacagagaagggcacctggagggagagcaccctgacctgcacagagatcctgaccaagatcaatgatgtgtccctcttcaatgacacctgtgtgcgctggcagatcaacagccgccgcatcaaccccaagatctcctatgtgatcagcatcaagggccagaggctggaccccatggagagcgtgcgggaggagaccgtgaacctgaccacagacagcaggaccccagaggtgtgcctggccctgtacccaggcaccaactacacagtgaacatcagcacagccccaccccggcgctccatgcctgctgtgattggcttccagacagctgaggtggacctgctggaggatgatggcagcttcaacatcagcatcttcaatgagacctgcctgaagctgaacagaagaagcaggaaggtgggcagcgagcacatgtaccagttcaccgtgctgggccagcgctggtacctggccaacttcagccacgccaccagcttcaacttcaccacccgggagcaggtgcctgtggtgtgcctggacctgtaccccaccacagactacacagtgaatgtgaccctgctgcggagccccaagaggcacagcgtgcagatcaccatcgccaccccacctgctgtgaagcagaccatcagcaacatcagcggcttcaatgagacctgcctgcgctggaggagcatcaagacagctgacatggaggagatgtacctgttccacatctggggccagcgctggtaccagaaggagtttgcccaggagatgaccttcaacatcagcagcagcagccgggaccctgaggtgtgcctggacctgcggcccggcaccaactacaacgtgtccctgcgggccctgagcagcgagctgcctgtggtgatcagcctgaccacccagatcacagagccccccctgcctgaggtggagttcttcaccgtgcaccggggccccctgccccggctgcggctgaggaaggccaaggagaagaatggccccatcagcagctaccaggtgctggtgctgcccctggccctgcagagcaccttcagctgtgacagcgagggcgccagcagcttcttcagcaatgccagtgatgctgatggctacgtggccgctgagctgctggccaaggatgtgcctgatgatgccatggagatccccatcggggaccggctgtactatggagagtactacaatgcccccctgaagaggggcagtgactactgcatcatcctgcgcatcaccagcgagtggaacaagatccgccacagctgctgctgccgctggagggtgctggactgggtgccctggctgctgtag

SEQ ID NO: 102010 - DNA, 2169 bp, Artificial Sequence
  derived and/or modified sequence
atgggccggggcccctgggacgccggccccagccggcggctgctgccattgctgcttctgttaggattggcaagaggcgccgcgggggcaccggggcccgacgggctggatgtgtgcgcaacgtgtcatgaacacgccacttgccaacaaagagaagggaaaaagatttgtatttgtaactatggctttgtgggcaatggacgaacacaatgcgtggataagaacgagtgtcagttcggtgcaaccttagtgtgcggcaaccatacctcgtgccacaatactccgggaggtttttactgtatctgtctggagggatatagagccactaacaataataagacattcattcctaacgacggcacgttctgtactgatatagacgagtgtgaggtaagcggcttgtgccgtcacggcggtagatgtgtgaatacacatggcagcttcgagtgctactgcatggatgggtatctgcccaggaatgggccggaaccattccaccctactacagacgcaacttcctgtacagagatcgattgtgggacacccccagaagtgcccgacgggtacatcatcggtaattacactagctctttggggtcacaggtgaggtacgcctgccgtgagggatttttcagcgtccccgaagacactgtgtcgtcctgtaccggccttgggacgtgggaatctccaaaactccactgccaggagatcaattgcggaaacccccccgagatgcggcatgctattctggtgggaaaccactcctctcggctggggggagtggcgcgctacgtgtgccaggaaggttttgagtctcctggaggcaaaattacctccgtgtgcaccgaaaagggtacatggcgcgagagtacactgacctgcacagagatactgactaagattaacgatgtgtcgttgtttaatgatacctgtgttaggtggcagatcaattccagaagaattaacccaaagatttcttatgtgatctctatcaaagggcaacggctggatccaatggaatcagtgcgcgaggagacagtaaacctaaccacagattcacgaacccccgaggtctgccttgcactttatccaggtactaactatacagtgaatattagtactgcgcctccacgcagaagcatgcccgccgtgattgggttccagacggctgaagtggacttactggaggatgacggcagttttaatatctccatctttaatgaaacttgcctgaaactcaaccgtcggagtcgaaaggtgggatctgagcacatgtaccagttcaccgtgctgggccaacgctggtatctggctaacttcagtcacgccacgagttttaattttacgactcgagagcaggtgccagtggtatgcctggacttatatcctactaccgactacacggtgaatgtaactctccttcggagcccaaagcgccacagcgtgcaaataactattgccactcctcctgccgtgaaacaaacaatcagcaatatcagcggcttcaatgaaacctgcctaagatggcgctccattaaaacggctgacatggaagaaatgtacttgtttcacatttggggccagagatggtaccaaaaggaattcgcacaggagatgacctttaatatctccagtagctccagagatcctgaagtttgtttggatctgcgccctgggacaaattacaatgtgagcctgcgggccctgtctagtgagctccctgtggtgatttctcttacaacccaaattacggagccgcccctcccagaggttgaattctttactgtacatcgcggtccactgcctaggctgcgtctcaggaaggcaaaggagaaaaatggcccaattagttcttaccaagtcctggtgctgcccctcgccttgcaatctacattcagttgcgactccgagggggcctccagctttttctccaatgcatcagatgccgatgggtacgtagcagccgaactgctcgcgaaagatgttccagatgacgcgatggagatcccaattggggatcgtctatactacggagagtactacaacgctcctttgaaacggggctcagattactgcattatccttagaattacttcagagtggaataagatcaggcattcatgttgctgcaggtggagggtcctcgactgggtcccgtggctcctctag

SEQ ID NO: 102011 - DNA, 2169 bp, Artificial Sequence
  derived and/or modified sequence
atgggcagaggtccctgggacgcagggccttcccggcgtctcctgcccctactcctccttcttgggttagcacgaggagccgcaggcgctccaggaccagatggtttagatgtatgtgctacctgtcacgagcatgccacctgtcagcagcgcgaaggtaagaagatttgtatctgtaattacggctttgtaggtaatggacggacgcagtgcgttgacaagaacgagtgccagtttggcgcaacattagtctgcgggaatcacacatcatgtcacaacacgccagggggtttctactgcatatgcctggaaggataccgggctaccaacaacaataagacgttcatccctaacgatggcacattctgtaccgatatagatgagtgcgaggtgagcgggctgtgcaggcacggtgggagatgtgtgaatacacatgggtctttcgagtgttattgtatggacggttacctgccaaggaacggccctgagccctttcatccaaccaccgatgccacatcttgtaccgagatcgattgcggcaccccccctgaggtgcccgacggctatattattggtaattatacctcctcactggggtcacaagtgcgttatgcctgccgggagggcttcttttctgtgcctgaggacacagtcagttcatgtacagggctcggaacttgggaatctccgaaactccactgccaggagattaactgtggcaaccctccagaaatgaggcacgccatactggtcgggaatcactcctccagactcggaggcgttgccaggtatgtgtgccaggaaggcttcgaatcacccggagggaagattacatcagtatgtacagagaagggaacttggcgagagagtacgctcacatgtacagaaattcttaccaaaataaatgacgtttccctctttaacgacacctgtgtgcggtggcagatcaattccaggcgcataaatccaaaaatttcttatgttatcagcattaaaggccaacgtctcgacccaatggagtccgtaagggaagaaacagtgaatctgacaacggatagtaggactcccgaagtgtgcttggctctctatcccggaactaactacacggtgaatatttctaccgctccacctcgcaggtccatgccagccgtgatcggatttcagactgccgaggtggacctgctggaggacgatggatctttcaacatctccatcttcaacgagacctgcctgaagctgaataggagaagcagaaaagttggaagcgagcacatgtaccagttcactgtcctaggtcagagatggtacctcgctaatttcagtcatgctacgtcttttaattttaccacaagagagcaagtccctgtcgtctgtctggatctctatccaacgacagattacacagtgaacgtgaccctcttgagatcacctaaaagacattccgttcagatcaccatcgcaactccgcctgccgtgaagcagaccatctcaaacatttcaggttttaacgagacttgcctgcggtggcggagtatcaagaccgccgacatggaggagatgtatctgttccatatctgggggcagcggtggtaccagaaggagttcgcccaggagatgacattcaacattagttcaagttcacgcgatccggaggtctgtctcgacctgcgaccgggaacaaactacaatgtcagtctgagagcccttagctccgagctgcccgttgtaatcagcctcaccactcagatcaccgaacctcccctgcctgaagtagaattttttacagtacaccggggacctctgcctcggttgcgactgcgcaaggccaaagaaaagaacggaccgatttcaagttatcaggtgctggtgctcccattagccctacaatctaccttctcatgcgattccgagggcgcatcaagcttcttcagtaatgccagtgacgcggacgggtatgtcgctgcggagctgttggctaaggatgtgcccgatgacgcaatggagattcccatcggggaccgcttgtactacggcgaatactacaatgccccacttaagcgcggaagtgattactgcattattttacgtattacatccgaatggaacaagatccgacacagttgttgctgtagatggagggtgcttgattgggtgccctggctactctag

SEQ ID NO: 102012 - DNA, 2952 bp, Artificial Sequence
  derived and/or modified sequence
cgggaggaggcgcgggcgcgccgggagggaccggcggcggcatgggccgggggccctgggatgcgggcccgtctcgccgcctgctgccgctgttgctgctgctcggcctggcccgcggcgccgcgggagcgccgggccccgacggtttagacgtctgtgccacttgccatgaacatgccacatgccagcaaagagaagggaagaagatctgtatttgcaactatggatttgtagggaacgggaggactcagtgtgttgataaaaatgagtgccagtttggagccactcttgtctgtgggaaccacacatcttgccacaacacccccgggggcttctattgcatttgcctggaaggatatcgagccacaaacaacaacaagacattcattcccaacgatggcaccttttgtacagacatagatgagtgtgaagtttctggcctgtgcaggcatggagggcgatgcgtgaacactcatgggagctttgaatgctactgtatggatggatacttgccaaggaatggacctgaacctttccacccgaccaccgatgccacatcatgcacagaaatagactgtggtacccctcctgaggttccagatggctatatcataggaaattatacgtctagtctgggcagccaggttcgttatgcttgcagagaaggattcttcagtgttccagaagatacagtttcaagctgcacaggcctgggcacatgggagtccccaaaattacattgccaagagatcaactgtggcaaccctccagaaatgcggcacgccatcttggtaggaaatcacagctccaggctgggcggtgtggctcgctatgtctgtcaagagggctttgagagccctggaggaaagatcacttctgtttgcacagagaaaggcacctggagagaaagtactttaacatgcacagaaattctgacaaagattaatgatgtatcactgtttaatgatacctgtgtgagatggcaaataaactcaagaagaataaaccccaagatctcatatgtgatatccataaaaggacaacggttggaccctatggaatcagttcgtgaggagacagtcaacttgaccacagacagcaggaccccagaagtgtgcctagccctgtacccaggcaccaactacaccgtgaacatctccacagcacctcccaggcgctcgatgccagccgtcatcggtttccagacagctgaagttgatctcttagaagatgatggaagtttcaatatttcaatatttaatgaaacttgtttgaaattgaacaggcgttctaggaaagttggatcagaacacatgtaccaatttaccgttctgggtcagaggtggtatctggctaacttttctcatgcaacatcgtttaacttcacaacgagggaacaagtgcctgtagtgtgtttggatctgtaccctacgactgattatacggtgaatgtgaccctgctgagatctcctaagcggcactcagtgcaaataacaatagcaactcccccagcagtaaaacagaccatcagtaacatttcaggatttaatgaaacctgcttgagatggagaagcatcaagacagctgatatggaggagatgtatttattccacatttggggccagagatggtatcagaaggaatttgcccaggaaatgacctttaatatcagtagcagcagccgagatcccgaggtgtgcttggacctacgtccgggtaccaactacaatgtcagtctccgggctctgtcttcggaacttcctgtggtcatctccctgacaacccagataacagagcctcccctcccggaagtagaattttttacggtgcacagaggacctctaccacgcctcagactgaggaaagccaaggagaaaaatggaccaatcagttcatatcaggtgttagtgcttcccctggccctccaaagcacattttcttgtgattctgaaggcgcttcctccttctttagcaacgcctctgatgctgatggatacgtggctgcagaactactggccaaagatgttccagatgatgccatggagatacctataggagacaggctgtactatggggaatattataatgcacccttgaaaagagggagtgattactgcattatattacgaatcacaagtgaatggaataagattcgtcactcatgctgctgcagatggcgggtgttggactgggttccctggctgttgtgatcattctcacattcctctccttctcagcggtgtgatggcagatggacactgagtggggaggatgcactgctgctgggcaggtgttctggcagcttctcaggtgcccgcacagaggctccgtgtgacttccgtccagggagcatgtgggcctgcaactttctccattcccagctgggccccattcctggatttaagatggtggctatccctgaggagtcaccataaggagaaaactcaggaattctgagtcttccctgctacaggaccagttctgtgcaatgaacttgagactcctgatgtacactgtgatattgaccgaaggctacatacagatctgtgaatcttggctgggacttcctctgagtgatgcctgagggtcagctcctctagacattgactgcaagagaatctctgcaacctcctatataaaagcatttctgttaattcattcagaatccattctttacaatatgcagtgagatgggcttaagtttgggctagagtttgactttatgaaggaggtcattgaaaaagagaacagtgacgtaggcaaatgtttcaagcactttagaaacagtacttttcctataattagttgatatactaatgagaaaatatactagcctggccatgccaataagtttcctgctgtgtctgttaggcagcattgctttgatgcaatttctattgtcctatatattcaaaagtaatgtctacattccagtaaaaatatcccgtaatt

SEQ ID NO: 102013 - protein, 479 aa, Artificial Sequence
  derived and/or modified sequence
  misc_feature (1)..(1): Xaa can be any naturally occurring amino acid
XLSLLPCLLFLPTIIPKKIVIQRDSLPSKKLSYGLIACGMNVHHRCQTKVANLCGINQKLMAEALAMIESTQQARCLRDTEQIFREGPVEIGLPCSIKNEARPPCLPTPGKREPQGISWESPLDEVDKMCHLPEPELNKERPSLQIKLKIEDFILHKMLGKGSFGKVFLAEFKKTNQFFAIKALKKDVVLMDDDVECTMVEKRVLSLAWEHPFLTHMFCTFQTKENLFFVMEYLNGGDLMYHIQSCHKFDLSRATFYAAEIILGLQFLHSKGIVYRDLKLDNILLDKDGHIKIADFGMCKENMLGDAKTNTFCGTPDYIAPEILLGQKYNHSVDWWSFGVLLYEMLIGQSPFHGQDEEELFHSIRMDNPFYPRWLEKEAKDLLVKLFVREPEKRLGVRGDIRQHPLFREINWEELERKEIDPPFRPKVKSPFDCSNFDKEFLNEKPRLSFADRALINSMDQNMFRNFSFMNPGMERLIS

SEQ ID NO: 102014 - DNA, 1440 bp, Artificial Sequence
  derived and/or modified sequence
tgactgagcttgctgccttgtctgttattcctgcctacgataatccctaaaaagattgtgattcaaagagattctctgccgagcaagaagttgtcgtatggactgattgcctgcgggatgaacgtccatcacaggtgtcagactaaggtggccaacctgtgtggcatcaatcaaaaactgatggctgaagcactcgccatgattgagagcactcaacaagcacgctgtctcagggatacggagcagatatttcgagaaggacccgtggagataggactgccgtgctccatcaagaatgaggctcgcccaccctgcttgcctactcctggcaagcgcgagccacaagggatcagttgggaatctccgttggatgaggtggacaaaatgtgccatcttcccgagcctgagctcaataaagagaggccttccctccagattaaattgaaaatcgaagacttcatcctgcacaagatgctgggaaaagggagcttcggaaaagttttcctggctgagtttaagaagaccaaccagttctttgccatcaaggccctgaaaaaggacgttgttctcatggatgatgatgtagaatgcactatggtggagaagagggtgctctcactagcttgggagcatcccttcttaactcatatgttctgtactttccagactaaagaaaacctattcttcgttatggagtaccttaatggtggcgacctgatgtatcacatccaatcctgccacaaatttgatcttagcagagccactttctatgccgccgaaattatccttggcctgcaatttctgcactccaaagggattgtatatagggatctgaagctcgataacatcctgcttgacaaggacggtcacattaaaatcgccgattttgggatgtgtaaagagaacatgctgggtgacgccaagaccaacaccttttgtggtacacccgactacatcgcccccgaaatcttgctcggccagaagtacaatcactcagtggattggtggagcttcggcgtccttctgtatgagatgctgatcggtcagtcaccttttcacggccaggatgaggaagaactgtttcattccattcggatggataacccattctacccaagatggctcgaaaaagaggctaaagatctccttgttaagctattcgtgcgtgagccggagaaacgcttaggcgtccggggagacatccgacagcaccctctattcagagaaattaattgggaagagttggagcggaaagaaattgaccctcccttccggccgaaagtgaagtcacccttcgattgcagtaatttcgacaaggaatttctgaacgaaaagccccgcctgtccttcgccgatcgggcgctgataaatagtatggaccagaacatgtttaggaatttttcctttatgaaccctggcatggaacggctgatctcctag

SEQ ID NO: 102015 - DNA, 1746 bp, Artificial Sequence
  derived and/or modified sequence
atggataccaaggacatgaatgagttcgagactgagggtttcttcgcccttcatcaacgccgaggcgcaataaaacaagctaaagtgcaccatgttaaatgccatgaatttacagcaaccttttttcctcaaccaactttttgtagcgtgtgccatgaatttgtctggggcctgaataagcaaggctaccagtgcaggcaatgcaatgccgctatccataaaaagtgtatcgacaaggtgatagctaagtgtactggctcagcaatcaactctcgagagaccatgttccacaaagagcggtttaaaatcgacatgccgcaccggtttaaggtgtacaactacaaaagtcccaccttctgcgaacactgtgggaccctattatggggattggccaggcagggcctaaagtgtgatgcttgcgggatgaacgtgcatcatcgttgccagactaaggtcgctaacctctgtgggattaaccaaaaactgatggccgaggctttggccatgatagagagtacccagcaggcccgctgtctcagagacacagaacagatatttcgggagggtccagtcgagatcggcctcccatgttccattaaaaacgaggcaaggcccccttgtctcccgactccaggtaagcgagagccccaaggaatctcctgggagtcaccgcttgatgaggttgacaaaatgtgccacctgcccgagcctgagcttaacaaggagcggcctagcttgcagatcaaattaaaaatcgaggattttatcttacataaaatgctggggaagggctcatttgggaaagtattcctggcagagtttaagaagacgaatcagttcttcgctatcaaagcattgaaaaaagacgtggttttgatggatgacgacgttgaatgcacaatggtagagaaacgtgtgctgagcctcgcctgggaacacccgtttctgacacatatgttttgcaccttccagaccaaggaaaacttattttttgtaatggaatatttgaatggtggagatctgatgtaccacattcagtcttgccataaattcgatttgtcacgagctacattttatgctgccgaaatcatcctgggactccagtttcttcactctaaagggattgtatatcgggatctgaagcttgacaacattctcttggacaaagacgggcacataaagatcgctgacttcggaatgtgcaaggaaaatatgcttggagatgctaaaacaaataccttctgcggcacccctgactatatagctccggagatattactaggccaaaaatataaccactccgtagactggtggagtttcggcgttctcctctatgagatgctcattggccagagtccattccatggccaggatgaggaggaactctttcattcaataagaatggacaatcctttctacccaaggtggctagagaaagaggccaaggatctgctggtgaagctgttcgttcgagagcccgagaaaagacttggggtgaggggcgatatccggcaacacccactctttcgcgagatcaactgggaggagctggaaagaaaggagatcgatcctccttttcgcccaaaagtcaagagccctttcgattgtagcaacttcgataaggaatttctgaatgaaaaacctagattgagcttcgcggacagggctttaattaattctatggatcagaacatgttccgcaactttagcttcatgaaccccggcatggagaggctgatttcctag

SEQ ID NO: 102016 - DNA, 1440 bp, Artificial Sequence
  derived and/or modified sequence
tgactgagcctgctgccctgcctgctcttcctgcccaccatcatccccaagaagatcgtcatccagagggacagcctgcccagcaagaagctgtcctatggcctcatcgcctgtggcatgaatgtgcaccaccgctgccagaccaaggtggccaacctgtgtggcatcaaccagaagctgatggccgaggccctggccatgattgagagcacccagcaggcccgctgcctgcgggacacagagcagatcttccgggagggccctgtggagatcggcctgccctgcagcatcaagaatgaggcccggcccccctgcctgcccaccccaggcaagcgggagccccagggcatctcctgggagagccccctggatgaggtggacaagatgtgccacctgcctgagcctgagctgaacaaggagcggcccagcctgcagatcaagctgaagattgaggacttcatcctgcacaagatgctgggcaagggcagctttgggaaggtgttcctggccgagttcaagaagaccaaccagttctttgccatcaaggccctgaagaaggatgtggtgctgatggatgatgatgtggagtgcaccatggtggagaagagggtgctgagcctggcctgggagcaccccttcctgacccacatgttctgcaccttccagaccaaggaaaatctcttctttgtgatggagtacctgaatggaggagacctgatgtaccacatccagagctgccacaagtttgacctgagccgggccaccttctacgccgctgagatcatcctgggcctgcagttcctgcacagcaaaggaattgtgtacagagacctgaagctggacaacatcctgctggacaaggatggccacatcaagattgctgactttggcatgtgcaaggagaacatgctgggagatgccaagaccaacaccttctgtggcaccccagactacatcgcccctgagatcctgctgggccagaagtacaaccacagcgtggactggtggagctttggagtgctgctgtatgagatgctgattggccagagccccttccacggccaggatgaggaggagctgttccacagcatccgcatggacaaccccttctacccccgctggctggagaaggaggccaaggacctgctggtgaagctgtttgtgcgggagcctgagaagaggctgggcgtgcggggggacatccggcagcaccccctcttccgggagatcaactgggaggagctggagaggaaggagattgacccccccttccggcccaaggtgaagagcccctttgactgcagcaactttgacaaggagttcctgaatgagaagccccggctgagctttgctgaccgggccctgatcaacagcatggaccagaacatgttcaggaacttctccttcatgaaccctggcatggagcggctcatctcctag

SEQ ID NO: 102017 - DNA, 1746 bp, Artificial Sequence
  derived and/or modified sequence
atggacaccaaggacatgaatgaatttgaaacagagggcttctttgccctgcaccagaggagaggagccatcaagcaggccaaggtgcaccacgtgaagtgccacgagttcaccgccaccttcttcccccagcccaccttctgcagcgtgtgccacgagtttgtgtggggcctgaacaagcagggctaccagtgccggcagtgcaatgctgccatccacaagaagtgcatcgacaaggtgattgccaagtgcaccggcagcgccatcaacagccgggagaccatgttccacaaggagcgcttcaagattgacatgccccaccgcttcaaggtgtacaactacaagagccccaccttctgtgagcactgcggcaccctgctgtggggcctggcccggcagggcctgaagtgtgatgcctgtggcatgaatgtgcaccaccgctgccagaccaaggtggccaacctgtgtggcatcaaccagaagctgatggccgaggccctggccatgattgagagcacccagcaggcccgctgcctgcgggacacagagcagatcttccgggagggccctgtggagatcggcctgccctgcagcatcaagaatgaggcccggcccccctgcctgcccaccccaggcaagcgggagccccagggcatctcctgggagagccccctggatgaggtggacaagatgtgccacctgcctgagcctgagctgaacaaggagcggcccagcctgcagatcaagctgaagattgaggacttcatcctgcacaagatgctgggcaagggcagctttgggaaggtgttcctggccgagttcaagaagaccaaccagttctttgccatcaaggccctgaagaaggatgtggtgctgatggatgatgatgtggagtgcaccatggtggagaagagggtgctgagcctggcctgggagcaccccttcctgacccacatgttctgcaccttccagaccaaggaaaatctcttctttgtgatggagtacctgaatggaggagacctgatgtaccacatccagagctgccacaagtttgacctgagccgggccaccttctacgccgctgagatcatcctgggcctgcagttcctgcacagcaaaggaattgtgtacagagacctgaagctggacaacatcctgctggacaaggatggccacatcaagattgctgactttggcatgtgcaaggagaacatgctgggagatgccaagaccaacaccttctgtggcaccccagactacatcgcccctgagatcctgctgggccagaagtacaaccacagcgtggactggtggagctttggagtgctgctgtatgagatgctgattggccagagccccttccacggccaggatgaggaggagctgttccacagcatccgcatggacaaccccttctacccccgctggctggagaaggaggccaaggacctgctggtgaagctgtttgtgcgggagcctgagaagaggctgggcgtgcggggggacatccggcagcaccccctcttccgggagatcaactgggaggagctggagaggaaggagattgacccccccttccggcccaaggtgaagagcccctttgactgcagcaactttgacaaggagttcctgaatgagaagccccggctgagctttgctgaccgggccctgatcaacagcatggaccagaacatgttcaggaacttctccttcatgaaccctggcatggagcggctcatctcctag

SEQ ID NO: 102018 - DNA, 1440 bp, Artificial Sequence
  derived and/or modified sequence
tgactgagcctgctgccctgcctgctgttcctgcccaccatcatcccaaagaaaattgtcatccagcgggattctctgccatctaagaaactgtcttacgggctgatagcttgcgggatgaacgtgcatcatcggtgccagacaaaagtggccaacctgtgcggtatcaaccaaaagctgatggctgaggctctggcaatgatcgaatcaacgcagcaggcccgttgcctgcgggacacagaacagatatttcgcgaaggcccagtcgaaattgggttgccatgttccattaagaatgaagccaggccaccgtgtcttcccacacccgggaaaagagaacctcagggcatcagctgggaaagccctttggatgaggtcgataaaatgtgtcatctgccagaacctgagctcaacaaagaacgcccatctctccaaattaagctaaagattgaggacttcattctgcacaaaatgctgggcaagggttcttttgggaaggtttttctcgcagaatttaaaaagacgaatcagttctttgcaataaaggccttgaagaaagatgtggtgcttatggatgacgatgttgaatgcaccatggtagagaagcgggtcctctcactggcatgggaacatccgttcctgacccatatgttttgcacattccagactaaggagaacctgttcttcgttatggaatatctgaatggcggcgatctgatgtaccatatccagtcatgccacaagttcgacctgtcacgagccaccttctacgctgccgagataattctcggcctccaatttttacacagcaaaggcattgtgtatcgggatcttaagctggacaacattctccttgataaggacgggcatatcaagattgctgatttcgggatgtgcaaagagaacatgttgggcgatgcaaagacaaatacgttctgcggtaccccagattatattgcacccgaaatattactgggtcagaaatacaatcattccgtggactggtggagttttggtgtcctcctgtatgaaatgcttatcggccagtcccccttccatggccaggacgaagaggagcttttccactcaatccggatggacaatcccttctacccacgctggttggaaaaggaggctaaagacctgctggtgaaactcttcgtaagagaacctgaaaagaggcttggagttcggggagacatcaggcagcaccccctgttcagagagataaactgggaagagcttgaaaggaaggagattgaccccccatttcgccctaaggtgaagtcaccttttgactgctccaactttgataaagaattcctcaatgagaaaccgcggctgagcttcgccgatagggcccttatcaattcaatggaccagaatatgttcagaaatttcagctttatgaatcccgggatggagcggctcattagctag

SEQ ID NO: 102019 - DNA, 1746 bp, Artificial Sequence
  derived and/or modified sequence
atggacaccaaggacatgaacgagttcgagaccgagggcttcttcgccttgcatcagagaagaggtgcaattaagcaagctaaggttcatcacgtgaaatgccacgagttcactgccactttctttccccagcccactttctgttccgtttgtcacgagttcgtgtgggggctaaacaaacagggctaccagtgtagacagtgcaatgctgccatccacaaaaaatgtatagacaaggtgatcgccaagtgtaccgggagcgcaattaacagccgtgaaaccatgttccacaaggaaagatttaagatcgacatgcctcatcggtttaaagtctacaattataaatccccaacattttgtgaacattgcggtacgttactttggggattagcgcgtcaaggtctgaaatgtgacgcctgtggcatgaatgtccaccacaggtgccagaccaaggttgccaacctttgcggcatcaatcagaagcttatggccgaggccctggcaatgatagagagcactcaacaggcccgctgcctccgtgacaccgagcagatcttccgcgaaggacctgtcgaaatcggtttgccctgctccatcaagaacgaggcccgtcctccgtgtcttcctacgcccggtaaaagagaaccacaaggcatcagctgggagagccctcttgacgaagtcgataaaatgtgtcacctcccagaaccagagttgaacaaagagaggccaagccttcagatcaaactgaagattgaagattttattctacacaagatgctcggcaaggggtcatttggtaaggtgttcctagccgaatttaagaagacaaaccagttcttcgcgatcaaagccctgaaaaaggatgtggtattaatggacgacgatgtagaatgcacaatggttgagaagagggtgttgtcgctcgcttgggagcacccgtttctgacacacatgttctgcacttttcagacaaaggagaaccttttcttcgttatggagtacttgaacggaggcgacctcatgtatcacatccaatcctgccacaaattcgatctgagccgcgcaacattttacgccgctgagatcatattaggcttacagtttttgcactctaagggcattgtgtaccgtgacttgaaactagataacatactgctagacaaagatggacatatcaaaattgcagactttgggatgtgcaaggagaatatgctcggcgacgcaaaaactaatactttctgcggcactccggactacatcgcccccgaaatcctcctcggacagaaatataatcatagtgtggattggtggagctttggcgtgctgctgtatgagatgctgatcggccagtctccctttcatggccaggatgaggaagagctctttcactcaatcaggatggacaatcctttttacccacggtggctcgagaaggaagccaaggacctgctggtgaagctattcgttcgagagcccgagaaacggctgggagttaggggggacattcggcagcatccgcttttccgggagattaattgggaagagctggagagaaaggagatcgacccaccattccgccccaaagtgaaatccccgttcgactgcagcaatttcgataaagagttcttgaacgagaagccaagattgtctttcgctgaccgcgcactgattaacagcatggaccagaatatgttccgcaacttctctttcatgaacccgggcatggaacgcctgatttcttag

SEQ ID NO: 102020 - DNA, 1440 bp, Artificial Sequence
  derived and/or modified sequence
taactctcgctccttccctgtttgttatttctgcccacaatcatcccaaagaagatcgtcatccaacgagatagtcttccttctaagaagctgagctacggcttgattgcatgcgggatgaatgtccatcaccggtgccaaacgaaagtggcgaatctctgcggcataaaccaaaagctcatggctgaagccctggccatgatcgagagcacccagcaggctaggtgcctccgtgatacagagcaaatcttccgcgaagggcctgtggaaattggcctcccatgctctataaagaatgaggccaggcctccgtgtctgccaacaccaggaaaacgtgaaccgcaaggaatctcttgggaatcccctctggacgaggttgacaagatgtgtcacctccccgaacccgagctgaacaaggagcggccatcacttcaaatcaaactcaaaatcgaggattttatactccacaaaatgttaggcaaaggaagctttggcaaggtattcctagcggagttcaagaagacaaaccaattcttcgccattaaggcccttaaaaaagacgtggtactgatggacgacgacgttgagtgcacgatggtcgagaaaagggtgctcagtctcgcctgggagcatccttttctcacgcacatgttctgtactttccagactaaagaaaatttattcttcgtaatggagtatctgaacggcggagatctaatgtatcacattcaatcttgccataaattcgatctgagtcgagctaccttctacgcggctgaaatcatcctaggtttgcagttcctccactcaaagggaatcgtctaccgggacctgaaactggacaatatcctgcttgataaggatggacatattaaaatcgcagattttggtatgtgtaaagaaaatatgctgggcgatgctaaaaccaataccttttgcgggacccctgattatatcgcccctgagatccttctggggcaaaaatacaaccactcagttgactggtggtcttttggggtcctcctgtacgaaatgctaattggccagagccctttccacggacaggacgaagaagagctattccattctatacggatggacaacccgttctatcctcggtggctggaaaaagaggcaaaagatcttctggttaaattgtttgtccgcgagcctgagaaaagactgggagtacggggtgatataagacagcatccactgtttcgtgagattaattgggaagaacttgagaggaaagagatagaccctccgttcaggccgaaggtaaagtcgcctttcgattgcagcaactttgataaggaatttcttaatgagaaacctagacttagttttgccgatcgggcattaatcaactccatggaccagaacatgttcaggaatttctcgttcatgaacccaggtatggaaagactgatctcctag

SEQ ID NO: 102021 - DNA, 1746 bp, Artificial Sequence
  derived and/or modified sequence
atggataccaaggatatgaacgaattcgagactgagggcttttttgcactccaccagaggagaggtgcaattaagcaggcaaaagttcatcacgtgaagtgccacgaattcaccgcaaccttcttccctcagccaaccttctgtagtgtttgccatgaattcgtgtggggcctcaataaacagggataccagtgtcggcagtgtaacgcggctattcacaagaaatgtattgacaaagtgatagcaaaatgtaccggctccgccattaactcgagagagacaatgttccataaagaacggttcaaaatcgacatgcctcatcgcttcaaggtctacaactacaagagccctacattctgtgagcattgtggtacactcctttgggggctggcacgtcaaggactgaaatgcgatgcgtgcggcatgaacgtgcaccatagatgtcagactaaagtggctaacttgtgcgggatcaaccagaaactgatggccgaagccctcgccatgatcgagagcactcagcaagccaggtgtctccgggacacagagcagatctttcgggagggcccagtggagatcggcctcccatgctccattaagaacgaggcgagaccgccttgtctgcctacccccggtaaacgagaacctcagggaatcagctgggaatcaccactggacgaggtggataaaatgtgccaccttcccgaacccgagctaaacaaagagcgcccttctctacaaattaaactgaagatcgaagatttcatactgcacaagatgcttggcaagggatcttttggaaaggtattcctggccgagttcaagaagaccaatcagttttttgccatcaaagcactgaagaaagatgttgtgctgatggatgatgatgtggaatgtacaatggtggaaaaacgggtcctgagcttggcctgggagcacccctttttaacacacatgttctgtaccttccagactaaggagaacctcttcttcgtgatggaatatctgaacggaggggacctcatgtatcatatccagagctgtcacaagtttgatctctctagagccactttttacgccgctgagataattctagggctccagtttctacacagtaaaggtatcgtatacagagatttgaagttggataacattctgctggataaggatgggcacatcaagatcgcggactttggtatgtgtaaggagaacatgcttggtgacgctaaaacaaacacattctgcggcacccctgactacatcgcgccagagatcttgctgggccagaagtacaatcacagcgtagactggtggagctttggggtgctcctctacgagatgcttatagggcagagccccttccatggccaggatgaggaggagctatttcatagtattcgaatggacaaccctttctacccccgatggctggagaaagaggccaaggacctcctcgtgaagctgtttgttagggagcccgaaaaacggctgggcgtgaggggtgacatccgacagcatcctttattcagggaaatcaactgggaagaactagagcggaaagagattgaccccccttttcggcctaaggtgaagagccctttcgattgtagcaatttcgacaaggagtttctgaacgagaagcccaggctctcattcgctgaccgcgcactcatcaattccatggaccagaacatgttccgcaatttctctttcatgaatcctggaatggaaagactaattagctag

SEQ ID NO: 102022 - DNA, 2008 bp, Artificial Sequence
  derived and/or modified sequence
tccttagccttttaccctgccttctctttctccccacaataattcccaagaaaatagtcatccaaagggactctttgccctccaagaaactgagttacggcctgatagcatgtggcatgaatgtgcatcatagatgccagacaaaggtggccaacctttgtggcataaaccagaagctaatggctgaagcgctggccatgattgagagcactcaacaggctcgctgcttaagagatactgaacagatcttcagagaaggtccggttgaaattggtctcccatgctccatcaaaaatgaagcaaggccgccatgtttaccgacaccgggaaaaagagagcctcagggcatttcctgggagtctccgttggatgaggtggataaaatgtgccatcttccagaacctgaactgaacaaagaaagaccatctctgcagattaaactaaaaattgaggattttatcttgcacaaaatgttggggaaaggaagttttggcaaggtcttcctggcagaattcaagaaaaccaatcaatttttcgcaataaaggccttaaagaaagatgtggtcttgatggacgatgatgttgagtgcacgatggtagagaagagagttctttccttggcctgggagcatccgtttctgacgcacatgttttgtacattccagaccaaggaaaacctcttttttgtgatggagtacctcaacggaggggacttaatgtaccacatccaaagctgccacaagttcgacctttccagagcgacgttttatgctgctgaaatcattcttggtctgcagttccttcattccaaaggaatagtctacagggacctgaagctagataacatcctgttagacaaagatggacatatcaagatcgcggattttggaatgtgcaaggagaacatgttaggagatgccaagacgaataccttctgtgggacacctgactacatcgccccagagatcttgctgggtcagaaatacaaccactctgtggactggtggtccttcggggttctcctttatgaaatgctgattggtcagtcgcctttccacgggcaggatgaggaggagctcttccactccatccgcatggacaatcccttttacccacggtggctggagaaggaagcaaaggaccttctggtgaagctcttcgtgcgagaacctgagaagaggctgggcgtgaggggagacatccgccagcaccctttgtttcgggagatcaactgggaggaacttgaacggaaggagattgacccaccgttccggccgaaagtgaaatcaccatttgactgcagcaatttcgacaaagaattcttaaacgagaagccccggctgtcatttgccgacagagcactgatcaacagcatggaccagaatatgttcaggaacttttccttcatgaaccccgggatggagcggctgatatcctgaatcttgcccctccagagacaggaaagaatttgccttctccctgggaactggttcaagagacactgcttgggttcctttttcaacttggaaaaagaaagaaacactcaacaataaagactgagacccgttcgcccccatgtgacttttatctgtagcagaaaccaagtctacttcactaatgacgatgccgtgtgtctcgtctcctgacatgtctcacagacgctcctgaagttaggtcattactaaccatagttatttacttgaaagatgggtctccgcacttggaaaggtttcaagacttgatactgcaataaattatggctcttcacctgggcgccaactgctgatcaatgaaatgcttgttgaatcaggggcaaacggagtacagacgtctcaagactgaaacggccccattgcctggtctagtagcggatctcactcagccgcagacaagtaatcactaacccgttttattctattcctatctgtggatgtgtaaatggctggggggccagccctggataggtttttatgggaattctttacaataaacatagcttgtaacttga

SEQ ID NO: 102023 - DNA, 2284 bp, Artificial Sequence
  derived and/or modified sequence
gggcagcagcggcgccgtgctcgctccagggcgcaaccatgtcgccatttcttcggattggcttgtccaactttgactgcgggtcctgccagtcttgtcagggcgaggctgttaacccttactgtgctgtgctcgtcaaagagtatgtcgaatcagagaacgggcagatgtatatccagaaaaagcctaccatgtacccaccctgggacagcacttttgatgcccatatcaacaagggaagagtcatgcagatcattgtgaaaggcaaaaacgtggacctcatctctgaaaccaccgtggagctctactcgctggctgagaggtgcaggaagaacaacgggaagacagaaatatggacacaaaggacatgaatgaatttgagacggaaggcttctttgctttgcatcagcgccggggtgccatcaagcaggcaaaggtccaccacgtcaagtgccacgagttcactgccaccttcttcccacagcccacattttgctctgtctgccacgagtttgtctggggcctgaacaaacagggctaccagtgccgacaatgcaatgcagcaattcacaagaagtgtattgataaagttatagcaaagtgcacaggatcagctatcaatagccgagaaaccatgttccacaaggagagattcaaaattgacatgccacacagatttaaagtctacaattacaagagcccgaccttctgtgaacactgtgggaccctgctgtggggactggcacggcaaggactcaagtgtgatgcatgtggcatgaatgtgcatcatagatgccagacaaaggtggccaacctttgtggcataaaccagaagctaatggctgaagcgctggccatgattgagagcactcaacaggctcgctgcttaagagatactgaacagatcttcagagaaggtccggttgaaattggtctcccatgctccatcaaaaatgaagcaaggccgccatgtttaccgacaccgggaaaaagagagcctcagggcatttcctgggagtctccgttggatgaggtggataaaatgtgccatcttccagaacctgaactgaacaaagaaagaccatctctgcagattaaactaaaaattgaggattttatcttgcacaaaatgttggggaaaggaagttttggcaaggtcttcctggcagaattcaagaaaaccaatcaatttttcgcaataaaggccttaaagaaagatgtggtcttgatggacgatgatgttgagtgcacgatggtagagaagagagttctttccttggcctgggagcatccgtttctgacgcacatgttttgtacattccagaccaaggaaaacctcttttttgtgatggagtacctcaacggaggggacttaatgtaccacatccaaagctgccacaagttcgacctttccagagcgacgttttatgctgctgaaatcattcttggtctgcagttccttcattccaaaggaatagtctacagggacctgaagctagataacatcctgttagacaaagatggacatatcaagatcgcggattttggaatgtgcaaggagaacatgttaggagatgccaagacgaataccttctgtgggacacctgactacatcgccccagagatcttgctgggtcagaaatacaaccactctgtggactggtggtccttcggggttctcctttatgaaatgctgattggtcagtcgcctttccacgggcaggatgaggaggagctcttccactccatccgcatggacaatcccttttacccacggtggctggagaaggaagcaaaggaccttctggtgaagctcttcgtgcgagaacctgagaagaggctgggcgtgaggggagacatccgccagcaccctttgtttcgggagatcaactgggaggaacttgaacggaaggagattgacccaccgttccggccgaaagtgaaatcaccatttgactgcagcaatttcgacaaagaattcttaaacgagaagccccggctgtcatttgccgacagagcactgatcaacagcatggaccagaatatgttcaggaacttttccttcatgaaccccgggatggagcggctgatatcctgaatcttgcccctccagagacaggaaagaatttgccttctccctgggaactggttcaagagacactgcttgggttcctttttcaacttggaaaaagaaagaaacactcaacaataaagactgagacccgttcgcccccatgtgacttttatctgtagcagaaaccaagtctacttcactaatgacgat

SEQ ID NO: 102024 - DNA, 1440 bp, Artificial Sequence
  derived and/or modified sequence
tgactgagcctgctgccctgcctgctgttcctgcccaccatcatccccaagaagatcgtgatccagagagacagcctgcccagcaagaagctgagctacggcctgatcgcctgcggcatgaacgtgcaccacagatgccagaccaaggtggccaacctgtgcggcatcaaccagaagctgatggccgaggccctggccatgatcgagagcacccagcaggccagatgcctgagagacaccgagcagatcttcagagagggccccgtggagatcggcctgccctgcagcatcaagaacgaggccagacccccctgcctgcccacccccggcaagagagagccccagggcatcagctgggagagccccctggacgaggtggacaagatgtgccacctgcccgagcccgagctgaacaaggagagacccagcctgcagatcaagctgaagatcgaggacttcatcctgcacaagatgctgggcaagggcagcttcggcaaggtgttcctggccgagttcaagaagaccaaccagttcttcgccatcaaggccctgaagaaggacgtggtgctgatggacgacgacgtggagtgcaccatggtggagaagagagtgctgagcctggcctgggagcaccccttcctgacccacatgttctgcaccttccagaccaaggagaacctgttcttcgtgatggagtacctgaacggcggcgacctgatgtaccacatccagagctgccacaagttcgacctgagcagagccaccttctacgccgccgagatcatcctgggcctgcagttcctgcacagcaagggcatcgtgtacagagacctgaagctggacaacatcctgctggacaaggacggccacatcaagatcgccgacttcggcatgtgcaaggagaacatgctgggcgacgccaagaccaacaccttctgcggcacccccgactacatcgcccccgagatcctgctgggccagaagtacaaccacagcgtggactggtggagcttcggcgtgctgctgtacgagatgctgatcggccagagccccttccacggccaggacgaggaggagctgttccacagcatcagaatggacaaccccttctaccccagatggctggagaaggaggccaaggacctgctggtgaagctgttcgtgagagagcccgagaagagactgggcgtgagaggcgacatcagacagcaccccctgttcagagagatcaactgggaggagctggagagaaaggagatcgacccccccttcagacccaaggtgaagagccccttcgactgcagcaacttcgacaaggagttcctgaacgagaagcccagactgagcttcgccgacagagccctgatcaacagcatggaccagaacatgttcagaaacttcagcttcatgaaccccggcatggagagactgatcagctag

SEQ ID NO: 102025 - DNA, 1746 bp, Artificial Sequence
  derived and/or modified sequence
atggacaccaaggacatgaacgagttcgagaccgagggcttcttcgccctgcaccagagaagaggcgccatcaagcaggccaaggtgcaccacgtgaagtgccacgagttcaccgccaccttcttcccccagcccaccttctgcagcgtgtgccacgagttcgtgtggggcctgaacaagcagggctaccagtgcagacagtgcaacgccgccatccacaagaagtgcatcgacaaggtgatcgccaagtgcaccggcagcgccatcaacagcagagagaccatgttccacaaggagagattcaagatcgacatgccccacagattcaaggtgtacaactacaagagccccaccttctgcgagcactgcggcaccctgctgtggggcctggccagacagggcctgaagtgcgacgcctgcggcatgaacgtgcaccacagatgccagaccaaggtggccaacctgtgcggcatcaaccagaagctgatggccgaggccctggccatgatcgagagcacccagcaggccagatgcctgagagacaccgagcagatcttcagagagggccccgtggagatcggcctgccctgcagcatcaagaacgaggccagacccccctgcctgcccacccccggcaagagagagccccagggcatcagctgggagagccccctggacgaggtggacaagatgtgccacctgcccgagcccgagctgaacaaggagagacccagcctgcagatcaagctgaagatcgaggacttcatcctgcacaagatgctgggcaagggcagcttcggcaaggtgttcctggccgagttcaagaagaccaaccagttcttcgccatcaaggccctgaagaaggacgtggtgctgatggacgacgacgtggagtgcaccatggtggagaagagagtgctgagcctggcctgggagcaccccttcctgacccacatgttctgcaccttccagaccaaggagaacctgttcttcgtgatggagtacctgaacggcggcgacctgatgtaccacatccagagctgccacaagttcgacctgagcagagccaccttctacgccgccgagatcatcctgggcctgcagttcctgcacagcaagggcatcgtgtacagagacctgaagctggacaacatcctgctggacaaggacggccacatcaagatcgccgacttcggcatgtgcaaggagaacatgctgggcgacgccaagaccaacaccttctgcggcacccccgactacatcgcccccgagatcctgctgggccagaagtacaaccacagcgtggactggtggagcttcggcgtgctgctgtacgagatgctgatcggccagagccccttccacggccaggacgaggaggagctgttccacagcatcagaatggacaaccccttctaccccagatggctggagaaggaggccaaggacctgctggtgaagctgttcgtgagagagcccgagaagagactgggcgtgagaggcgacatcagacagcaccccctgttcagagagatcaactgggaggagctggagagaaaggagatcgacccccccttcagacccaaggtgaagagccccttcgactgcagcaacttcgacaaggagttcctgaacgagaagcccagactgagcttcgccgacagagccctgatcaacagcatggaccagaacatgttcagaaacttcagcttcatgaaccccggcatggagagactgatcagctag

SEQ ID NO: 102026 - protein, 224 aa, Artificial Sequence
  derived and/or modified sequence
MAAVGAGGSTAAPGPGAVSAGALEPGTASAAHRRLKYISLAVLVVQNASLILSIRYARTLPGDRFFATTAVVMAEVLKGLTCLLLLFAQKRGNVKHLVLFLHEAVLVQYVDTLKLAVPSLIYTLQNNLQYVAISNLPAATFQPSPRCSQSHSLCLCLRLRALRSPAASRAATTTAAVFPPWRPHHGALSAKVAHQGEGFLAAGIEDIGLASFSLLALGPAGTKL

SEQ ID NO: 102027 - DNA, 492 bp, Artificial Sequence
  derived and/or modified sequence
atggcagctgtaggggccgggggaagtactgccgccccaggcccgggcgccgtctctgcaggtgccttagaaccaggcactgcctccgccgcccacagacggttgaaatacatttcactcgccgtgttggtggtccagaatgcctccctaatcctgagtataagatatgcccgcacccttccgggggaccggttttttgctacaacagcagtagtgatggcagaggtcctcaaggggttgacatgcctcctgctgctcttcgcccagaagaggggcaacgtaaagcatcttgtgctgttcctgcatgaggccgtgctcgtgcagtacgtggacacccttaagctggccgtaccttccctgatttacacgctccagaataacctacagtacgttgccatcagtaacctcccagcagcaacattccaggtgagccctaagccttccatggccccagaggaactgaccggactaggaaccggtgtttgggagtag

SEQ ID NO: 102028 - DNA, 675 bp, Artificial Sequence
  derived and/or modified sequence
atggccgcggtcggcgctggggggagcaccgctgccccggggccaggagcagtgagtgctggagccctggagcctgggacagcgtcggccgcccatcgacggcttaagtatatcagcctggctgtgttagtagttcagaacgcttccctcattctgtctatccgctatgcaaggaccttgcccggcgaccggttcttcgccacaacagcagtcgtcatggcggaagtgctgaagggcttgacatgcctgttgctgctattcgcccagaagcgcggcaatgtgaaacacctggtcctgttcctccatgaagcagtgctggtgcagtacgtagatacactcaagctcgcagttccctcgctcatttatactctccagaataatctccagtacgtggcgatctccaatctgcccgccgctaccttccagccctctccaaggtgcagccagtcccactcgttgtgcctttgtcttcggctccgggcactgcggtctccagcagcctcccgggcggccactacgacagccgccgtgtttccaccttggcgcccccatcacggagccttatccgctaaagtcgctcatcagggtgagggatttctggctgccggaatcgaggacattggactcgccagtttctccctcctggcacttggtccagccggcacgaagttgtag

SEQ ID NO: 102029 - DNA, 492 bp, Artificial Sequence
  derived and/or modified sequence
atggctgctgtgggcgctgggggcagcacagctgcccctggccctggagctgtgtctgctggggccctggagcctggaacagccagcgctgcccaccggcggctgaagtacatcagcctggccgtgctggtggtgcagaatgccagcctcatcctgagcatccgctatgcccggaccctgcccggggaccgcttctttgccaccacagctgtggtgatggccgaggtgctgaagggcctgacctgcctgctgctgctgtttgcccagaagagaggaaatgtgaagcacctggtgctcttcctgcacgaggccgtgctggtgcagtatgtggacaccctgaagctggccgtgcccagcctcatctacaccctgcagaacaacctgcagtatgtggccatcagcaacctgcctgctgccaccttccaggtgagccccaagcccagcatggcccctgaggagctgaccggcctgggcactggagtgtgggagtag

SEQ ID NO: 102030 - DNA, 675 bp, Artificial Sequence
  derived and/or modified sequence
atggctgctgtgggcgctgggggcagcacagctgcccctggccctggagctgtgtctgctggggccctggagcctggaacagccagcgctgcccaccggcggctgaagtacatcagcctggccgtgctggtggtgcagaatgccagcctcatcctgagcatccgctatgcccggaccctgcccggggaccgcttctttgccaccacagctgtggtgatggccgaggtgctgaagggcctgacctgcctgctgctgctgtttgcccagaagagaggaaatgtgaagcacctggtgctcttcctgcacgaggccgtgctggtgcagtatgtggacaccctgaagctggccgtgcccagcctcatctacaccctgcagaacaacctgcagtatgtggccatcagcaacctgcctgctgccaccttccagcccagcccccgctgcagccagagccacagcctgtgcctgtgcctgcggctgcgggccctgcggagccctgctgccagccgggccgccaccaccacagctgctgtgtttcctccctggaggccccaccacggggccctgagcgccaaggtggcccaccagggcgagggcttcctggccgccggcattgaagatattggcctggccagcttcagcctgctggccctgggccctgctggcaccaagctgtag

SEQ ID NO: 102031 - DNA, 492 bp, Artificial Sequence
  derived and/or modified sequence
atggccgccgtgggcgccggcggcagcaccgccgcccccggccccggtgccgtgagcgccggcgcgctcgagcctggaactgcctcagcagcccatagaaggcttaaatacatctctttagcggttttggtggtgcagaacgcgagcctgatactttccatccggtatgctcgcacacttccaggagaccgcttctttgccacaaccgctgtggttatggccgaggtgcttaaaggcctcacctgtcttctgctgctgttcgcccagaagcgcggcaacgtgaaacacctggtactctttctccacgaggccgtgcttgtccaatatgtcgacactttgaaactggcggtgcctagcctgatctatactctgcagaacaatctgcagtatgtggccatttctaatcttccagccgcaactttccaggtgagtcccaagccttctatggccccagaagagctcaccggcttgggaacaggtgtctgggagtag

SEQ ID NO: 102032 - DNA, 675 bp, Artificial Sequence
  derived and/or modified sequence
atggccgccgtgggcgccggcggcagcaccgccgcccccggccccggggccgtctccgccggcgcattggaacccgggactgccagcgccgcacatcgccgcctgaagtatatatctctcgccgtgctcgttgtgcagaatgcctccctcattttgtccatccgttatgctagaaccctgcccggggatagatttttcgctactacagccgtcgtcatggcagaggtgctgaagggactgacatgcctgttacttctgtttgcccagaagagaggcaatgtgaaacacctcgtcctgtttcttcacgaggccgtcctcgtgcaatacgtagacacgctcaaattagcggtccctagtttgatatatacgctccagaataaccttcagtatgtcgctatttcgaacttgcccgccgcaactttccaaccctctccacggtgtagccagtcccattccttgtgcctgtgcttgagactgcgtgcgctgcggtcgccagccgcgagccgcgcagccaccactactgccgcggtgtttccaccatggcgtcctcatcacggggccctctctgccaaagtagctcatcagggagaagggtttctggccgctggaatcgaggacataggattagcgtcctttagcctactcgcgctcggaccagcggggactaagctgtag

SEQ ID NO: 102033 - DNA, 492 bp, Artificial Sequence
  derived and/or modified sequence
atggctgccgtcggcgcaggcggatctacagccgctccaggacccggagcagtttcagctggagcgctagaacccggaaccgcatctgcggcacaccggaggctaaagtacatctcactcgcggtgttagttgtacagaacgcttcactgatactatccatcagatatgccagaaccttacccggtgatcgtttttttgccacgacagccgttgtgatggctgaggtgcttaaaggtttaacatgcttattactcctgttcgcccagaagagaggtaacgtgaaacacttggttctgttcctccacgaggcggtgctggtccagtacgtagacactttaaagctggccgtgcccagtctaatctacaccctacagaacaacctgcagtacgtggctatatccaacctacccgctgccacctttcaggttagtccaaagccatccatggcaccagaagagcttaccgggctgggcacaggggtgtgggagtag

SEQ ID NO: 102034 - DNA, 675 bp, Artificial Sequence
  derived and/or modified sequence
atggccgctgtaggcgcagggggatcaaccgcggctccgggacccggtgccgtgtctgcaggagccctagaacccggaacggcctccgcggcacatagacggttgaagtatatctctctggctgtgctggtggtgcaaaatgcaagcttaattttgtcaatccgctacgccaggaccctgcctggcgacagattcttcgccaccacagcagtggtgatggcagaggtgttgaaagggctgacttgcctgcttctcctgttcgcacagaaacgtggaaatgtcaaacacctggtgcttttcttgcacgaggccgtcctcgtgcaatatgtggacaccctgaaactcgctgtgcctagtttaatctacaccctgcagaataatctgcaatacgtcgccatcagcaacctaccagctgcaacgtttcagccatcgcccagatgttcccaaagccacagcctgtgcttatgtttgcgcttacgtgcacttcgatcccctgcggctagtcgggctgccaccaccaccgctgctgtctttccaccttggagacctcatcacggagccctatcggcaaaggtggcccaccagggtgaggggttcctggccgctggcatcgaggatattggcctggcctcattctctctgcttgccctgggtccggctgggactaagctctag

SEQ ID NO: 102035 - DNA, 655 bp, Artificial Sequence
  derived and/or modified sequence
gttgccgaggggacgggccgggcagatgccaacatggcagcggttggggctggtggttccaccgcggcgcccgggccaggggcggtttccgcgggtgcattggagccggggaccgccagtgcggctcacaggcgcctgaagtacatatccctagctgtgctggtggtccagaatgcctccctcatcctcagcatccgctacgcccgcacgttgccaggggaccgcttctttgccaccactgctgtggtcatggcggaagtgctcaaaggtctcacctgcctgctgctgctcttcgcacagaagaggggtaacgtgaagcacctggttctcttcctccatgaggctgtcctggtgcagtatgtggacacgctcaagctcgcagtgccctctctcatctacaccttgcagaataacctccagtatgttgccatctctaacctaccagctgccactttccaggtgagccccaagcccagcatggccccagaggaactaactgggttggggactggagtatgggaatagcgtggtgggggggtgttgcagaggacaggggctatgtcaccttcagaatgtccttggaactccttcaacctcccttttctcgtctgtgaaaattgggggtggaaatagtaatgcctgttcattgagatgc

SEQ ID NO: 102036 - DNA, 778 bp, Artificial Sequence
  derived and/or modified sequence
atggcagcggttggggctggtggttccaccgcggcgcccgggccaggggcggtttccgcgggtgcattggagccggggaccgccagtgcggctcacaggcgcctgaagtacatatccctagctgtgctggtggtccagaatgcctccctcatcctcagcatccgctacgcccgcacgttgccaggggaccgcttctttgccaccactgctgtggtcatggcggaagtgctcaaaggtctcacctgcctgctgctgctcttcgcacagaagaggggtaacgtgaagcacctggttctcttcctccatgaggctgtcctggtgcagtatgtggacacgctcaagctcgcagtgccctctctcatctacaccttgcagaataacctccagtatgttgccatctctaacctaccagctgccactttccagccttccccgaggtgcagccaaagccatagcctctgcctctgcctccgcctccgggccctgcgttcaccagcagcctcccgggcagccaccaccaccgcagctgtcttcccaccgtggagacctcatcacggagccctttctgccaaagttgctcaccaaggtgaagggttcctagccgctgggattgaagacattggcctggcctcgttctctcttcttgcccttggcccagctgggaccaaactctgatcagtattaggggtagagtgaggtagacactggactccctgtccccaccacccctgccccacccagggccaacatgactaagctctctcatgacccacctcag

SEQ ID NO: 102037 - DNA, 492 bp, Artificial Sequence
  derived and/or modified sequence
atggccgccgtgggcgccggcggcagcaccgccgcccccggccccggcgccgtgagcgccggcgccctggagcccggcaccgccagcgccgcccacagaagactgaagtacatcagcctggccgtgctggtggtgcagaacgccagcctgatcctgagcatcagatacgccagaaccctgcccggcgacagattcttcgccaccaccgccgtggtgatggccgaggtgctgaagggcctgacctgcctgctgctgctgttcgcccagaagagaggcaacgtgaagcacctggtgctgttcctgcacgaggccgtgctggtgcagtacgtggacaccctgaagctggccgtgcccagcctgatctacaccctgcagaacaacctgcagtacgtggccatcagcaacctgcccgccgccaccttccaggtgagccccaagcccagcatggcccccgaggagctgaccggcctgggcaccggcgtgtgggagtag

SEQ ID NO: 102038 - DNA, 675 bp, Artificial Sequence
  derived and/or modified sequence
atggccgccgtgggcgccggcggcagcaccgccgcccccggccccggcgccgtgagcgccggcgccctggagcccggcaccgccagcgccgcccacagaagactgaagtacatcagcctggccgtgctggtggtgcagaacgccagcctgatcctgagcatcagatacgccagaaccctgcccggcgacagattcttcgccaccaccgccgtggtgatggccgaggtgctgaagggcctgacctgcctgctgctgctgttcgcccagaagagaggcaacgtgaagcacctggtgctgttcctgcacgaggccgtgctggtgcagtacgtggacaccctgaagctggccgtgcccagcctgatctacaccctgcagaacaacctgcagtacgtggccatcagcaacctgcccgccgccaccttccagcccagccccagatgcagccagagccacagcctgtgcctgtgcctgagactgagagccctgagaagccccgccgccagcagagccgccaccaccaccgccgccgtgttccccccctggagaccccaccacggcgccctgagcgccaaggtggcccaccagggcgagggcttcctggccgccggcatcgaggacatcggcctggccagcttcagcctgctggccctgggccccgccggcaccaagctgtag

SEQ ID NO: 102039 - protein, 218 aa, Artificial Sequence
  derived and/or modified sequence
MKLCRDAHRRLKYISLAVLVVQNASLILSIRYARTLPGDRFFATTAVVMAEVLKGLTCLLLLFAQKRGNVKHLVLFLHEAVLVQYVDTLKLAVPSLIYTLQNNLQYVAISNLPAATFQPSPRCSQSHSLCLCLRLRALRSPAASRAATTTAAVFPPWRPHHGALSAKVSAGEVRAGSNGGTQGRGTGVEGVGHLQDPSRHPPGPGSSGFGRWSFLPGH

SEQ ID NO: 102040 - DNA, 657 bp, Artificial Sequence
  derived and/or modified sequence
atgaagctgtgccgcgacgcccatagacgactgaagtacatttccctggccgtgttggtcgtgcagaatgcttcccttatcctttcaattagatacgccagaactctgcccggcgatcggtttttcgcaacaacagctgtggtgatggccgaggtgctgaaaggcttgacatgcctgttgttactttttgcacaaaagcgggggaacgtgaaacatttggtcctgttcctgcacgaggcagttttggttcaatatgttgataccctgaagctggcggtgccttcactgatatacaccctgcagaataacctgcagtatgtggccatttctaacctccccgccgcaacttttcagccttctcctagatgcagccagagtcattctctctgcctctgtttacgactcagggccctgaggagccccgccgcatctcgggccgcaactacaaccgctgctgtcttccctccatggaggccacaccatggtgcgctaagtgcaaaagtcagcgcaggcgaggtccgcgcagggtccaatgggggaacacagggccgcggcacaggggtcgagggggtggggcacttgcaggacccgagtcgtcacccaccaggacctggaagttccgggttcggacggtggagcttcctgccaggccactag

SEQ ID NO: 102041 - DNA, 657 bp, Artificial Sequence
  derived and/or modified sequence
atgaagctgtgcagagatgcccaccggcggctgaagtacatcagcctggccgtgctggtggtgcagaatgccagcctcatcctgagcatccgctatgcccggaccctgcccggggaccgcttctttgccaccacagctgtggtgatggccgaggtgctgaagggcctgacctgcctgctgctgctgtttgcccagaagagaggaaatgtgaagcacctggtgctcttcctgcacgaggccgtgctggtgcagtatgtggacaccctgaagctggccgtgcccagcctcatctacaccctgcagaacaacctgcagtatgtggccatcagcaacctgcctgctgccaccttccagcccagcccccgctgcagccagagccacagcctgtgcctgtgcctgcggctgcgggccctgcggagccctgctgccagccgggccgccaccaccacagctgctgtgtttcctccctggaggccccaccacggggccctgagcgccaaggtgtctgctggggaggtgcgggccggcagcaatggaggcacccagggccggggcaccggggtggagggcgtgggccacctgcaggaccccagccgccaccccccaggccctggcagcagcggcttcggccgctggagcttcctgcccggccactag

SEQ ID NO: 102042 - DNA, 657 bp, Artificial Sequence
  derived and/or modified sequence
atgaagctgtgccgggacgcccaccggcggctgaagtacatcagcttggcagtactggtggttcagaacgccagcttaatcctctctatccgatacgctagaaccctacccggagaccgttttttcgccaccactgccgtcgtcatggccgaggtgcttaaggggcttacatgcctgttactgttgttcgcccaaaagcgaggtaacgttaagcaccttgtgttatttcttcatgaagccgtgttggtgcagtacgtcgacactctgaagttagcagtccccagcctcatatacactctccagaacaacttgcagtacgtcgctatatctaacctgccagccgcaaccttccagcctagtccacgctgctctcagtcacattcattgtgcctttgtcttcgcctgcgtgctctgaggtctcccgccgcatctagagctgcaacaactactgctgccgtgtttcctccctggaggccccatcatggggcgctgagtgccaaggtctccgcaggcgaggtccgcgcgggaagcaacggtgggacccagggtcgaggtacaggcgtggagggggtgggacacctacaggacccctcccgtcatccacccggacccggcagctcaggtttcggtaggtggtccttcctccctgggcattag

SEQ ID NO: 102043 - DNA, 657 bp, Artificial Sequence
  derived and/or modified sequence
atgaagttgtgccgagacgcccataggcgcttaaagtacatatcactcgcagttttggtcgtacaaaacgcatcacttatcctcagcatccgctacgcaaggacgctcccaggcgatagattttttgcaactactgctgtagttatggccgaggttctcaagggactgacctgtcttctgttactgttcgcgcagaagagaggcaacgtcaaacaccttgtgctgttcctgcatgaggccgtactggttcagtacgtagacacgctgaagctggcagttccttctttgatctataccttacaaaacaatctgcagtacgttgccatctcgaaccttcctgccgctacatttcagccatccccacggtgcagccaaagccacagcttatgcttatgcctcagactccgggcacttaggagtcctgcagcctcacgagcggctacgactactgctgctgtctttcccccatggcgccctcatcatggggctctgtccgcaaaagtatctgcgggagaggtgcgagcgggttccaatgggggtacgcaggggagaggaaccggcgtggagggagtgggccatcttcaggatccaagccggcatccccctggtccaggaagctccggcttcgggcgatggagtttcctgccaggccactag

SEQ ID NO: 102044 - DNA, 1000 bp, Artificial Sequence
  derived and/or modified sequence
atcgggggatgatctggaaagcgcgatcagtgaagcggacgaacggcaggataaggcgggtctagtgacaggaatgggccgatgaagctctgtagggatgctcacaggcgcctgaagtacatatccctagctgtgctggtggtccagaatgcctccctcatcctcagcatccgctacgcccgcacgttgccaggggaccgcttctttgccaccactgctgtggtcatggcggaagtgctcaaaggtctcacctgcctgctgctgctcttcgcacagaagaggggtaacgtgaagcacctggttctcttcctccatgaggctgtcctggtgcagtatgtggacacgctcaagctcgcagtgccctctctcatctacaccttgcagaataacctccagtatgttgccatctctaacctaccagctgccactttccagccttccccgaggtgcagccaaagccatagcctctgcctctgcctccgcctccgggccctgcgttcaccagcagcctcccgggcagccaccaccaccgcagctgtcttcccaccgtggagacctcatcacggagccctttctgccaaagtcagtgctggtgaagtgagggctggcagcaatggggggacacaagggagggggactggggtggagggtgttgggcatctgcaggacccaagtcgccaccctccggggcctggctcctctgggtttgggagatggtcttttctcccaggtcactgagacttctggaggggtgtgggactagagctgggtgtcacgtgaacccttcctggtagggtgacccccttcccctggagggggttttagagctgccgcctctgctccctctaacctctttggaggcagggttgggggtattgtcattcaaggccttttttttgtctgctccctccccgaccctgtgccctcttctggaggtttctcgtctgggagagtccctcccagcagtccctccacctccataaggacacactggacaaaa

SEQ ID NO: 102045 - DNA, 657 bp, Artificial Sequence
  derived and/or modified sequence
atgaagctgtgcagagacgcccacagaagactgaagtacatcagcctggccgtgctggtggtgcagaacgccagcctgatcctgagcatcagatacgccagaaccctgcccggcgacagattcttcgccaccaccgccgtggtgatggccgaggtgctgaagggcctgacctgcctgctgctgctgttcgcccagaagagaggcaacgtgaagcacctggtgctgttcctgcacgaggccgtgctggtgcagtacgtggacaccctgaagctggccgtgcccagcctgatctacaccctgcagaacaacctgcagtacgtggccatcagcaacctgcccgccgccaccttccagcccagccccagatgcagccagagccacagcctgtgcctgtgcctgagactgagagccctgagaagccccgccgccagcagagccgccaccaccaccgccgccgtgttccccccctggagaccccaccacggcgccctgagcgccaaggtgagcgccggcgaggtgagagccggcagcaacggcggcacccagggcagaggcaccggcgtggagggcgtgggccacctgcaggaccccagcagacacccccccggccccggcagcagcggcttcggcagatggagcttcctgcccggccactag

SEQ ID NO: 102046 - protein, 332 aa, Artificial Sequence
  derived and/or modified sequence
MAAVGAGGSTAAPGPGAVSAGALEPGTASAGNVKHLVLFLHEAVLVQYVDTLKLAVPSLIYTLQNNLQYVAISNLPAATFQVTYQLKILTTALFSVLMLNRSLSRLQWASLLLLFTGVAIVQAQQAGGGGPRPLDQNPGAGLAAVVASCLSSGFAGVYFEKILKGSSGSVWLRNLQLGLFGTALGLVGLWWAEGTAVATRGFFFGYTPAVWGVVLNQAFGGLLVAVVVKYADNILKGFATSLSIVLSTVASIRLFGFHVDPLFALGAGLVIGAVYLYSLPRGAAKAIASASASASGPCVHQQPPGQPPPPQLSSHRGDLITEPFLPKSVLVK

SEQ ID NO: 102047 - DNA, 999 bp, Artificial Sequence
  derived and/or modified sequence
atggctgccgtaggtgctggcggcagcacagcagcgccagggccaggtgccgtctcagctggcgccttggaacctggcaccgctagcgctggaaacgtgaagcacctggtgctgtttctccacgaggcagtcctggtgcagtacgtcgacacactgaaattggctgtaccaagtctcatttatacgctgcagaataatctgcagtacgtggctatttctaatctgcccgccgccactttccaggtgacctaccaactgaaaatcctgactactgcactgttctccgtattgatgttgaacaggtcactgtcacggctgcagtgggcttcgctcctgcttttgttcacaggcgtggcaattgtacaggcgcagcaggccgggggaggcggcccgcgccccctagaccagaaccccggtgccgggctggccgcggtagtggccagttgtctgtccagcggctttgcaggtgtatacttcgaaaaaatcctaaaaggatccagcggcagtgtgtggctgcggaacctacagttagggctgtttggcaccgcacttggccttgtgggcttgtggtgggcagaaggcacagccgtcgctactcgcggattcttcttcggatatacacctgctgtgtggggggtggtcctgaaccaagctttcgggggacttctcgtggcagtcgtagttaagtatgctgacaatatactgaaaggcttcgcaacaagtcttagtatcgtgctttcaactgtggcttctataagacttttcggcttccacgtggacccgctgtttgcacttggcgcaggactcgtgattggtgcggtttatctgtatagcctgcctaggggcgcagccaaagccatcgcatctgcctccgcatccgcatcggggccatgcgtacatcagcagcctcctggtcagccaccccccccccagcttagctcacatcggggagacttaatcacagagccttttctgcccaaatctgtgttagtgaaatag

SEQ ID NO: 102048 - DNA, 999 bp, Artificial Sequence
  derived and/or modified sequence
atggctgctgtgggcgctgggggcagcacagctgcccctggccctggagctgtgtctgctggggccctggagcctggaacagccagcgctggaaatgtgaagcacctggtgctcttcctgcatgaagctgtgctggtgcagtatgtggacaccctgaagctggccgtgcccagcctcatctacaccctgcagaacaacctgcagtatgtggccatcagcaacctgcctgctgccaccttccaggtgacctaccagctgaagatcctgaccacagccctcttctctgtgctgatgctgaacagaagcctgagccggctgcagtgggccagcctgctgctgctcttcaccggggtggccatcgtgcaggcccagcaggccggcggcggcggcccccggcccctggaccagaaccctggggccggcctggccgctgtggtggccagctgcctgagcagcggctttgctggggtgtactttgagaagatcctgaagggcagcagcggctctgtgtggctgaggaacctgcagctgggcctgtttggaacagccctgggcctggtgggcctgtggtgggccgagggcacagctgtggccacccggggcttcttcttcggctacaccccagctgtgtggggcgtggtgctgaaccaggcctttggaggcctgctggtggccgtggtggtgaagtatgctgacaacatcctgaagggctttgccaccagcctgagcatcgtgctgagcacagtggccagcatccggctgtttggcttccacgtggaccccctgtttgccctgggcgccggcctggtgattggagctgtgtacctgtacagcctgcccagaggagctgccaaggccatcgccagcgccagcgccagcgccagcggcccctgtgtgcaccagcagcccccaggccagcccccaccaccccagctgagcagccacagaggagacctgatcacagagcccttcctgcccaagtctgtgctggtgaagtag

SEQ ID NO: 102049 - DNA, 999 bp, Artificial Sequence
  derived and/or modified sequence
atggccgccgtgggcgccggcggcagcaccgccgcccccggccccggggccgtttcagccggggccttggaacctggcacagcaagcgccggtaacgtgaaacatctcgtgctatttcttcatgaagcagttcttgttcaatacgttgacaccctgaagctggccgtgccttcccttatctacaccttgcagaacaatctccagtatgtcgccataagtaatctgccagctgcaacattccaggtcacatatcaactgaagatcttgacaaccgctctgtttagtgtactgatgcttaatcgatccttgtcccgactacagtgggcttcactgctgctgttgttcactggcgtggccatagtacaggcccagcaagctggtggtggcgggcccagacccctggaccagaatcccggcgccggactggctgcagtagtggcctcctgcctgagctcgggcttcgccggcgtctattttgagaaaatactgaaaggctcttccggatcggtctggctgaggaacctgcagttggggcttttcgggaccgcactggggctagttgggttgtggtgggccgagggtacagctgtggcgacacgcggcttctttttcggatatactcccgccgtgtggggtgtggtgctgaatcaagccttcggcgggctcttggttgctgttgtggtaaagtatgcggataatattctcaaaggatttgcgacctctttgtcaattgtgctctctaccgtggcctccatcagactgttcgggtttcacgtagaccccctgttcgccctcggcgcgggacttgtaataggtgcagtgtacctgtacagcttaccccgcggggccgcaaaagcgatagccagcgctagtgcctcagcatctggaccttgtgttcatcagcagcctcctggccaaccacccccacctcagctgagctctcacagaggcgacttaattaccgaaccttttcttcctaagtcagtgctggtgaaatag

SEQ ID NO: 102050 - DNA, 999 bp, Artificial Sequence
  derived and/or modified sequence
atggcggctgtgggggcaggcggatctacggctgctccaggacccggagccgtctcggccggagccctggagcctggaactgcaagtgccggaaacgtaaaacacctggtgctctttttacacgaggctgttctcgtccagtatgtagatactctcaaactggccgttcccagcctgatctacacgctccagaacaatctgcagtatgtcgcaatttccaatctcccagcagcaacttttcaggtcacatatcaacttaagatcctgaccacagcgctgttctcggtgctcatgcttaacaggtccctcagccggctgcagtgggccagccttttactactctttaccggagtagccatcgtgcaggctcagcaggccggaggcggaggcccacgccctctggaccagaaccctggggctggccttgccgctgtagttgcgtcttgcttgtcttctggtttcgcgggagtgtactttgaaaaaatcctaaagggctcttccggatcagtatggctgagaaatctacaactggggctattcggcaccgccttaggattggtcggcctgtggtgggcagaagggacagcggtcgctacacgaggatttttttttggatacacaccagcagtatggggcgtagtcctcaatcaggcattcggtggattattggttgccgttgtggttaaatacgccgacaacatactgaaggggttcgctacctcattgtctatcgtactgtccactgtcgcctccatacgactgttcggtttccacgtggacccgctgtttgccctgggcgctgggcttgtgatcggtgccgtgtacttgtactcattacccagaggagctgctaaggcaattgcaagcgcatcagcctcagcaagtggcccttgtgtgcatcaacagcctcccggacagcctccccctcctcagctctcctctcatcggggagacctcatcaccgaaccatttttgcccaagtccgtactggtaaaatag

SEQ ID NO: 102051 - DNA, 1424 bp, Artificial Sequence
  derived and/or modified sequence
agatgccaacatggcagcggttggggctggtggttccaccgcggcgcccgggccaggggcggtttccgcgggtgcattggagccggggaccgccagtgcgggtaacgtgaagcacctggttctcttcctccatgaggctgtcctggtgcagtatgtggacacgctcaagctcgcagtgccctctctcatctacaccttgcagaataacctccagtatgttgccatctctaacctaccagctgccactttccaggtgacataccagctgaagatcctgaccacagcgctgttctccgtgctcatgctgaatcgcagcctttcccggctgcagtgggcctccctgctgctcctcttcactggcgtcgccattgtccaggcacagcaagccggtgggggaggcccacggccactggatcagaaccctggggcaggcctggcagccgtcgtggcctcctgtctctcctccggcttcgcaggtgtctactttgagaagatcctcaaaggcagctcaggctccgtgtggctgcgcaacctgcaactgggcctcttcggcacagcactgggcctggtggggctctggtgggctgagggtaccgccgtggccacccgtggtttcttttttgggtacacacctgctgtctggggcgtggtgctcaaccaggccttcggcgggctactggtggctgtggttgtcaagtacgctgacaatatcctcaagggctttgccacctccctgtccattgtgctgtccactgttgcctccattcgcctctttggcttccacgtggacccattatttgcccttggcgctggactcgtcattggtgctgtctacctctacagccttccccgaggtgcagccaaagccatagcctctgcctctgcctccgcctccgggccctgcgttcaccagcagcctcccgggcagccaccaccaccgcagctgtcttcccaccgtggagacctcatcacggagccctttctgccaaagtcagtgctggtgaagtgagggctggcagcaatggggggacacaagggagggggactggggtggagggtgttgggcatctgcaggacccaagtcgccaccctccggggcctggctcctctgggtttgggagatggtcttttctcccaggtcactgagacttctggaggggtgtgggactagagctgggtgtcacgtgaacccttcctggtagggtgacccccttcccctggagggggttttagagctgccgcctctgctccctctaacctctttggaggcagggttgggggtattgtcattcaaggccttttttttgtctgctccctccccgaccctgtgccctcttctggaggtttctcgtctgggagagtccctcccagcagtccctccacctccataaggacacactggacaaaactcccgcagctcttca

SEQ ID NO: 102052 - DNA, 999 bp, Artificial Sequence
  derived and/or modified sequence
atggccgccgtgggcgccggcggcagcaccgccgcccccggccccggcgccgtgagcgccggcgccctggagcccggcaccgccagcgccggcaacgtgaagcacctggtgctgttcctgcacgaggccgtgctggtgcagtacgtggacaccctgaagctggccgtgcccagcctgatctacaccctgcagaacaacctgcagtacgtggccatcagcaacctgcccgccgccaccttccaggtgacctaccagctgaagatcctgaccaccgccctgttcagcgtgctgatgctgaacagaagcctgagcagactgcagtgggccagcctgctgctgctgttcaccggcgtggccatcgtgcaggcccagcaggccggcggcggcggccccagacccctggaccagaaccccggcgccggcctggccgccgtggtggccagctgcctgagcagcggcttcgccggcgtgtacttcgagaagatcctgaagggcagcagcggcagcgtgtggctgagaaacctgcagctgggcctgttcggcaccgccctgggcctggtgggcctgtggtgggccgagggcaccgccgtggccaccagaggcttcttcttcggctacacccccgccgtgtggggcgtggtgctgaaccaggccttcggcggcctgctggtggccgtggtggtgaagtacgccgacaacatcctgaagggcttcgccaccagcctgagcatcgtgctgagcaccgtggccagcatcagactgttcggcttccacgtggaccccctgttcgccctgggcgccggcctggtgatcggcgccgtgtacctgtacagcctgcccagaggcgccgccaaggccatcgccagcgccagcgccagcgccagcggcccctgcgtgcaccagcagccccccggccagcccccccccccccagctgagcagccacagaggcgacctgatcaccgagcccttcctgcccaagagcgtgctggtgaagtag

SEQ ID NO: 102053 - DNA, 255 bp, Artificial Sequence
  derived and/or modified sequence
gagggggctcgctgctgcgccctgggctcgtctttgcagagtggtccctgccctcatctctctcccccgagtaccgcctctgtccctaccttgtctgttagccatgtggctgccccatttatccacctccatcttctttgcagcctgggtggctatgggtacttcgtggccgcacatcctacagttggaaatccatccagaggccatgttccaataaacaggaggtcgtgtatttggtcacgacatttctctgac

SEQ ID NO: 102054 - protein, 421 aa, Artificial Sequence
  derived and/or modified sequence
MAAVGAGGSTAAPGPGAVSAGALEPGTASAELLLTWEEAEARGQGLPQPLPDTSVRIPAHRRLKYISLAVLVVQNASLILSIRYARTLPGDRFFATTAVVMAEVLKGLTCLLLLFAQKRGNVKHLVLFLHEAVLVQYVDTLKLAVPSLIYTLQNNLQYVAISNLPAATFQVTYQLKILTTALFSVLMLNRSLSRLQWASLLLLFTGVAIVQAQQAGGGGPRPLDQNPGAGLAAVVASCLSSGFAGVYFEKILKGSSGSVWLRNLQLGLFGTALGLVGLWWAEGTAVATRGFFFGYTPAVWGVVLNQAFGGLLVAVVVKYADNILKGFATSLSIVLSTVASIRLFGFHVDPLFALGAGLVIGAVYLYSLPRGAAKAIASASASASGPCVHQQPPGQPPPPQLSSHRGDLITEPFLPKSVLVK

SEQ ID NO: 102055 - DNA, 1266 bp, Artificial Sequence
  derived and/or modified sequence
atggctgctgtgggcgcggggggcagcaccgccgcgccagggcctggcgcagtgagcgctggggcgcttgagcctggcaccgcttctgccgagttgttactgacgtgggaagaagcggaggcaaggggccagggccttccgcaacctctgccagatacttccgtccggatccctgcgcaccggcgcttgaaatatatctcccttgcggttttagtggtacagaacgcatcgctcatcctgagcattcggtacgctcgaacactgcctggggaccgcttctttgcaactaccgccgttgttatggccgaagtgctgaaagggctgacttgtctgcttctcctgtttgcgcagaagcgtgggaacgtcaagcatctggtgctgtttttgcacgaagctgtccttgtccagtacgtggacaccctgaaactagctgtaccttccctcatttacaccctgcaaaataacctccaatacgtggccatttcaaatttacctgcggccacatttcaggtgacatatcaactgaagattctaacgacagcgttattcagcgtgctcatgctgaaccggtcactgtcccgactgcaatgggcatccctcctgctcttgttcacaggggttgctattgtacaggcccagcaagcgggcggaggggggccaaggcctctagaccagaacccgggagcagggctcgccgccgtcgtggcgtcttgcctttcttcaggctttgcgggagtgtattttgagaagatcctgaaaggcagctccggatctgtctggcttaggaatctccagctggggttgttcggcacagctttgggacttgtggggctgtggtgggcggaaggcaccgccgtagctactcggggcttcttctttggctatacgcccgctgtgtggggtgtggtactcaatcaggcgtttggtggcctgctggttgctgtggttgtcaaatacgcagacaatattctgaaaggcttcgcaactagcctcagcatcgtgctttccactgtagcgtccatcagattattcggcttccacgtggatcccctgtttgctcttggtgcagggttagtgatcggggcagtctacttgtattccctgcccaggggcgctgcgaaagccatagcctctgccagcgcctcggcgtccggcccatgcgttcaccagcagccccctggccagccacccccacctcagttgtccagtcacagaggtgatttgattactgaaccgttccttcctaagtccgtgttggtaaagtag

SEQ ID NO: 102056 - DNA, 1266 bp, Artificial Sequence
  derived and/or modified sequence
atggctgctgtgggcgctgggggcagcacagctgcccctggccctggagctgtgtctgctggggccctggagcctggaacagccagcgctgagctgctgctgacctgggaggaggccgaggcccggggccagggcctgccccagcccctgcctgacacctctgtgcgcatcccagcccaccggcggctgaagtacatcagcctggccgtgctggtggtgcagaatgccagcctcatcctgagcatccgctatgcccggaccctgcccggggaccgcttctttgccaccacagctgtggtgatggccgaggtgctgaagggcctgacctgcctgctgctgctgtttgcccagaagagaggaaatgtgaagcacctggtgctcttcctgcacgaggccgtgctggtgcagtatgtggacaccctgaagctggccgtgcccagcctcatctacaccctgcagaacaacctgcagtatgtggccatcagcaacctgcctgctgccaccttccaggtgacctaccagctgaagatcctgaccacagccctcttctctgtgctgatgctgaacagaagcctgagccggctgcagtgggccagcctgctgctgctcttcaccggggtggccatcgtgcaggcccagcaggccggcggcggcggcccccggcccctggaccagaaccctggagctggcctggccgctgtggtggccagctgcctgagcagcggctttgctggggtgtactttgagaagatcctgaagggcagcagcggctctgtgtggctgaggaacctgcagctgggcctgtttggaacagccctgggcctggtgggcctgtggtgggccgagggcacagctgtggccacccggggcttcttcttcggctacaccccagctgtgtggggcgtggtgctgaaccaggccttcggcggcctgctggtggccgtggtggtgaagtatgctgacaacatcctgaagggctttgccaccagcctgagcatcgtgctgagcacagtggccagcatccggctgtttggcttccacgtggaccccctgtttgccctgggcgccggcctggtgattggagctgtgtacctgtacagcctgcccaggggggccgccaaggccatcgccagcgccagcgccagcgccagcggcccctgtgtgcaccagcagcccccaggccagcccccaccaccccagctgagcagccacagaggagacctgatcacagagcccttcctgcccaagtctgtgctggtgaagtag

SEQ ID NO: 102057 - DNA, 1266 bp, Artificial Sequence
  derived and/or modified sequence
atggccgccgtgggcgccggcggcagcaccgccgcccccggccccggcgccgtttcagctggggcgctagaacccggtaccgctagcgccgagttgctcctgacctgggaggaggccgaggcgcgagggcagggattgccgcagcctctgcctgacacttccgttagaatcccggcccacaggcggctgaaatacataagtctcgcggtgctcgtggtacaaaatgcctcactgattttgagcattcggtacgccagaaccctccccggcgatcgcttcttcgctacaactgccgtggtcatggccgaggtcctcaagggactgacttgcctgctactgctgttcgcccagaagcgcgggaatgtgaaacacctggtgctgttcttgcacgaggcagtactggtccagtatgtcgatacgcttaagctagcagtccccagtctgatttatacactccagaacaatctccagtatgtggctataagcaatttgcctgctgcaacctttcaggtgacctaccagctgaaaattctgaccactgcacttttttccgtgctcatgctgaatcgatccctcagccggttgcagtgggccagtctgctgttattatttacaggggttgctatcgtccaggcccagcaggccggtgggggtggaccccggcctctggatcagaaccccggggctgggctggcggcggttgttgcaagttgtcttagcagcggctttgccggggtgtatttcgagaagatcctcaagggatcttcaggcagtgtatggttgagaaacctgcaacttggacttttcggaaccgccttggggcttgtcggtctctggtgggccgagggcacagctgtggccacacgtgggtttttctttgggtatacccccgctgtttggggtgtggtcctgaaccaagcgttcgggggcctgctggtagctgtggtggtgaagtacgccgataacatattgaaagggtttgccacgagcctgagcatcgtgttgtctaccgttgcgagtataaggcttttcggctttcacgtcgacccgctgtttgccctaggcgccgggcttgtgatcggcgcggtctatttgtattccctgccacggggcgcagccaaagctatcgcttccgccagtgcctcagcatctgggccttgcgtgcaccagcagcctcccgggcagcccccccctcctcagctctctagccacaggggagacctgatcacagagcccttcctgcctaaatcggtgttagttaagtag

SEQ ID NO: 102058 - DNA, 1266 bp, Artificial Sequence
  derived and/or modified sequence
atggctgctgttggggctggcggatctacggctgctccagggccaggagctgtcagcgccggagctcttgagcctgggacagcctcagcggaacttctcctgacatgggaggaagccgaggctagaggccaaggcctcccacagcctttgccagatacaagcgttcggatccctgcgcatcgaaggttaaagtatatttccttagcagtcctagttgttcagaacgctagcctgatcctatccatccggtacgcccgtacgctgcccggagacagatttttcgctacgactgccgtcgtgatggccgaggtgcttaaaggcctcacctgcctcctgctcctgttcgcccaaaaaaggggtaacgtgaagcacctggtgctttttctccatgaagcagttcttgtacagtacgttgataccttgaagcttgctgtcccgagccttatatatacgctgcagaataatctgcagtatgtcgctatctccaacctcccagccgcaacctttcaagtgacgtatcagctcaaaatcttaacgaccgcgctgttcagcgtgttgatgttgaacagatctcttagtaggctgcagtgggcctcacttttgctgctgttcacgggagtagcgatagtccaggctcaacaagccggaggtggcggacccaggccactcgatcagaacccaggtgctggactggcagcagtggtggcctcttgtctgagtagcggtttcgcgggagtgtatttcgaaaagattctcaaaggcagtagcggcagcgtgtggctacgaaacctgcagctggggctgtttggcacagcactcgggctcgtgggattgtggtgggcagagggaacagctgtagccacacggggtttcttcttcggatatactcctgctgtttggggcgttgtgctgaaccaggcctttggcggactgctagtggcggtcgttgtgaagtatgcggacaacatcctcaaaggattcgctacatccctgtctatcgttctgtctaccgtcgctagtatcagattgttcggtttccacgtggatccattattcgccctaggcgctggattggtgatcggagccgtgtatttgtacagcttgcctagaggtgccgctaaggctatcgcctccgctagtgcaagcgccagcggcccttgcgttcaccagcagccgcctggccagcctccaccaccacagctgagctcccataggggcgacctcatcactgagccattcctgccgaagtctgtgctggtgaaatag

SEQ ID NO: 102059 - DNA, 1563 bp, Artificial Sequence
  derived and/or modified sequence
agatgccaacatggcagcggttggggctggtggttccaccgcggcgcccgggccaggggcggtttccgcgggtgcattggagccggggaccgccagtgcggagttgcttctcacttgggaggaagccgaggcgcgtggccagggtttgcctcagccattacctgacacctcagtaaggattccagctcacaggcgcctgaagtacatatccctagctgtgctggtggtccagaatgcctccctcatcctcagcatccgctacgcccgcacgttgccaggggaccgcttctttgccaccactgctgtggtcatggcggaagtgctcaaaggtctcacctgcctgctgctgctcttcgcacagaagaggggtaacgtgaagcacctggttctcttcctccatgaggctgtcctggtgcagtatgtggacacgctcaagctcgcagtgccctctctcatctacaccttgcagaataacctccagtatgttgccatctctaacctaccagctgccactttccaggtgacataccagctgaagatcctgaccacagcgctgttctccgtgctcatgctgaatcgcagcctttcccggctgcagtgggcctccctgctgctcctcttcactggcgtcgccattgtccaggcacagcaagccggtgggggaggcccacggccactggatcagaaccctggggcaggcctggcagccgtcgtggcctcctgtctctcctccggcttcgcaggtgtctactttgagaagatcctcaaaggcagctcaggctccgtgtggctgcgcaacctgcaactgggcctcttcggcacagcactgggcctggtggggctctggtgggctgagggtaccgccgtggccacccgtggtttcttttttgggtacacacctgctgtctggggcgtggtgctcaaccaggccttcggcgggctactggtggctgtggttgtcaagtacgctgacaatatcctcaagggctttgccacctccctgtccattgtgctgtccactgttgcctccattcgcctctttggcttccacgtggacccattatttgcccttggcgctggactcgtcattggtgctgtctacctctacagccttccccgaggtgcagccaaagccatagcctctgcctctgcctccgcctccgggccctgcgttcaccagcagcctcccgggcagccaccaccaccgcagctgtcttcccaccgtggagacctcatcacggagccctttctgccaaagtcagtgctggtgaagtgagggctggcagcaatggggggacacaagggagggggactggggtggagggtgttgggcatctgcaggacccaagtcgccaccctccggggcctggctcctctgggtttgggagatggtcttttctcccaggtcactgagacttctggaggggtgtgggactagagctgggtgtcacgtgaacccttcctggtagggtgacccccttcccctggagggggttttagagctgccgcctctgctccctctaacctctttggaggcagggttgggggtattgtcattcaagg

SEQ ID NO: 102060 - DNA, 1266 bp, Artificial Sequence
  derived and/or modified sequence
atggccgccgtgggcgccggcggcagcaccgccgcccccggccccggcgccgtgagcgccggcgccctggagcccggcaccgccagcgccgagctgctgctgacctgggaggaggccgaggccagaggccagggcctgccccagcccctgcccgacaccagcgtgagaatccccgcccacagaagactgaagtacatcagcctggccgtgctggtggtgcagaacgccagcctgatcctgagcatcagatacgccagaaccctgcccggcgacagattcttcgccaccaccgccgtggtgatggccgaggtgctgaagggcctgacctgcctgctgctgctgttcgcccagaagagaggcaacgtgaagcacctggtgctgttcctgcacgaggccgtgctggtgcagtacgtggacaccctgaagctggccgtgcccagcctgatctacaccctgcagaacaacctgcagtacgtggccatcagcaacctgcccgccgccaccttccaggtgacctaccagctgaagatcctgaccaccgccctgttcagcgtgctgatgctgaacagaagcctgagcagactgcagtgggccagcctgctgctgctgttcaccggcgtggccatcgtgcaggcccagcaggccggcggcggcggccccagacccctggaccagaaccccggcgccggcctggccgccgtggtggccagctgcctgagcagcggcttcgccggcgtgtacttcgagaagatcctgaagggcagcagcggcagcgtgtggctgagaaacctgcagctgggcctgttcggcaccgccctgggcctggtgggcctgtggtgggccgagggcaccgccgtggccaccagaggcttcttcttcggctacacccccgccgtgtggggcgtggtgctgaaccaggccttcggcggcctgctggtggccgtggtggtgaagtacgccgacaacatcctgaagggcttcgccaccagcctgagcatcgtgctgagcaccgtggccagcatcagactgttcggcttccacgtggaccccctgttcgccctgggcgccggcctggtgatcggcgccgtgtacctgtacagcctgcccagaggcgccgccaaggccatcgccagcgccagcgccagcgccagcggcccctgcgtgcaccagcagccccccggccagcccccccccccccagctgagcagccacagaggcgacctgatcaccgagcccttcctgcccaagagcgtgctggtgaagtag

SEQ ID NO: 102061 - protein, 142 aa, Artificial Sequence
  derived and/or modified sequence
MLLAQINRDSQGMTEFPGGGMEAQHVTLCLTEAVTVADGDNLENMEGVSLQAVTLADGSTAYIQHNSKDAKLIDGQVIQLEDGSAAYVQHVPIPKSRDSLRLEDGQAVQLEDGTTAFIHHTSKDSYDQSALQAVQLEDGTTA

SEQ ID NO: 102062 - protein, 84 aa, Artificial Sequence
  derived and/or modified sequence
MLLAQINRDSQGMTEFPGGGMEAQHVTLCLTEAVTVADGDNLENMEGVSLQAVTLADGSTAYIQHNSKDAKLIDGQVIQLEDGS

SEQ ID NO: 102063 - protein, 73 aa, Artificial Sequence
  derived and/or modified sequence
MLLAQINRDSQGMTEFPGGGMEAQHVTLCLTEAVTVADGDNLENMEGVSLQAVTLADGSTAYIQHNSKDAKLI

SEQ ID NO: 102064 - DNA, 429 bp, Artificial Sequence
  derived and/or modified sequence
atgctgctggcccagatcaacagagacagccagggcatgaccgagttccccggcggcggcatggaggcccagcacgtgaccctgtgcctgaccgaggccgtgaccgtggccgacggcgacaacctggagaacatggagggcgtgagcctgcaggccgtgaccctggccgacggcagcaccgcctacatccagcacaacagcaaggacgccaagctgatcgacggccaggtgatccagctggaggacggcagcgccgcctacgtgcagcacgtgcccatccccaagagcagagacagcctgagactggaggacggccaggccgtgcagctggaggacggcaccaccgccttcatccaccacaccagcaaggacagctacgaccagagcgccctgcaggccgtgcagctggaggacggcaccaccgcctag

SEQ ID NO: 102065 - DNA, 429 bp, Artificial Sequence
  derived and/or modified sequence
atgctgcttgcccaaataaaccgggattctcaggggatgacggagtttcccggaggaggtatggaagctcaacatgttaccctgtgtctcaccgaggctgtgacagttgccgacggggataacctggaaaatatggagggagttagcttacaggctgtgacccttgcagatgggagtacggcgtacatacagcataactccaaggatgccaagctcatcgacggacaggttatccagctggaagatggaagtgcagcgtacgtacagcacgtgcccattccgaagtcccgcgacagcctcaggctcgaagatggtcaagctgtgcagctggaagacggcacaaccgcctttatccaccatacatctaaagattcttatgatcagtccgctctgcaggccgtgcaattagaagacggtactactgcttag

SEQ ID NO: 102066 - DNA, 429 bp, Artificial Sequence
  derived and/or modified sequence
atgctgctggcccagatcaacagagacagccagggcatgacagagttccctgggggcggcatggaggcccagcacgtgaccctgtgcctgacagaagctgtgacagtggctgatggagacaacctggagaacatggagggcgtgtccctgcaggccgtgaccctggctgatggcagcacagcctacatccagcacaacagcaaggatgccaagctgattgatggccaggtgatccagctggaggatggcagcgctgcctacgtgcagcacgtgcccatccccaagagccgggacagcctgcggctggaggatggccaggccgtgcagctggaggatggcaccacagccttcatccaccacaccagcaaggacagctatgaccagagcgccctgcaggccgtgcagctggaggatggcaccacagcctag

SEQ ID NO: 102067 - DNA, 429 bp, Artificial Sequence
  derived and/or modified sequence
atgctgctggcccagatcaaccgggacagccagggcatgaccgagtttcctggaggtgggatggaggcccagcatgtgaccctatgtctgactgaagcagtaaccgtggctgacggagacaacttagagaatatggaaggtgtgagccttcaggccgtaacacttgccgatggctccactgcatatatccagcacaattctaaggacgccaagctgatcgacggacaggtgatccagctggaagatggttccgctgcatatgtccagcatgtcccaatacctaagtctcgcgatagcctcaggcttgaggatggacaggccgtgcagctggaggatgggaccaccgcgttcatccatcacacatcaaaggatagctacgatcagtcagccctgcaggccgtccagctcgaagatggaacaacggcatag

SEQ ID NO: 102068 - DNA, 429 bp, Artificial Sequence
  derived and/or modified sequence
atgttgcttgcccagattaacagggactctcagggcatgacggagttccctggcggagggatggaggctcagcatgtgactctatgcctgacagaggccgtgactgtagcggacggcgacaatctcgaaaatatggagggcgtttccctgcaggctgttacactcgcagacggttctaccgcatacattcaacacaacagtaaagatgcgaagctgattgatggacaagtgatccagctcgaggacggatctgcggcttatgtgcaacacgtgcctataccaaaatcacgtgacagtctgcgactcgaggatggccaggcagtgcagctcgaagacgggaccacagcgttcatccaccacacatccaaagactcatatgaccagtctgccctacaggccgtccaactcgaagacgggactacagcctag

SEQ ID NO: 102069 - protein, 607 aa, Artificial Sequence
  derived and/or modified sequence
MLLAQINRDSQGMTEFPGGGMEAQHVTLCLTEAVTVADAKLIDGQVIQLEDGSAAYVQHVPIPKSTGDSLRLEDGQAVQLEDGTTAFIHHTSKDSYDQSALQAVQLEDGTTAYIHHAVQVPQSDTILAIQADGTVAGLHTGDATIDPDTISALEQYAAKVSIDGSESVAGTGMIGENEQEKKMQIVLQGHATRVTAKSQQSGEKAFRCEYDGCGKLYTTAHHLKVHERSHTGDRPYQCEHAGCGKAFATGYGLKSHVRTHTGEKPYRCSEDNCTKSFKTSGDLQKHIRTHTGERPFKCPFEGCGRSFTTSNIRKVHVRTHTGERPYYCTEPGCGRAFASATNYKNHVRIHTGEKPYVCTVPGCDKRFTEYSSLYKHHVVHTHSKPYNCNHCGKTYKQISTLAMHKRTAHNDTEPIEEEQEAFFEPPPGQGEDVLKGSQITYVTGVEGDDVVSTQVATVTQSGLSQQVTLISQDGTQHVNISQADMQAIGNTITMVTQDGTPITVPAHDAVISSAGTHSVAMVTAEGTEGEQVAIVAQDLAAFHTASSEMGHQQHSHHLVTTETRPLTLVATSNGTQIAVQLGEQPSLEEAIRIASRIQQGETPGLDD

SEQ ID NO: 102070 - DNA, 1824 bp, Artificial Sequence
  derived and/or modified sequence
atgctgctggcccagatcaacagagacagccagggcatgaccgagttccccggcggcggcatggaggcccagcacgtgaccctgtgcctgaccgaggccgtgaccgtggccgacgccaagctgatcgacggccaggtgatccagctggaggacggcagcgccgcctacgtgcagcacgtgcccatccccaagagcaccggcgacagcctgagactggaggacggccaggccgtgcagctggaggacggcaccaccgccttcatccaccacaccagcaaggacagctacgaccagagcgccctgcaggccgtgcagctggaggacggcaccaccgcctacatccaccacgccgtgcaggtgccccagagcgacaccatcctggccatccaggccgacggcaccgtggccggcctgcacaccggcgacgccaccatcgaccccgacaccatcagcgccctggagcagtacgccgccaaggtgagcatcgacggcagcgagagcgtggccggcaccggcatgatcggcgagaacgagcaggagaagaagatgcagatcgtgctgcagggccacgccaccagagtgaccgccaagagccagcagagcggcgagaaggccttcagatgcgagtacgacggctgcggcaagctgtacaccaccgcccaccacctgaaggtgcacgagagaagccacaccggcgacagaccctaccagtgcgagcacgccggctgcggcaaggccttcgccaccggctacggcctgaagagccacgtgagaacccacaccggcgagaagccctacagatgcagcgaggacaactgcaccaagagcttcaagaccagcggcgacctgcagaagcacatcagaacccacaccggcgagagacccttcaagtgccccttcgagggctgcggcagaagcttcaccaccagcaacatcagaaaggtgcacgtgagaacccacaccggcgagagaccctactactgcaccgagcccggctgcggcagagccttcgccagcgccaccaactacaagaaccacgtgagaatccacaccggcgagaagccctacgtgtgcaccgtgcccggctgcgacaagagattcaccgagtacagcagcctgtacaagcaccacgtggtgcacacccacagcaagccctacaactgcaaccactgcggcaagacctacaagcagatcagcaccctggccatgcacaagagaaccgcccacaacgacaccgagcccatcgaggaggagcaggaggccttcttcgagcccccccccggccagggcgaggacgtgctgaagggcagccagatcacctacgtgaccggcgtggagggcgacgacgtggtgagcacccaggtggccaccgtgacccagagcggcctgagccagcaggtgaccctgatcagccaggacggcacccagcacgtgaacatcagccaggccgacatgcaggccatcggcaacaccatcaccatggtgacccaggacggcacccccatcaccgtgcccgcccacgacgccgtgatcagcagcgccggcacccacagcgtggccatggtgaccgccgagggcaccgagggcgagcaggtggccatcgtggcccaggacctggccgccttccacaccgccagcagcgagatgggccaccagcagcacagccaccacctggtgaccaccgagaccagacccctgaccctggtggccaccagcaacggcacccagatcgccgtgcagctgggcgagcagcccagcctggaggaggccatcagaatcgccagcagaatccagcagggcgagacccccggcctggacgactag

SEQ ID NO: 102071 - DNA, 1824 bp, Artificial Sequence
  derived and/or modified sequence
atgttgctggcccagatcaatagagactcacaggggatgactgaattcccagggggcggcatggaggcacagcatgtaacgctttgccttactgaggccgttacagtggctgacgcgaagctgattgacggccaagttattcaattggaagacggctctgcagcatacgtccaacatgttcccatacctaaaagcacgggggattccctgcgcctggaagatggccaggccgtccaactggaggatggaaccacagctttcattcaccacacttccaaggactcatatgatcaaagtgctttgcaggctgttcaattggaagatgggacaaccgcgtacatccatcacgcagtgcaggttccccagtccgacacaatcctcgctatccaagctgatggtacggttgccgggttacacacaggcgatgcgactattgaccctgataccataagcgctctggagcagtacgccgcaaaggtatctatcgatgggagtgagtctgtggctggcaccggaatgatcggggagaacgaacaggagaagaagatgcagatagtcctgcaggggcacgctacccgcgtcacggcaaagagccaacagagtggggagaaagctttccggtgcgaatatgacgggtgcggaaagctctacactacagctcatcatctgaaggtacatgaacgttcccacaccggagaccgaccttatcaatgtgaacatgctggctgcggcaaagccttcgccaccggctacgggttaaaatcacacgtgaggacccatacaggtgaaaagccttacaggtgttcggaggataattgtactaaaagctttaaaactagcggggatctgcaaaagcacatcagaacacatacaggggagcggccttttaagtgtccctttgagggttgtggacggtcctttaccaccagcaatattagaaaggttcatgtacgtacacacaccggcgagcgaccctactattgcaccgagcctgggtgcggccgcgcattcgcaagtgcaaccaactacaaaaaccacgtgaggatccacacaggcgaaaaaccttatgtgtgcactgtgcccggctgtgataaacgttttaccgaatatagttcattatataagcatcacgtcgtccacactcattccaagccatacaactgtaatcactgtggcaagacctacaagcaaatttccaccctcgcgatgcataaaaggacagcgcataacgacacagagcctatcgaggaagagcaggaggcgtttttcgaacccccacctggacagggagaggatgtcttaaaaggctcccaaatcacatatgtgacgggcgtcgagggagacgacgttgttagcactcaagtggctacagtcacacaatccgggctctctcaacaggtaacgctcatctcacaagacgggacccagcacgtgaatatttcgcaagccgacatgcaggctataggcaatactatcacaatggtcacccaggatggcaccccgataacggtgccggctcacgatgctgtgatcagttccgcgggaacacactctgtggcaatggtgaccgctgaaggcactgaaggtgaacaagtcgccatcgtagcccaggacctcgctgctttccatacagcatcttcggaaatgggccaccagcagcatagtcatcatcttgtaacgacggaaactcgcccactcacactggtggccaccagtaacggaactcaaatcgcggtccagctgggcgagcagccgtccctggaagaggcgattcgcatcgcctcaaggattcaacagggcgagacaccaggattggatgactag

SEQ ID NO: 102072 - DNA, 1824 bp, Artificial Sequence
  derived and/or modified sequence
atgctgctggcccagatcaacagagacagccagggcatgacagagttccctgggggcggcatggaggcccagcacgtgaccctgtgcctgacagaagctgtgacagtggctgatgccaagctgattgatggccaggtgatccagctggaggatggcagcgctgcctacgtgcagcacgtgcccatccccaagagcactggagacagcctgcggctggaggatggccaggccgtgcagctggaggatggcaccacagccttcatccaccacaccagcaaggacagctatgaccagagcgccctgcaggccgtgcagctggaggatggcaccacagcctacatccaccacgctgtgcaggtgccccagagcgacaccatcctggccatccaggctgatggcaccgtggccggcctgcacactggagatgccaccattgatcctgacaccatcagcgccctggagcagtatgctgccaaggtgtccattgatggcagcgagagcgtggccggcaccggcatgattggagaaaatgagcaggagaagaagatgcagatcgtgctgcagggccacgccaccagggtgacagccaagagccagcagagcggggagaaggccttccgctgtgaatatgatggctgcggcaagctgtacaccacagcccaccacctgaaggtgcatgagaggagccacactggagaccggccctaccagtgtgagcacgccggctgcggcaaggcctttgccaccggctacggcctgaagagccacgtgaggacccacactggagagaagccctaccgctgcagcgaggacaactgcaccaagagcttcaagaccagcggggacctgcagaagcacatccgcacccacactggagagcggcccttcaagtgcccctttgagggctgcggccgctccttcaccaccagcaacatcaggaaggtgcacgtgaggacccacactggagagcggccctactactgcacagagcccggctgcggccgggcctttgccagcgccaccaactacaagaaccacgtgcgcatccacactggagagaagccctacgtgtgcaccgtgcccggctgtgacaagcgcttcacagagtacagcagcctgtacaagcaccacgtggtgcacacccacagcaagccctacaactgcaaccactgcggcaagacctacaagcagatcagcaccctggccatgcacaagaggacagcccacaatgacacagagcccatcgaggaggagcaggaggccttctttgagcccccacctggccagggagaagatgtgctgaagggcagccagatcacctacgtgactggagtggagggagatgatgtggtgtccacccaggtggccaccgtgacccagagcggcctgagccagcaggtgaccctcatcagccaggacggcacccagcacgtgaacatcagccaggccgacatgcaggccatcggcaacaccatcaccatggtgacccaggacggcacccccatcaccgtgcctgcccatgatgctgtgatcagcagcgctggcacccacagcgtggccatggtgacagctgagggcacagaaggagagcaggtggccatcgtggcccaggacctggccgccttccacacagccagcagcgagatgggccaccagcagcacagccaccacctggtgaccacagagacccggcccctgaccctggtggccaccagcaatggcacccagattgctgtgcagctgggggagcagcccagcctggaggaggccatcagaattgccagccgcatccagcagggcgagaccccaggcctggatgactag

SEQ ID NO: 102073 - DNA, 1824 bp, Artificial Sequence
  derived and/or modified sequence
atgctgctggcccagatcaaccgggacagccagggcatgaccgagtttcccggcggagggatggaggcacagcacgtcaccctgtgccttacagaggccgtgacagtcgccgacgctaagctgatcgacgggcaggtgatccaattggaggacggaagcgctgcctatgtgcaacatgtccctataccaaagagcaccggtgattcgcttcggctggaggacggccaggcagtacagctcgaggatggcacaacggcgtttatccaccacacctctaaggactcatatgatcagagcgccctccaggccgtgcaactggaagacggaacaacagcctatatacatcacgctgtgcaagtgccgcaaagcgatactatcttggcgatccaggccgatgggacagtggcaggtcttcataccggcgacgctactatagatcccgacactatcagtgctctagagcagtacgctgccaaggtgagcatcgatgggtcagagtccgtcgctggtacgggcatgattggggagaacgagcaggagaaaaaaatgcagatcgtgttacaggggcatgccactcgagtgactgccaaatctcaacagtccggggaaaaggccttccggtgcgagtacgatggatgcggcaagttgtacacaactgctcaccacctcaaggtgcatgaacggtcacacaccggcgatcgcccatatcagtgcgaacatgccgggtgcggaaaggcatttgccaccgggtatgggctgaagagccacgtccggactcacactggtgagaagccataccgatgcagtgaagacaactgcacaaagtctttcaaaacatccggtgatctacagaaacacattcgcacacacactggggagcggcccttcaagtgtcctttcgagggttgtggaagaagctttacgacgagcaacattagaaaggtgcacgtcaggacacataccggcgagcggccttactactgtacggaaccagggtgcggtcgggctttcgccagcgccacaaattacaagaatcacgtacgcatacatacaggcgagaagccctatgtgtgcacagtgcccgggtgcgacaaacgtttcactgaatactcaagcctgtacaagcatcatgtcgtgcatactcatagcaagccatataattgcaatcactgtggaaagacatataagcagatttctaccctggctatgcataagcgaacagcccacaacgataccgaacctattgaggaggaacaggaagcctttttcgaacctccacctgggcaaggagaggacgtgcttaaggggtcacagataacgtacgttaccggcgtggagggcgacgacgtggttagtacacaggtggctacagtcactcaaagcggactgtcccagcaggtcaccctgatcagccaggacggcactcaacacgtgaatattagtcaggctgacatgcaggctatcgggaacaccataacgatggtaacccaggacggcacacccatcaccgttcccgctcacgacgcagtaatctcgtctgctggcacccatagtgttgctatggtgacagccgaaggtactgaaggcgaacaagtcgccatagtcgctcaggacctggctgcctttcatacagcttcaagcgaaatgggtcaccaacagcactcgcatcacctggtcacgactgagaccaggccgctgacgctcgtagcaactagtaacggcacccaaattgctgtccagcttggtgagcaaccttcactggaggaagccatcagaatagcctcacgaattcagcagggagaaacgcccggcctggatgattag

SEQ ID NO: 102074 - DNA, 1824 bp, Artificial Sequence
  derived and/or modified sequence
atgctgttggcacagatcaaccgcgacagccaggggatgaccgagttccctggcggtggcatggaagcgcaacatgtcactctgtgtctgaccgaggcagtcacagtggctgacgcaaagttgatagacggacaggttattcaactcgaggatggcagtgcagcttacgtgcaacacgtgcctattcctaaatccaccggagattcgctccgccttgaagacggacaggccgttcagctcgaagacggaacaacagcgttcattcatcacacctcgaaggattcttacgaccagagtgccctgcaggcagtccagctcgaagacggtaccaccgcctacatccaccacgccgtccaagtgccccagtctgatacaatcctcgctattcaagccgacggcactgttgccggactccacaccggcgatgctactatcgacccagatacaataagcgcattggaacagtatgctgcaaaagttagtatcgacggcagcgaatctgtggcgggtactggcatgattggcgagaatgaacaggagaaaaagatgcagatcgtgctccagggtcatgccaccagggtcacagccaaatctcagcaatctggcgaaaaagccttccgttgcgaatacgacggttgcggtaagctctacactaccgcccaccatctgaaagttcacgaaaggagccacactggagatcgcccatatcagtgcgagcacgcaggatgtggcaaagccttcgcgaccggctatggacttaagagccacgtgagaacccacacaggtgaaaaaccttaccgctgctccgaggacaactgtacgaaatcttttaaaacatcaggcgatctgcagaagcacattagaacgcataccggcgaaaggccctttaaatgtccatttgaagggtgcggacggtctttcactacctccaacattcgtaaggtccacgttaggacacataccggtgaaagaccgtactactgcactgagcccggatgtggacgggcttttgccagcgctacaaactacaaaaaccatgttaggatccacacaggtgagaagccctacgtctgcactgtcccgggttgtgacaagcggttcacagagtattccagcctgtataagcatcacgtggtgcacacacacagcaagccatacaattgcaaccattgtggcaaaacctataagcagatttccacactggctatgcataaacggacggctcataacgacaccgaacccatcgaggaggagcaggaggccttttttgaacctccaccaggtcagggggaagatgtgctcaaggggtcacagataacgtacgtgactggtgttgaaggcgatgacgtagtgtccactcaagttgccaccgtcactcagagtggccttagtcagcaggttaccttgatcagccaggacggcacgcagcacgtgaatatctcgcaggcagacatgcaggcaatcgggaataccatcacaatggtcacacaggatggaacacccataacggttcctgcccatgatgcagtaattagctccgccggtactcactctgttgcaatggtgaccgccgagggtactgagggcgagcaggtggctattgtggcccaggatctggctgcattccataccgcttcctctgagatgggccaccagcagcatagtcaccacctggtaactaccgagacaagaccactcactttggttgctactagcaacggtacccagattgcggtgcaactgggggaacagccctcgttggaagaggccatccgtatcgcctcacgcatccagcagggagagacacctggccttgacgattag

SEQ ID NO: 102075 - DNA, 1954 bp, Artificial Sequence
  derived and/or modified sequence
gcgggttgcggggcctgggggccggacggctgtttcctgtcctggtgcatggtggtcggacgaaggaattgttggaaaattttctcggaggtagaagatgttgttagcccaaataaatcgagattctcagggaatgacagagtttcctggaggagggatggaggcgcaacatgttacgctgtgcttgacagaggcagtcaccgtggcagatgcaaaactcatagatggccaggtcattcagttggaagatggttctgcggcctatgttcaacatgtacccatacctaaaagtacaggggacagtttgcgtctagaggatggtcaagcagtacagttagaagatggtaccacagcatttattcaccacacctccaaagatagttatgaccagagtgcattacaggcggttcagctggaagatggtaccacagcttatatccaccatgcagtgcaagtcccgcagtctgacaccatcttggcaattcaggctgatgggacagtggcaggtctgcacactggggatgctacaattgaccctgacaccatcagtgctttggaacagtatgcagcaaaggtgtccattgatggaagtgaaagtgtagcaggtactggaatgattggagaaaatgagcaagagaaaaaaatgcagattgttttacaaggacatgctacaagagtaactgctaaatctcaacagagtggagagaaggcatttcgatgtgaatatgatggatgtggaaaattatatacaacagctcatcatctcaaggtccatgagaggtcacacacaggagatcggccttatcagtgtgagcatgcaggctgtgggaaggcatttgcaacaggttatggattaaaaagtcacgtcagaactcatacaggagaaaagccatatcggtgttcggaagataattgtactaaatctttcaaaacttcaggagatctacagaaacacatcagaactcatacaggagaaaggccctttaagtgtcccttcgaaggctgcggtcggtcctttacaacatcaaatatcagaaaagtgcacgttaggacacacacaggagaaagaccttattactgcacagagccaggatgtgggagggcatttgccagtgcaacaaattataaaaaccatgtgaggatacacacaggagaaaagccatatgtttgtacagttcctgggtgtgacaaaaggtttacagaatattccagtttgtacaaacatcatgttgtccacactcattccaaaccttacaactgtaaccactgtgggaagacatacaagcagatctccacgctggccatgcacaaacggacagcccacaacgacactgagcccatcgaggaggagcaggaagccttctttgagccgcccccaggtcaaggtgaagatgttcttaaagggtcccagattacgtatgttacaggtgtagaaggggacgacgttgtttctacacaagtagccacagtaacccaatctggactgagtcaacaagttacactcatatcccaggatgggactcagcatgtcaacatatctcaagctgacatgcaggccattggcaacaccatcacaatggtaacgcaggatggcacgcccatcacagtccccgcccatgatgcagtcatctcctcagcaggaacgcactctgttgctatggttactgctgagggtacagaaggggaacaggttgcaattgtagctcaagacttggcagcattccatactgcctcatcagaaatggggcaccagcagcatagccatcacttagtaaccacagaaaccagacctctgaccttagtagcaacatccaatggcacccagattgcagttcagcttggagaacagccatctctggaagaagccatcagaatagcgtctagaatccaacaaggagaaacgccagggttggatgattaatcctcagaacaatggagcaataaagcagaagga

SEQ ID NO: 102076 - protein, 145 aa, Artificial Sequence
  derived and/or modified sequence
MDENYNLLPHGVNFQDAIFPDTQENRRMFSSLFQFSNCSQGQQLATFSSDWEIQEDSRLMCSSVQKALFEEEDHVKKLQQKVATLEKRNRQLRERVKKVKRSLRQARKKGRHLELANQKLSEKLAAGALPHINARGPVRPPYLRG

SEQ ID NO: 102077 - DNA, 438 bp, Artificial Sequence
  derived and/or modified sequence
atggatgagaactacaacttactaccacacggcgtcaactttcaggatgccatcttcccagacactcaggagaatagaagaatgttcagtagcctttttcaattttccaattgttctcagggccagcaattggctacgttttctagtgattgggaaatacaagaagactcaagattgatgtgttctagtgtccagaaggccctcttcgaagaggaggatcatgtgaaaaagctgcagcagaaggtcgcaacattagaaaagcgcaacaggcagctgagggagcgcgtgaaaaaggttaagcgaagcttacgacaggcgagaaaaaagggcaggcatctggagttagctaatcagaaactgtcagagaaactggcagccggagccctgcctcacattaacgctagaggacctgtccgcccaccataccttcgcggatag

SEQ ID NO: 102078 - DNA, 438 bp, Artificial Sequence
  derived and/or modified sequence
atggatgaaaactacaacctgctcccacacggcgtgaatttccaggacgcaatttttcccgatactcaggaaaacaggagaatgttttcctccttgttccagttctcaaactgttcccaaggacagcagttagccacgttctcatcggactgggagatacaggaagattcacgcctgatgtgttcatccgtccagaaggcattgtttgaagaggaggatcatgtgaagaaattacaacagaaggtcgccacacttgagaaacggaatcgccagttaagagaaagagtcaaaaaagttaaaagatcactgcgtcaggcccgaaagaaaggtcgacacctcgagcttgcgaaccaaaagttgtccgaaaaactggcggctggtgcattgcctcacatcaatgcgaggggccccgttagacccccatatttaagagggtag

SEQ ID NO: 102079 - DNA, 438 bp, Artificial Sequence
  derived and/or modified sequence
atggacgaaaactacaatttactgcctcacggcgtcaactttcaagacgctatcttccccgatacacaggagaaccgtcggatgtttagtagtctattccaattcagtaactgttcccaaggtcagcagctcgcaactttcagctccgactgggaaattcaggaagactctcggctcatgtgttcctccgtacagaaggcccttttcgaggaggaagaccacgttaaaaagctgcagcagaaggttgctacactcgaaaaaaggaacagacagttaagagaaagggttaaaaaggttaaaagaagtttaagacaggcacggaaaaagggaagacatctggaactggctaatcagaaactttccgagaagctggccgcaggcgccttgccccatatcaacgctagaggtcccgtgagaccaccatacttgagaggatag

SEQ ID NO: 102080 - DNA, 438 bp, Artificial Sequence
  derived and/or modified sequence
atggacgagaactacaacctgctgccccacggcgtgaacttccaggacgccatcttccccgacacccaggagaacagaagaatgttcagcagcctgttccagttcagcaactgcagccagggccagcagctggccaccttcagcagcgactgggagatccaggaggacagcagactgatgtgcagcagcgtgcagaaggccctgttcgaggaggaggaccacgtgaagaagctgcagcagaaggtggccaccctggagaagagaaacagacagctgagagagagagtgaagaaggtgaagagaagcctgagacaggccagaaagaagggcagacacctggagctggccaaccagaagctgagcgagaagctggccgccggcgccctgccccacatcaacgccagaggccccgtgagacccccctacctgagaggctag

SEQ ID NO: 102081 - DNA, 438 bp, Artificial Sequence
  derived and/or modified sequence
atggacgagaactacaatctgttaccacacggcgttaactttcaggacgcaattttccccgacactcaggaaaataggcgaatgttttctagtctcttccagttctcgaattgcagccaaggacagcaactagccacctttagttccgactgggaaattcaagaagatagtcggcttatgtgctcatcggtgcagaaagcactgtttgaggaggaagatcacgtgaagaagctgcagcaaaaagtggccactttggagaaacgcaatcggcagctccgtgagagggtcaagaaggtgaagcggtcactgcgccaagcaaggaagaaaggccggcacttggaactggcgaaccagaagctgagcgaaaaactggcagcaggtgcactaccgcatattaacgccagaggtcctgtgaggccaccttatctgcgtggctag

SEQ ID NO: 102082 - DNA, 438 bp, Artificial Sequence
  derived and/or modified sequence
atggatgagaactacaacctgctgccccacggcgtgaacttccaggatgccatcttcccagacacccaggagaacagaaggatgttcagcagcctcttccagttcagcaactgcagccagggccagcagctggccaccttcagcagtgactgggagatccaggaggacagccggctgatgtgcagctctgtgcagaaggccctgtttgaggaggaggaccacgtgaagaagctgcagcagaaggtggccaccctggagaagaggaaccggcagctgcgggagcgggtgaagaaggtgaagaggagcctgcggcaggccaggaagaagggccgccacctggagctggccaaccagaagctgtctgagaagctggccgccggggccctgccccacatcaatgcccggggccctgtgcggcccccctacctgcggggctag

SEQ ID NO: 102083 - DNA, 3180 bp, Artificial Sequence
  derived and/or modified sequence
aatacactcaaaaagcagaaagcctgcaggatgcttcttgggctcttgttgcggacgaataggctcggctattcttgttgctgaagaatagcctctgctggtgtggaggagggaagctgcccccggattagacagcaggatgacaaggaaaaaggcagatgcgccctctcctggtatctccgaaggattctgcttcgctgtctggacctcctgctgcctggccaagcctgactctcaaccctgcccctgaggctaaccccaagagcagggcagagaagcaagcaagtcagcgactgccccagacccaattccgggccctcgagttggtgtggtgtaggaggggcagatgaggctagaggctgctttataaggagcagaaaagacggtgtcacagctgtaccctgggatcggcagaaaagggtccccccggggcctgtaaggggtgcctgcgtaacaggtgacttgaatttcaagtgattatcatataaatggaggattagaaaagagacaccaactctggaaccagttcaatggaattcttcaagagactgtaacttagtgcttacaaagacttggaatgatctacactgcatggtgtacctgttagaggaggtgacatcaaagctttaggtactgagagaggatacttcctactgtggaagggaagaaaagaaaaaagcaaagctacttcttggaagagcagtggagagaaaaatattgtttctttttcttgggaaattggcagaggcatgctgaagaaatcagctacagctgttctccacacctggataaatttttaataagaacttaacacacccgccctccagaaagggtggtctgaggtgtcgatggtgttgtctctcccagggctcttctgggcagccttctctgtgacctggagagcgaagagtctatttccatcacatttcagctgccaaactcccctttaaacgatggatgaaaattataacctcttgcctcacggagtcaatttccaagatgccatcttcccagacactcaagagaacagaaggatgttttctagccttttccagttttcaaactgttcgcaagggcagcagctggcgactttctccagtgactgggaaatccaggaagacagtaggctcatgtgctcctcggtgcagaaggccttgtttgaggaggaggaccacgtcaagaaactgcagcagaaagtggccaccctggagaagcgcaaccggcagctccgggagcgagtgaagaaggtcaagaggtccttgcggcaggcgcgtaagaagggccgccacctggagctggcgaaccagaaactcagtgagaagctggcggcgggcgcgctgccgcacatcaatgcccgggggcccgtgcgccccccctacctgcgggggtaacgggcctgggggctgccaggtgtgcagggccaatcctgacggtaattgagaatgagtgaggtttcgtacatgcagctatttcaagggttgtaagagtttttgtttttaatcacgcatttggtagagtctaaatggataaaatgcaaggcttgctttccccttgggtgctggcctcaatgtcagaccccacgcgctgccccttcctggcctgaccccagacgcagtgcctggcagtccagaggcagtgggatccctgagtgctgaatgctcgcctgcagagcagcccagaaagagccctgactggggagagaacattttagaatctctagtgtaaaagacatcaacgtgcttagcctttatttcagaaaaaaatcagggtggttcccagctccccagtccaggacaaccattagtcctgatgagtgagctgacgctggtgctggaacctgctggcacctcactggccacatctttggaaggggatggtggccttgcatccaagatgcctgaaaatcagcacgtgcagggcctccctatccagccagcattttccttccagctgaggcaggtgaagacttcataagctcatcacaggggagggaattaggagcagggcagcaggtaattaaacaagataaattatacctgatttccaacaccagctacaaagagttgaagatgatacctatgggtcgcgttaacacagggggcaactgccttgatcggcctgccatgggtcatcagactgcttcctaaattgagagaaactgagcaatctctcagccactgctatagtctaacttcttgtttgctgagtaattgtttctaatgtctctgaactcaaagtgaggtgctccaagacgctgtgaacttctgcaaagacacctccttacctactgggatcacgtgacctgacctcactcccagccaggctcccaaagggctcattccagccattccaatctcttcttctttatgcaaacacttttcccccacaacaagccttgtttgttccgataggaatacgtgtacgtcagtgcacttgtccttacgtcagttccttacaccaccaaagcacttcacctttctggaaataaaacttttaagacactactataagtaaaaatgagagtattcactagacttattgctcaggcacatttgagtgggtcccagctgtgtgattaagaagtcaactgggtggccttttctgggttatcttctgatcatggcctttcaacccaacaagggcccttccctgctcttccaccagtaaaggctcctggcctctcatcaggatctgccccccagagaccccccccagacactgcagggcctggtgatgctgtcctctgtaccggaaatggcaggcactgtcagatttccactcttctgcctttaggaaggctgggtgcttcttgctctgacagccagtctggggagatgactcttacgttgcttgagtcttggtggcaggctgctgtccacgggggagaagtctctgctctggactggacagaagagagacttttaccctggggcactcacacggccaagcttctgccaccacttcattagctgtattctccatagtatggtgaaatagcaggtgcgtcttctagtttattcctcctggggacatttcctcaaagcagttttgcgcccccgcaagggaatggtcagcctaagggtaatgtacagcccgtgcttggagaaccatggaagctacacccctacaggtgcatactgttctgcttttccaataaatacgagcggcgatttcaaccac

SEQ ID NO: 102084 - DNA, 438 bp, Artificial Sequence
  derived and/or modified sequence
atggacgagaactacaacctgctgccccacggcgtgaacttccaggacgccatctttcccgacactcaagagaaccggcgtatgttttcttctttattccaattctccaactgttcccaggggcaacaactggccacgttctcatccgactgggagatccaggaagatagtcgcctgatgtgctcctctgtgcaaaaagccctgttcgaggaagaagatcacgtcaagaagctgcaacagaaggtggcaacactagagaagagaaaccggcaactgcgagagcgggtaaagaaagtgaagcgctcactccggcaggcccgcaagaaaggacgccacctcgaacttgctaatcagaagctaagcgagaagctggctgccggcgccctcccacacattaatgcgcggggccccgtgcgaccgccatacttaaggggatag

SEQ ID NO: 102085 - RNA, 438 nt, Artificial Sequence
  derived and/or modified sequence
auggaugaaaacuacaaccugcucccacacggcgugaauuuccaggacgcaauuuuucccgauacucaggaaaacaggagaauguuuuccuccuuguuccaguucucaaacuguucccaaggacagcaguuagccacguucucaucggacugggagauacaggaagauucacgccugauguguucauccguccagaaggcauuguuugaagaggaggaucaugugaagaaauuacaacagaaggucgccacacuugagaaacggaaucgccaguuaagagaaagagucaaaaaaguuaaaagaucacugcgucaggcccgaaagaaaggucgacaccucgagcuugcgaaccaaaaguuguccgaaaaacuggcggcuggugcauugccucacaucaaugcgaggggccccguuagacccccauauuuaagaggguag

SEQ ID NO: 102086 - RNA, 438 nt, Artificial Sequence
  derived and/or modified sequence
auggacgaaaacuacaauuuacugccucacggcgucaacuuucaagacgcuaucuuccccgauacacaggagaaccgucggauguuuaguagucuauuccaauucaguaacuguucccaaggucagcagcucgcaacuuucagcuccgacugggaaauucaggaagacucucggcucauguguuccuccguacagaaggcccuuuucgaggaggaagaccacguuaaaaagcugcagcagaagguugcuacacucgaaaaaaggaacagacaguuaagagaaaggguuaaaaagguuaaaagaaguuuaagacaggcacggaaaaagggaagacaucuggaacuggcuaaucagaaacuuuccgagaagcuggccgcaggcgccuugccccauaucaacgcuagaggucccgugagaccaccauacuugagaggauag

SEQ ID NO: 102087 - DNA, 2796 bp, Artificial Sequence
  derived and/or modified sequence
atgcccccattgaagagtcctgccgcttttcatgaacagagaaggtcactcgagagggcgaggacagaggattacttgaagagaaaaatccgctcgaggccagagcgttcagagctggtcagaatgcacatcctggaggagacgtccgcggagccttcgctgcaggctaaacaactgaagctgaagcgtgccagactcgccgacgacctaaatgagaaaatcgctcagaggcccggacctatggaactggtcgagaaaaatatcctacctgttgaatcaagtctgaaagaagcaattatagtgggccaagtgaattaccccaaagtcgcggacagttcgtcatttgatgaggactctagcgacgcactaagcccagagcagccagccagccacgagagccagggtagcgttccctcccccctagaggcccgggttagtgagcccctgttgtctgcaacatcagcctcccccacccaggtcgtgtcgcaactcccaatgggccgggatagccgggagatgctttttctggccgagcaaccgcctctccccccccctcctctgctgccaccgtcccttaccaatggcacaactatcccaaccgccaagtcaactcctactttaattaagcagagtcagccaaaatctgcttctgagaaatcccagcgctcaaagaaagcgaaggaattaaagcccaaggtgaagaagttaaaataccaccagtatattcctcctgaccagaagcaggatcggggggcccccccgatggattcgtcctacgcgaagatattacaacaacagcagttatttttgcagctgcagatcctcaaccagcagcaacaacaacatcataattaccaggccattctgcctgcgcctccgaagagtgctggagaggctctggggagttcagggactccacctgtgcgcagtttgtctaccacgaattcctcctcatcaagtggagcacctggaccctgcggcttggctcgccagaacagtacttcactcaccggcaaacccggtgctttgccagctaacctggacgatatgaaagttgctgagttgaagcaggaactgaagttacggtccctgccggtgagcgggacaaagacggaacttatcgagcggctcagagcataccaggaccaaatctctccggtgcctggagctcctaaagctccagccgcaacttccatacttcataaggccggtgaggtggtcgtcgccttccccgcagctcgtctgagtacagggcccgccctagtagcagccggactggctcctgctgaggtagttgtcgccacagtggcatcaagtggcgttgtcaagttcgggagcaccggatcgacgccgcccgtttctccgaccccttctgaacgatcactgctatcaactggagatgaaaattcgactcctggggacacgtttggagagatggtgacttccccgctgacccagcttacgctccaggcttctccattacaaattctggtcaaagaagaagggcctcgcgccggttcctgttgcctttctccaggggggcgggcagaactagaaggccgcgataaagaccagatgctccaagaaaaggacaaacagatcgaggcattgacccggatgctacgacagaagcagcaattagtggaacgactgaagttacagctagaacaggaaaaacgggcccaacagcccgcccccgcacccgctccactgggcaccccagtaaagcaggaaaactcctttagcagctgccagttgagccaacaacctctaggcccagcccacccgttcaatccgagcttggccgcaccagcaaccaatcacatcgatccttgtgcagttgcacctggtcctcccagtgtagtggtgaagcaggaggctttacagcccgagcccgaacccgtccctgcaccgcagctgcttctcggtccacagggaccatccctgatcaaaggtgtcgcaccacctacactgatcacagattcaacgggcactcatctggtcctgacagtcaccaataagaatgccgattcgccaggcctatcatcagggagcccccagcagccgtccagtcagccaggatctcctgcccccgcccccagtgcccaaatggatctggagcatcctctgcagcctctctttgggacaccaacaagcctgctcaagaaggaacctcccgggtatgaggaggcgatgtcacaacagcctaaacagcaggaaaatggctcatcttctcagcaaatggatgacctgttcgatatcctcatccagtctggcgagatttctgccgacttcaaagagcctcctagtttgccaggcaaggagaaaccatcccctaagaccgtatgtggttcccccttagccgcacagccttccccaagtgcggaattgccacaggcagcgccccctcctcccggatcaccatctctgcctggaagactcgaagattttctggaaagctccactggactgccgcttctcacaagtgggcacgatggacccgaaccactgagcctgattgatgatttgcattctcagatgctgtcgtcaacagcaatcctcgaccatccaccatcacccatggacacaagtgagctgcacttcgtccccgagccctcatccactatgggtcttgacttggcggatggccatctagatagtatggactggctggaactgtccagcggggggcccgttctcagcctggccccgctgtccacaacggcaccctctctcttttctaccgatttcctggacgggcacgatcttcagttgcattgggactcttgtctgtag

SEQ ID NO: 102088 - DNA, 2796 bp, Artificial Sequence
  derived and/or modified sequence
atgccccccctcaagtcacctgcggcctttcacgaacagagaagaagtctggaacgcgcacgtactgaagattacctcaagcgaaagatcaggtcccgacccgaacggagcgaactcgtgagaatgcacattctcgaggagacctctgcggagccttccctacaagcgaagcagttgaagctgaaaagagctcgactcgccgatgatctgaacgaaaagatcgctcagagacccggccccatggaacttgttgagaagaatattctgcccgtcgaaagctcccttaaggaagccataatcgtcggacaggttaactaccccaaagtggcggactcttcgagtttcgacgaggattcgtccgacgccctctcgccagaacagccagcaagtcatgagagccaaggttccgtgccctctccacttgaggccagagtaagtgagcctttgctgagtgcgacctctgccagtccgacccaagtggtatcccagctgcccatgggccgcgattcgcgcgaaatgctcttcctggccgagcagccacccctgccgcctccccctctgcttcccccaagtttgactaatggaaccactattcccacagcaaagagcacaccaacactgattaaacagagtcaaccgaaaagcgcctccgaaaagtctcaaagatccaaaaaagctaaggagcttaagccgaaggtcaagaaactcaagtaccaccagtacattccacccgaccagaagcaggaccgaggtgctccccctatggactcctcctacgccaagattttgcagcaacagcaactctttctccagctgcagatactcaaccaacagcagcagcagcaccacaactatcaggccattctaccagctccacccaaatccgccggcgaagcactaggatcgagcggcaccccgccagtaagatctttatctacaaccaattcttccagcagcagcggagcacccgggccatgcggcctcgctcgccagaattcaactagcctgactggtaagccaggggcactccctgcaaatctcgatgatatgaaagttgcagagctcaaacaggaactcaaattgcggagcttgcccgtaagtgggaccaagaccgaactcatagagaggttgcgcgcatatcaggatcagatttcgcctgttccaggcgcccctaaagctcctgcagcgacttcaatcttacataaagccggtgaggtcgtggttgcattcccagcagccaggcttagtaccgggcccgcactggtggctgcaggactggctccggccgaggttgttgtggctaccgtagcatcctctggggtcgtgaagtttgggtcgactggatctaccccgcctgtatcaccgacaccatctgaacggtcactgctatctactggcgatgaaaatagtacgcctggggacacattcggcgagatggtgacttcgcccttgactcagctgacgttgcaggcaagcccattgcagatcttagtgaaggaggaaggtccacgggccgggtcctgttgtctctcgccggggggaagggcagagctggagggtagggataaggatcaaatgttgcaagagaaagataagcagattgaagccctcacgaggatgctgcggcagaagcagcagctggttgaaagactgaagttacagctcgaacaagagaaaagggcacagcagcccgctccagctcccgcccccctgggcacccctgttaaacaggagaacagcttttcatcatgccaattatctcagcaaccactaggccccgcgcatccgtttaatccaagtctggccgcccccgcgaccaatcacatcgatccctgtgccgtggcaccgggaccaccttccgtagtggtcaaacaagaggctttgcagccagagccagagcccgtgccggcaccccaactgttactaggcccacaaggcccaagcttgatcaagggtgttgctccaccaactctcattaccgatagcaccggaacccacctggttcttactgtcacaaacaagaatgctgattctcccggcctctcgtccggaagtccccagcaaccctcatctcagcccggaagtcctgcccccgccccttcagcgcagatggatctggaacacccactgcagcctttgttcgggactcctacttccctgctgaagaaagaaccaccggggtacgaggaagccatgtctcagcagcctaagcagcaggaaaatggctcttcctctcaacagatggatgacctctttgatatactcatacaaagtggggagatctcggccgattttaaagagcccccaagtctgcccggcaaggagaaaccatctcccaagactgtgtgcggctctccattggccgcacaaccctcaccctctgccgagcttccgcaggccgctccaccccctcccggttccccaagcttacctgggcgtctggaagatttcttagaaagctccaccgggttgccactgctgacctcaggacatgatggcccagaacctctttccctaattgatgaccttcactctcagatgttgtccagcaccgccattcttgatcaccccccctcaccaatggatactagtgaactccatttcgtgcctgaacctagctcgactatgggcctcgacttagcagatggccatcttgactccatggactggttggagctgtcgtctggggggcccgtgctgtcattggctccgcttagtaccaccgcacccagtctgttcagcaccgacttcttggatggccatgatctgcagctgcactgggactcatgcctatag

SEQ ID NO: 102089 - DNA, 2796 bp, Artificial Sequence
  derived and/or modified sequence
atgccacccctgaagagccctgctgccttccacgagcagaggaggagcctggagcgggccaggacagaggactacctgaagaggaagatccgcagcaggcctgagaggtctgagctggtgaggatgcacatcctggaggagaccagcgctgagcccagcctgcaggccaagcagctgaagctgaagagggcccggctggctgatgacctgaatgagaagatcgcccagaggcctggccccatggagctggtggagaagaacatcctgcctgtggagagcagcctgaaggaggccatcatcgtgggccaggtgaactaccccaaggtggccgacagcagcagctttgatgaggacagcagtgatgccctgagccctgagcagcctgccagccatgagagccagggctctgtgcccagccccctggaggcccgggtgtctgagcccctgctgagcgccaccagcgccagccccacccaggtggtgtcccagctgcccatgggccgggacagccgggagatgctgttcctggccgagcagccccccctgcccccaccacccctgctgccccccagcctgaccaacggcaccaccatccccacagccaagagcacccccaccctcatcaagcagagccagcccaagagcgccagcgagaagagccagaggagcaagaaggccaaggagctgaagcccaaggtgaagaagctgaagtaccaccagtacatccccccagaccagaagcaggacagaggagccccacccatggacagcagctatgccaagatcctgcagcagcagcagctgttcctgcagctgcagatcctgaaccagcagcagcagcagcaccacaactaccaggccatcctgcctgccccacccaagtctgctggggaggccctgggcagcagcggcaccccacctgtgcgcagcctgagcaccaccaacagcagcagcagcagcggggcccctggcccctgtggcctggcccggcagaacagcaccagcctgaccgggaagccaggggccctgcctgccaacctggatgacatgaaggtggccgagctgaagcaggagctgaagctgcggagcctgcctgtgtctggcaccaagacagagctgattgaaaggctgcgggcctaccaggaccagatcagccctgtgcctggggcccccaaggccccagctgccaccagcatcctgcacaaggccggggaggtggtggtggccttccctgctgcccggctgagcactggacctgccctggtggccgccggcctggccccagctgaggtggtggtggccaccgtggccagcagtggagtggtgaagtttggcagcacaggcagcaccccacctgtgagccccacccccagcgagaggagcctgctgagcactggagatgagaacagcacccctggggacaccttcggggagatggtgaccagccccctgacccagctgaccctgcaggccagccccctgcagatcctggtgaaggaggagggccccagggctggcagctgctgcctgagccctgggggccgggcagagctggagggccgggacaaggaccagatgctgcaggagaaggacaagcagatcgaggccctgaccaggatgctgcggcagaagcagcagctggtggagcggctgaagctgcagctggagcaggagaagagggcccagcagcctgccccagccccagcccccctgggcacccctgtgaagcaggagaacagcttcagcagctgccagctgagccagcagcccctgggccctgcccaccccttcaaccccagcctggccgccccagccaccaaccacatcgacccctgtgctgtggcccctggcccccccagcgtggtggtgaagcaggaggccctgcagcctgagcctgagcctgtgcctgccccccagctgctgctgggcccccagggccccagcctcatcaagggcgtggccccacccaccctcatcacagacagcacaggcacccacctggtgctgactgtgaccaacaagaatgctgacagccctggcctgagcagcggcagcccccagcagcccagcagccagcccggcagccctgccccagcccccagcgcccagatggacctggagcaccccctgcagcccctgtttggcacccccaccagcctgctgaagaaggagcccccaggctatgaggaggccatgagccagcagcccaagcagcaggagaatggcagcagcagccagcagatggatgacctgtttgacatcctgatccagagcggggagatctctgctgacttcaaggagccccccagcctgcccgggaaggagaagcccagccccaagacagtgtgtggcagccccctggccgcccagcccagccccagcgctgagctgccccaggccgcccctcctcctcctggcagccccagcctgcccggccgcctggaggacttcctggagagcagcacaggcctgcccctgctgaccagcggccatgatggccctgagcccctgagcctgattgatgacctgcacagccagatgctgagcagcacagccatcctggaccacccccccagccccatggacaccagcgagctgcactttgtgcctgagcccagcagcaccatgggcctggacctggctgatggccacctggacagcatggactggctggagctgagcagcggcggccctgtgctgagcctggcccccctgagcaccacagcccccagcctcttcagcacagacttcctggatggccatgacctgcagctgcactgggacagctgcctgtag

SEQ ID NO: 102090 - DNA, 2796 bp, Artificial Sequence
  derived and/or modified sequence
atgccccccctgaagagccccgccgccttccacgagcagcggcggagtcttgaaagggctagaacagaggattacctcaagagaaagatcaggtcaaggcctgagcggtcagagttggtgaggatgcatatactagaggagactagtgcggaaccttctctgcaggccaagcagctgaaactgaagcgcgccaggctggccgacgacctcaacgagaagattgcgcaacgtcccggtcctatggagctcgttgaaaagaatatactgcctgtggagtcatccctgaaggaggctataatagtgggccaggtgaactaccccaaagtggcagatagcagtagctttgacgaggattcatcagacgctttgtctcctgaacagcccgcttcccacgagtcacaaggttctgttccttcccctctggaagcacgcgttagcgagcccttgctgagtgctacgtcggcctcacctacccaggtggtgtctcaattgcccatggggcgggacagcagagaaatgctttttcttgccgagcagcctcctttgccgccgccacctctcctacccccctcccttaccaatggcaccactatcccgaccgccaaaagcacacccaccctaatcaaacagtcccagcccaaatccgctagcgagaagtcccagcgcagcaagaaagcaaaagaattgaaaccaaaagtgaagaagctgaaataccaccagtacataccaccagaccagaagcaggacaggggtgcaccaccaatggactccagctatgccaagattttgcaacagcagcagctttttctgcagttacaaatactgaaccagcagcagcagcaacaccataattatcaggcaatcctgcccgcgcccccaaaatccgccggggaagctttggggagtagtggcacccctccagtaaggtctctctccactaccaactcctcctcatcatcaggtgcgccagggccctgtgggctagctaggcagaatagcaccagtctgacggggaagcccggggcgttacccgcgaacctggatgatatgaaggtcgccgaacttaaacaggagctcaaactaaggtctctacccgtttctggtacaaaaacggagctgattgagcgtctccgcgcgtaccaagatcagatctcccccgtccccggtgcgcctaaggctcctgctgctacaagcatactacacaaggccggcgaggtggtggtggcatttccagccgcacggctgtcaacgggtccagctttggttgccgccggtctggctcccgcagaggtggtggtagctaccgtggcctcatctggtgtggtcaaatttggttctaccggatctacaccaccggtgtctcctacaccatccgagagaagccttctgagcaccggcgatgagaactccacaccaggggatacttttggcgagatggtgacctcccccctcacccagcttaccttgcaggcctcgcccttacagatcctcgtgaaagaggagggccccagagcagggtcttgctgtctttcccccggggggagagctgaattggaaggacgagacaaggaccagatgctacaggagaaggacaagcaaatcgaagctctgacacggatgctgcgccagaaacagcagctcgtggaacgtctgaagttacagctggagcaagagaagcgagcacagcagcctgcaccagctcccgcccccctcggtacacccgtcaaacaggagaattctttttcaagctgccaactttcacagcagccactgggcccagcccacccattcaacccatcactggctgcgcctgcaacgaatcatatcgatccctgcgcagttgcccccggaccccctagcgtggtggtgaagcaggaagctctccagcccgaacctgagccagtgccagcacctcagctgctgttgggtcctcaaggaccaagcctcatcaaaggggtggcaccacccactctaataactgacagtactggaacccacttggtgttaacagtgactaacaagaacgcagatagccctggccttagctccggcagcccacagcagcccagcagccagcccggaagcccagcaccagccccatccgctcaaatggacctcgaacacccgcttcaaccgctctttggcacaccaacctcactcctgaaaaaggaaccccccggttatgaggaggcaatgtctcagcaacccaaacagcaggaaaacgggagcagttctcagcagatggacgacctctttgatatcctgattcagtcaggggaaatctctgctgactttaaggagcccccatccctgcctggaaaggaaaagccttcccctaaaacagtatgtggctcccctttggccgcacagccaagcccatctgccgagctcccacaggctgccccccccccccctgggagcccatctttacctggccgattggaagacttcctggagtcctccactggccttccccttcttaccagcggtcatgacggacctgaacccttgtcccttattgacgatctgcactcgcagatgctgtccagtacagccattctggaccacccaccctctccaatggacacatctgagcttcacttcgttcctgaaccaagctctaccatgggtctcgacctggctgatggacatcttgactccatggattggctggaattgagtagtggcgggcccgtgctgagcctggcacctctttcaacaaccgcccctagtctcttttctaccgatttcctcgacggccacgacctccagctgcattgggacagctgtctgtag

SEQ ID NO: 102091 - DNA, 2796 bp, Artificial Sequence
  derived and/or modified sequence
atgccccccctgaagagccccgccgccttccacgagcagcggcggtcactcgagcgcgcaaggacggaggactatcttaagagaaaaataaggagcagacccgaacgcagcgaactggtaaggatgcacatcctggaggaaaccagcgctgagccaagcttgcaagctaagcaactcaagctgaagagagcccggctggccgatgatctcaacgaaaagattgcgcagaggcccggaccaatggagctggtcgagaaaaatattctacccgtcgagtcctcactcaaggaggctatcatcgtgggacaggttaattaccccaaggtcgcagactcctcttcattcgacgaagattctagcgacgctctatctccagagcagccagcatcacatgagagccaaggtagcgtaccgtcccccctcgaagcccgggtatcagagccattactgtcagcaacgtcagcaagccccacccaggttgtgagccagctgcctatgggtcgggactctcgtgagatgctttttttggcagaacaacctccgctgccgccacctccgttattgccacctagcctcacaaatggcaccaccattccaactgcaaaatcaaccccaaccttaattaaacagtcgcagcccaaatctgcctcagagaaatcgcaacgctccaagaaagctaaggagcttaagcccaaggtgaagaaattaaagtaccatcaatacatcccaccagatcagaaacaggacaggggcgctcctcccatggattctagctacgccaagatcctccaacaacaacagcttttcctccagttacaaatcctcaaccagcaacagcagcagcaccacaattatcaggctatactgcctgccccacctaaaagcgccggggaggcactgggaagctctggaactcctcccgtgcgttcgctctctacaaccaattcctcctcatccagcggagcccctggaccctgtggcttggcccggcagaactcaacctcactcacaggaaaaccaggggccttaccagccaacctggacgatatgaaggtcgccgagctgaaacaggaactgaagctaagaagccttcctgtaagcggaactaagaccgaactgattgagcggttacgcgcctatcaggatcaaatcagcccagtgcccggcgcacctaaggcccctgctgccactagcattctgcacaaagctggtgaggtcgtcgtggcattcccggccgcgaggctgagtacggggccggcgctggtggccgctgggcttgccccagccgaggtcgtggtcgcgaccgttgcatcatctggcgtagtgaaatttggttcaaccggctccacaccccccgtgtccccaactccgtccgagagaagcctgctgtccaccggggacgagaactctacaccaggcgacaccttcggcgagatggtcacctcacctctaacccagttgactctacaggcctcccccctgcaaatcctcgtgaaagaggaggggccacgcgctggatcctgctgtttgagtccaggaggacgagcagaattggagggtagggacaaggatcaaatgttgcaagaaaaagacaagcagatcgaggctctcacgagaatgctcaggcagaaacagcaactggttgaacggctgaagttacagctcgaacaggagaaacgcgcccagcagccagcgcctgctcccgcacctcttggtacccctgtcaagcaggaaaacagtttctcctcttgtcagctgtctcagcaaccattggggcctgcgcacccattcaatcccagtttggccgctcctgccaccaaccacattgatccgtgcgccgtcgctcccgggcccccaagcgtagtcgtgaagcaggaagccctacagcctgagcctgagccggtgcccgcacctcagttgctgctgggccctcaaggaccttctctcatcaagggcgtagctccacctactctaataacggatagtacgggaacccacctcgttctgaccgttactaacaagaatgccgacagcccaggtttgagttctgggagtccacagcaaccttcaagtcagccagggtctcccgcacccgcccccagcgcccaaatggatcttgagcatccgctgcaaccactcttcggtaccccaactagcctgttaaaaaaagagcctccggggtacgaagaggcaatgtcccagcagccaaagcagcaggagaacggcagtagttctcagcaaatggatgaccttttcgacatcctgatccaaagcggcgagataagtgcggacttcaaggagccacctagcctccctggcaaggagaagccttctcccaaaacagtatgcggcagccccttagccgcacagcctagtccatcagctgaattgccgcaggctgcccctccccctcctggcagcccaagtcttccgggccgccttgaagattttctggagtcctccacagggctgccgctgctgacaagtggacatgacggcccagagccattaagcttgatcgatgacctacacagccagatgctgagctctacagccattttggaccatccacctagcccaatggatacatcggagctgcatttcgtccctgaaccttcttccaccatgggcttggacctggcggatggtcacctagattctatggattggctagaacttagtagcggtggaccagttctgtcactggcaccgttgtccactactgcccctagcctgttctcgactgattttctggatgggcacgaccttcagctgcactgggacagttgcctgtag

SEQ ID NO: 102092 - DNA, 2796 bp, Artificial Sequence
  derived and/or modified sequence
atgcctcctttgaagtcaccagccgcattccatgaacaacgcaggagcctcgaaagagcccgtacggaagactacttgaagcgaaaaataagaagccgccctgaacggagtgagctggtccggatgcatattctagaagaaacctcggccgaaccaagtcttcaggctaagcagctgaagctcaagagagccagactggccgatgacttgaacgaaaaaattgctcagcgcccaggacccatggagctggtcgaaaaaaacatcctgccagtagagtcatcacttaaggaggcgattatcgtggggcaggtaaactatcccaaggtcgccgatagctcttccttcgacgaggattcctcagatgctcttagcccagaacagcctgccagccacgaatctcagggcagtgtgcccagccccctagaagccagagtgtccgagcccctgctctccgccacgtcagcatctcccactcaggtcgtttcccagctgcctatggggagagactccagggagatgctctttttggccgaacagccaccactgccaccacctccattactgcctccttcattgacgaatgggaccacaattcctactgccaagagtacacccacgctgatcaaacaatcgcagcccaaatccgcttccgagaaatcccaacgcagcaaaaaggctaaagaactgaagcctaaggtcaagaagctgaagtaccatcagtacataccccctgaccagaagcaggatcggggtgccccaccgatggactccagctacgccaagattttgcaacagcagcaactcttcctccagctgcagatactgaatcagcaacagcagcagcaccataactaccaggcaatactcccagccccaccaaagtctgctggcgaagctctgggctcttctggaacacccccagttcggtcactgagcacaactaactcgtcttctagttcaggagcacccggtccgtgtgggctcgctaggcaaaattcgacctctctaaccggtaagcccggtgcactgccggcaaacctggatgacatgaaggtggcggagctcaagcaggagctgaagctgcggtcactgccagtatccggcacgaaaactgaattaatcgaacgcctgagggcgtaccaggaccagattagccctgtacctggcgctccaaaggcaccagccgcaacctctattttacataaagctggcgaagtggtggtggccttccctgctgcgagactctccactggacctgctttagtagcggctggactggccccagcggaagtcgtggtggcaaccgtcgcaagttccggcgtggtgaaatttgggtctacaggctctacacctcccgtgagcccaacccctagcgagcgatcattactgtccacgggcgatgagaacagcacacccggagatacctttggggagatggtcacttccccacttacccaacttaccctgcaggcctccccgctgcagatattggtgaaggaggagggacctagagcaggaagctgttgcttgtctccaggaggccgagcagagctggagggtcgagacaaagaccagatgctacaggagaaagataagcagattgaggcactgactcggatgctgcggcagaagcagcagctcgtggagcggctgaagttgcaacttgaacaggagaaacgtgcacagcagcctgctcctgcacctgccccactagggacgccagtcaaacaggagaattcattctccagctgtcagctctcccagcagccactcggacccgctcatccttttaatccatccctggccgctcctgccacgaaccacatcgatccatgcgccgtcgccccagggcctccgagcgtggttgttaagcaggaagccttacaacctgaacctgagcccgtgcccgctccacaactgctgttggggcctcagggcccatccctgattaagggtgtggcacctcccacactgatcaccgattccacaggcactcacctcgttctgacagtcaccaataaaaatgctgattctccgggtctctctagcgggtctccccaacagccaagctcgcagccagggagccctgcccctgcgccaagcgcacagatggaccttgagcaccctttacaaccgttatttggcacgcccacatcattgctcaaaaaagagcccccaggttatgaggaggctatgagccagcagccaaaacaacaggagaatggatcatccagccagcagatggatgatctttttgacatcctaatccaatccggagaaatctccgctgacttcaaggagcctcccagtctgccgggtaaggagaaaccgtcccctaaaacggtatgcgggtctcctctagctgcccagccctcacccagcgcagaactgccccaggccgcaccaccccctcctggctcacctagtctgccaggcagattggaggacttccttgaaagttctactggcctgcccctcctcactagcgggcatgacgggccagaaccccttagcctgatcgatgaccttcactcgcagatgctgtcctctaccgcaattctggatcatcctccttcccccatggacactagcgagctgcactttgtgcccgaaccttcctcgacaatgggcctggacttggcggatgggcacttagactctatggattggttggagttgagctccggaggaccagtgctgtcactggctcctctgtcaaccaccgcgccttctcttttttcaactgactttctggacggtcacgacctgcaactccattgggattcatgtttgtag

SEQ ID NO: 102093 - DNA, 2796 bp, Artificial Sequence
  derived and/or modified sequence
atgccacccctgaaaagccctgcagcattccatgagcagcggaggagcctcgaacgagctaggaccgaagattatcttaagcgcaagataagaagtagacctgaacggtcagagctggtaagaatgcatatcttagaggaaactagtgcggagccatcactgcaggccaagcaacttaaacttaagagggctcgcctcgccgatgacctgaatgagaaaatcgctcaaaggcccggaccgatggagttggtggagaaaaatatcctccctgtggagtcctccttaaaggaggccatcatcgtgggacaggtgaattaccccaaggtggcggattccagcagcttcgacgaggattcttctgacgctctgtctccagaacagcctgcttcacatgaatcccagggttctgtgccaagccccctggaggcacgcgtatctgagccgttgctcagcgccacatccgcctcccctactcaagtggttagccaactgcctatgggtagagacagtagggaaatgctgtttctcgctgaacagcccccactgcccccaccccctttgctccctccgagcctaaccaatggaactacaattcccaccgcaaagagcaccccgaccctgatcaaacaatcccagcccaaatccgcaagtgaaaaaagtcagcgaagtaagaaggctaaagaactcaaacctaaggttaaaaaactaaagtaccaccagtatattcctcccgatcagaagcaagaccggggagccccacccatggatagctcttatgctaagatccttcagcagcaacagcttttcctgcaattacaaatactgaaccagcagcagcagcagcatcacaattatcaggccatcctgcccgctcctcctaaaagtgctggtgaggctctggggagcagcggaactcccccagttagatctttatctaccacgaacagcagttccagctctggagctcctgggccttgcggattggcacggcagaactcaacctccctcacgggaaagccaggcgcactgccagccaatttggacgatatgaaggtagccgagttaaagcaagaattgaagctgcgctccctgccagtctctggtacgaaaacagaactgatagaacgcctgagagcctatcaagaccaaatctcccctgtacccggagccccaaaggcccctgcagcaacctctattctgcacaaagccggagaggtggttgtggcatttcccgcagccagattgtctacgggcccagccctggttgctgcaggactcgcgccagcagaggtggtggtagctaccgtggcgtcttctggagttgtcaagttcgggtccaccgggagtactcccccagtctcccctaccccatcagaaagatctttgctgagcactggtgatgagaactctacccccggtgatacattcggcgagatggtaacttcgccacttacgcagctgaccttacaagccagccctctgcagattttggtgaaggaagaggggccacgggctggaagctgctgcttgagtccgggaggccgtgccgaactggaaggaagagacaaggatcagatgctgcaagaaaaagataagcaaatcgaagcactaaccaggatgcttcgacagaagcagcaactagttgaaagactgaagctgcagctggagcaggagaagcgagcccagcagccagctcccgctcctgccccactcggcacccccgtcaagcaagaaaatagcttctccagctgtcaactgagccaacagcccctggggccagctcatcccttcaatcctagcctggcagctcccgctaccaaccatatagatccttgcgcggtggcgcctggcccaccctctgtcgtggtcaaacaggaagctctgcagcccgaaccagaacccgtgcccgctccccagctcctacttggaccgcagggcccaagtttgataaagggggtcgccccacccactctgattactgactccacaggaactcatctggtactcaccgtaacaaataagaatgccgactctcctggtctcagctccggatccccccaacagcctagctcgcagcctgggagtccagcgccagctccctccgcccagatggaccttgagcatccgctgcagcctctttttggcacccccaccagcctcctcaaaaaagagccgcctgggtacgaagaggccatgtctcaacagccaaagcagcaggagaatggctccagcagccaacaaatggatgatctatttgatattctcatccagagcggggaaataagtgcagatttcaaggaaccgccttctctgcccggaaaagagaagccctccccaaagacagtctgtggcagccctcttgccgcacagccaagtccttcggctgaactcccgcaggccgctccccctccgccaggaagcccctcgttaccagggagattagaggactttctggagtcgtcaactggactgccactcctgacctccggtcatgacggaccggaacccctatctctcatcgacgatttgcacagccagatgctgtccagcactgctattctagaccacccgcctagtcctatggatactagcgagcttcattttgtccctgagccctcaagcaccatgggactggacctggcagatgggcacctagatagcatggattggcttgagctatcaagtggcggtcctgtgcttagtttagccccactgtcgaccactgccccttccctgtttagcactgatttcctcgatggccacgatttgcaactgcactgggactcttgcctttag

SEQ ID NO: 102094 - DNA, 2796 bp, Artificial Sequence
  derived and/or modified sequence
atgccccccctgaagagccccgccgccttccacgagcagagaagaagcctggagagagccagaaccgaggactacctgaagagaaagatcagaagcagacccgagagaagcgagctggtgagaatgcacatcctggaggagaccagcgccgagcccagcctgcaggccaagcagctgaagctgaagagagccagactggccgacgacctgaacgagaagatcgcccagagacccggccccatggagctggtggagaagaacatcctgcccgtggagagcagcctgaaggaggccatcatcgtgggccaggtgaactaccccaaggtggccgacagcagcagcttcgacgaggacagcagcgacgccctgagccccgagcagcccgccagccacgagagccagggcagcgtgcccagccccctggaggccagagtgagcgagcccctgctgagcgccaccagcgccagccccacccaggtggtgagccagctgcccatgggcagagacagcagagagatgctgttcctggccgagcagccccccctgccccccccccccctgctgccccccagcctgaccaacggcaccaccatccccaccgccaagagcacccccaccctgatcaagcagagccagcccaagagcgccagcgagaagagccagagaagcaagaaggccaaggagctgaagcccaaggtgaagaagctgaagtaccaccagtacatcccccccgaccagaagcaggacagaggcgccccccccatggacagcagctacgccaagatcctgcagcagcagcagctgttcctgcagctgcagatcctgaaccagcagcagcagcagcaccacaactaccaggccatcctgcccgccccccccaagagcgccggcgaggccctgggcagcagcggcaccccccccgtgagaagcctgagcaccaccaacagcagcagcagcagcggcgcccccggcccctgcggcctggccagacagaacagcaccagcctgaccggcaagcccggcgccctgcccgccaacctggacgacatgaaggtggccgagctgaagcaggagctgaagctgagaagcctgcccgtgagcggcaccaagaccgagctgatcgagagactgagagcctaccaggaccagatcagccccgtgcccggcgcccccaaggcccccgccgccaccagcatcctgcacaaggccggcgaggtggtggtggccttccccgccgccagactgagcaccggccccgccctggtggccgccggcctggcccccgccgaggtggtggtggccaccgtggccagcagcggcgtggtgaagttcggcagcaccggcagcaccccccccgtgagccccacccccagcgagagaagcctgctgagcaccggcgacgagaacagcacccccggcgacaccttcggcgagatggtgaccagccccctgacccagctgaccctgcaggccagccccctgcagatcctggtgaaggaggagggccccagagccggcagctgctgcctgagccccggcggcagagccgagctggagggcagagacaaggaccagatgctgcaggagaaggacaagcagatcgaggccctgaccagaatgctgagacagaagcagcagctggtggagagactgaagctgcagctggagcaggagaagagagcccagcagcccgcccccgcccccgcccccctgggcacccccgtgaagcaggagaacagcttcagcagctgccagctgagccagcagcccctgggccccgcccaccccttcaaccccagcctggccgcccccgccaccaaccacatcgacccctgcgccgtggcccccggcccccccagcgtggtggtgaagcaggaggccctgcagcccgagcccgagcccgtgcccgccccccagctgctgctgggcccccagggccccagcctgatcaagggcgtggccccccccaccctgatcaccgacagcaccggcacccacctggtgctgaccgtgaccaacaagaacgccgacagccccggcctgagcagcggcagcccccagcagcccagcagccagcccggcagccccgcccccgcccccagcgcccagatggacctggagcaccccctgcagcccctgttcggcacccccaccagcctgctgaagaaggagccccccggctacgaggaggccatgagccagcagcccaagcagcaggagaacggcagcagcagccagcagatggacgacctgttcgacatcctgatccagagcggcgagatcagcgccgacttcaaggagccccccagcctgcccggcaaggagaagcccagccccaagaccgtgtgcggcagccccctggccgcccagcccagccccagcgccgagctgccccaggccgccccccccccccccggcagccccagcctgcccggcagactggaggacttcctggagagcagcaccggcctgcccctgctgaccagcggccacgacggccccgagcccctgagcctgatcgacgacctgcacagccagatgctgagcagcaccgccatcctggaccacccccccagccccatggacaccagcgagctgcacttcgtgcccgagcccagcagcaccatgggcctggacctggccgacggccacctggacagcatggactggctggagctgagcagcggcggccccgtgctgagcctggcccccctgagcaccaccgcccccagcctgttcagcaccgacttcctggacggccacgacctgcagctgcactgggacagctgcctgtag

SEQ ID NO: 102095 - protein, 881 aa, Artificial Sequence
  derived and/or modified sequence
MPPLKSPAAFHEQRRSLERARTEDYLKRKIRSRPERSELVRMHILEETSAEPSLQAKQLKLKRARLADDLNEKIAQRPGPMELVEKNILPVESSLKEAIIVGQVNYPKVADSSSFDEDSSDALSPEQPASHESQGSVPSPLEARVSEPLLSATSASPTQQSQPKSASEKSQRSKKAKELKPKVKKLKYHQYIPPDQKQDRGAPPMDSSYAKILQQQQLFLQLQILNQQQQQHHNYQAILPAPPKSAGEALGSSGTPPVRSLSTTNSSSSSGAPGPCGLARQNSTSLTGKPGALPANLDDMKVAELKQELKLRSLPVSGTKTELIERLRAYQDQISPVPGAPKAPAATSILHKAGEVVVAFPAARLSTGPALVAAGLAPAEVVVATVASSGVVKFGSTGSTPPVSPTPSERSLLSTGDENSTPGDTFGEMVTSPLTQLTLQASPLQILVKEEGPRAGSCCLSPGGRAELEGRDKDQMLQEKDKQIEALTRMLRQKQQLVERLKLQLEQEKRAQQPAPAPAPLGTPVKQENSFSSCQLSQQPLGPAHPFNPSLAAPATNHIDPCAVAPGPPSVVVKQEALQPEPEPVPAPQLLLGPQGPSLIKGVAPPTLITDSTGTHLVLTVTNKNADSPGLSSGSPQQPSSQPGSPAPAPSAQMDLEHPLQPLFGTPTSLLKKEPPGYEEAMSQQPKQQENGSSSQQMDDLFDILIQSGEISADFKEPPSLPGKEKPSPKTVCGSPLAAQPSPSAELPQAAPPPPGSPSLPGRLEDFLESSTGLPLLTSGHDGPEPLSLIDDLHSQMLSSTAILDHPPSPMDTSELHFVPEPSSTMGLDLADGHLDSMDWLELSSGGPVLSLAPLSTTAPSLFSTDFLDGHDLQLHWDSCL

SEQ ID NO: 102096 - DNA, 2646 bp, Artificial Sequence
  derived and/or modified sequence
atgccaccactaaagtctcccgctgcattccacgagcagagacgatcacttgagagggcacggaccgaggactacctgaaacgcaagatacgctcacgtcccgagagatctgagctggtgcgtatgcatatcctggaagagacgagcgccgaaccaagtctccaggctaaacagctaaaactgaaaagagctaggttagcggacgacctaaatgagaaaattgctcagaggccaggaccgatggagctggtggagaagaacatattacctgtggagtcctctcttaaagaggcaatcattgttggccaggtgaactaccctaaggtagctgatagttcgagctttgatgaggattcaagtgatgcgcttagccctgagcagccagcctctcacgagtcacagggtagcgtgccctctcctctagaagctcgcgtatcagagccactgctaagcgctacttccgccagccctacacagcagagccagcccaaatcggcctcagaaaagtctcaacgaagcaaaaaagccaaggaactgaagccaaaagtgaaaaaacttaaataccatcagtacattccgcctgaccagaagcaggataggggcgcgcctccaatggacagctcgtacgcgaagatactgcagcagcagcaactctttctacaactgcagatcttgaaccagcagcagcagcaacaccacaattatcaggcgatcctgcccgctcctccaaagtccgcgggcgaggccttgggatcttcgggaacaccccccgttcgctccctgagtactactaattccagttcttcctccggtgcgccaggcccatgtggcctagctcgacagaactccacctctttgaccggcaaacctggtgccttgccagcaaacctggacgacatgaaggtggctgagcttaaacaggaactaaagctgaggagcctgcctgtcagtggtaccaagaccgaactgattgagcggctgcgggcctaccaggatcaaatcagtcccgtacctggggcaccaaaagcacccgctgccacatcaatccttcataaggccggcgaagtagtggtggccttcccagcggcccgactctcaacaggcccggctctcgtggcagccgggttggctcccgctgaggtcgtggtggctaccgtagcttcatctggtgtcgtgaaattcggctctactggctcaaccccccccgtgagtccgacaccttcagagagatcactgctgagcactggcgacgagaattccacccctggcgacacctttggggaaatggtcacgtccccgttaacacaactgaccctacaggcatcacctcttcagatcttagtgaaggaagagggaccacgggccggatcctgttgcctgtcacctgggggccgagccgagctggaggggagagacaaggaccagatgcttcaggagaaggacaagcagatcgaagccctcactcgcatgctgcgacagaaacagcagctagtagaacggctgaaactgcagctcgagcaagagaagagagcccaacagccagctcccgcacctgcacccctgggtacaccagtcaagcaagagaactcgtttagctcctgccagctgtcacagcagccactcggtcctgcccacccattcaatccaagtcttgccgccccagcaacaaatcatatcgacccttgcgctgtggcgcccggtccccccagcgtggtggtgaaacaagaggcccttcagcccgagcctgaaccggttcccgctccacagttgctgctaggcccacagggtcctagtctcattaagggcgttgccccccctaccttgatcacagattctaccggcacccatctcgttcttacagttacaaacaaaaacgctgacagtccaggcttgagcagcggcagcccacaacagccgagctcccaacctggaagccccgcccctgcgcctagcgctcagatggacctggagcaccccctccagccactgttcgggacaccaacttccttgctaaagaaggaaccacccggctacgaggaggcgatgtctcagcaaccaaaacagcaggagaatggatctagctcccagcaaatggacgacctgttcgacattctgatccaaagcggcgaaatctccgccgatttcaaggaacccccctcacttccgggtaaggaaaagcccagcccaaagaccgtttgcggatctcctttggcagctcagccatctcccagcgcagaattgcctcaggcagcccctcctcctcccgggagtccgagtctgcccggacgcctcgaggacttcctcgagtcttctaccgggctcccccttttaaccagcggccatgacggccccgagccactgtctctgatagacgatttacacagccagatgttatcctcgacagcaattcttgaccatcctccaagcccaatggacacctcagagctgcattttgtccctgaacccagttccacaatggggctggatctagcggatggacacctagatagcatggattggctcgagctcagcagcggcggccctgttctgagcttagcacccttgagcactaccgctccttcgttattctctacagatttcttggacggtcatgatctgcagttacactgggatagctgtctttag

SEQ ID NO: 102097 - DNA, 2646 bp, Artificial Sequence
  derived and/or modified sequence
atgccacccctgaagagccctgctgccttccacgagcagaggaggagcctggagcgggccaggacagaggactacctgaagaggaagatccgcagcaggcctgagaggtctgagctggtgaggatgcacatcctggaggagaccagcgctgagcccagcctgcaggccaagcagctgaagctgaagagggcccggctggctgatgacctgaatgagaagatcgcccagaggcctggccccatggagctggtggagaagaacatcctgcctgtggagagcagcctgaaggaggccatcatcgtgggccaggtgaactaccccaaggtggccgacagcagcagctttgatgaggacagcagtgatgccctgagccctgagcagcctgccagccatgagagccagggctctgtgcccagccccctggaggcccgggtgtctgagcccctgctgagcgccaccagcgccagccccacccagcagagccagcccaagagcgccagcgagaagagccagaggagcaagaaggccaaggagctgaagcccaaggtgaagaagctgaagtaccaccagtacatccccccagaccagaagcaggacagaggagccccacccatggacagcagctatgccaagatcctgcagcagcagcagctgttcctgcagctgcagatcctgaaccagcagcagcagcagcaccacaactaccaggccatcctgcctgccccacccaagtctgctggggaggccctgggcagcagcggcaccccacctgtgcgcagcctgagcaccaccaacagcagcagcagcagcggggcccctggcccctgtggcctggcccggcagaacagcaccagcctgaccgggaagccaggggccctgcctgccaacctggatgacatgaaggtggccgagctgaagcaggagctgaagctgcggagcctgcctgtgtctggcaccaagacagagctgattgaaaggctgcgggcctaccaggaccagatcagccctgtgcctggggcccccaaggccccagctgccaccagcatcctgcacaaggccggggaggtggtggtggccttccctgctgcccggctgagcactggacctgccctggtggccgccggcctggccccagctgaggtggtggtggccaccgtggccagcagtggagtggtgaagtttggcagcacaggcagcaccccacctgtgagccccacccccagcgagaggagcctgctgagcactggagatgagaacagcacccctggggacaccttcggggagatggtgaccagccccctgacccagctgaccctgcaggccagccccctgcagatcctggtgaaggaggagggccccagggctggcagctgctgcctgagccctgggggccgggcagagctggagggccgggacaaggaccagatgctgcaggagaaggacaagcagatcgaggccctgaccaggatgctgcggcagaagcagcagctggtggagcggctgaagctgcagctggagcaggagaagagggcccagcagcctgccccagccccagcccccctgggcacccctgtgaagcaggagaacagcttcagcagctgccagctgagccagcagcccctgggccctgcccaccccttcaaccccagcctggccgccccagccaccaaccacatcgacccctgtgctgtggcccctggcccccccagcgtggtggtgaagcaggaggccctgcagcctgagcctgagcctgtgcctgccccccagctgctgctgggcccccagggccccagcctcatcaagggcgtggccccacccaccctcatcacagacagcacaggcacccacctggtgctgactgtgaccaacaagaatgctgacagccctggcctgagcagcggcagcccccagcagcccagcagccagcccggcagccctgccccagcccccagcgcccagatggacctggagcaccccctgcagcccctgtttggcacccccaccagcctgctgaagaaggagcccccaggctatgaggaggccatgagccagcagcccaagcagcaggagaatggcagcagcagccagcagatggatgacctgtttgacatcctgatccagagcggggagatctctgctgacttcaaggagccccccagcctgcccgggaaggagaagcccagccccaagacagtgtgtggcagccccctggccgcccagcccagccccagcgctgagctgccccaggccgcccctcctcctcctggcagccccagcctgcccggccgcctggaggacttcctggagagcagcacaggcctgcccctgctgaccagcggccatgatggccctgagcccctgagcctgattgatgacctgcacagccagatgctgagcagcacagccatcctggaccacccccccagccccatggacaccagcgagctgcactttgtgcctgagcccagcagcaccatgggcctggacctggctgatggccacctggacagcatggactggctggagctgagcagcggcggccctgtgctgagcctggcccccctgagcaccacagcccccagcctcttcagcacagacttcctggatggccatgacctgcagctgcactgggacagctgcctgtag

SEQ ID NO: 102098 - DNA, 2646 bp, Artificial Sequence
  derived and/or modified sequence
atgccccccctgaagagccccgccgccttccacgagcagcggcggtccctggagcgggcccggactgaggactacctcaagaggaaaatcaggagcaggccagagcggagtgagctcgtgagaatgcatatcctggaagaaacaagcgcagaaccaagcttgcaggccaaacagctgaagttgaagagagctagactcgctgatgacctcaacgagaaaattgcccagaggcctggccccatggagctggtcgagaagaacatcctacctgtggaatcatcattaaaggaggctatcattgtcggtcaggtcaactacccaaaagtcgctgattccagttctttcgacgaagactcctccgacgccttgagccccgagcaaccagcaagtcacgaaagtcagggtagtgtgccatcccccctggaggccagggtgtccgagccactcctctcggccacaagtgcctctccaactcaacagtcccagcctaagtccgcctcagaaaagtctcagcgcagcaaaaaggcaaaagaactgaagcctaaagtcaagaagcttaagtaccaccagtatatccctccggaccagaaacaggacaggggcgctcccccgatggattccagttacgccaaaattttgcagcagcagcagttgttcctgcagctgcagatcttgaaccaacagcagcagcaacaccataattaccaagccatcctcccagcccctcctaaaagtgcaggggaggccctgggatcgagcggtacgccacccgtgaggtctctgtctacaaccaactcgtccagctcttctggtgcccccggaccatgtgggctggcgcggcagaactcgacatccctgaccggcaagcccggcgccttgcccgcgaacttagacgatatgaaagtggcagagcttaaacaagaacttaagctgagatctctcccagtatccgggactaagaccgagctgattgaaagactgagagcttatcaggaccagatttcccccgtaccaggtgcacctaaagcaccagccgctacaagcatactgcataaggccggagaagtggtggtggcattccccgcagctagactcagtacaggaccagccttggtagccgctgggttggccccggcagaggttgtggtcgcaacagtggcaagctctggcgtggtgaaattcgggtccacagggagtacaccccccgtgtctccaacaccgtccgagcgcagcttactgtccacaggggatgagaacagcactcctggcgacacattcggtgaaatggtgacctctcccctgacccagttgacgttgcaggctagtcccctgcagattctggtgaaggaagagggccctcgcgctggatcctgctgccttagccccggtggacgcgcggaactggagggccgcgacaaggatcagatgttacaagaaaaggacaaacaaatagaagctttaacccgcatgctgaggcaaaaacaacagctagtggagaggctgaaactccaattagaacaggagaagagggcccagcaaccggcgcctgccccagcccccctggggacccccgtgaaacaggagaacagcttcagcagctgccaactttcgcagcagcctctgggtcctgcccatccattcaacccttcccttgccgccccagcaactaatcatatagacccatgtgctgtggcgcctgggccccccagtgtggtcgtgaaacaggaagcactgcagccggagccagagccggttcccgctcctcagttgctgttgggcccgcagggaccttctctcattaaaggcgtggccccacccactctcattacagatagcacagggacacacctggtgctcactgtcacaaacaagaatgctgacagccctgggttgagttccggtagtcctcagcaaccttcctcacaaccgggatcgccagcacccgccccgtcagctcagatggatcttgagcatccactccagcccctgttcggcacaccgaccagcctgctgaaaaaggaaccccccggttacgaggaggcaatgtcgcagcagcccaagcaacaagagaatggctcaagttctcagcagatggatgatctattcgacattctgattcaaagcggggagatctccgcagactttaaagagcctccttccctgccaggaaaggagaaaccttctcctaaaacagtgtgcggtagcccactggctgcccagcctagtcctagcgcagaactgccccaggctgctcccccgcctcccgggagcccttcgctgcccggccgcctcgaagatttccttgagtcgagcactggcctgccgctcctgaccagcggacacgacggaccagagccgctttctctaatcgacgacctgcacagtcaaatgctgtctagcaccgcaatcctggatcaccccccctccccaatggatacttcagagctgcatttcgttcccgagccgagttctacaatgggattagatttggcagacggacatctcgacagtatggattggcttgaactcagcagtggtggacctgtgctcagcctggctcctctgtccacgactgccccatcactgttcagcaccgacttcctcgatggccatgatctacagctgcattgggatagctgtctgtag

SEQ ID NO: 102099 - DNA, 2646 bp, Artificial Sequence
  derived and/or modified sequence
atgcctcccctgaaatcacccgcagccttccacgagcagcggagaagcttagagagggcacgcacagaggactatctgaaacggaagattcgcagcagacctgaacgctcggaactcgtgagaatgcacatcctggaagaaacttctgccgaaccatctctgcaagcgaaacagcttaagctcaagcgcgcaagactggctgacgacctcaacgagaaaattgcccagaggcctggaccaatggagctcgtagaaaagaatatcttgcctgttgaatctagtctgaaagaggcaattatcgtcggacaggtgaattacccaaaggttgccgatagcagttccttcgatgaggacagcagcgacgccctgtcaccggaacaacccgcatctcatgagagtcaaggatctgtgccctcacccctcgaagctagggtcagtgaacccctgctgtccgcgacatctgcgtcgccgacacagcagtcccagcctaaatcagctagcgagaagagtcaacgctccaagaaagcaaaagaattgaagccaaaggtgaagaaactgaaatatcatcagtatattccccctgatcagaagcaagatagaggagcgccacccatggactcctcctatgcgaaaattctgcagcagcagcagttgttcttgcagctgcaaatcctgaatcagcagcaacagcaacaccacaactatcaagccatcctgccagccccaccgaaatctgcaggggaggcgttgggctccagtggaacaccccctgtgcgaagcctgtccaccacaaacagcagctcttcatccggcgcacctgggccatgcgggttggcgaggcagaactcgacctccctcacaggaaaaccgggagctttgccagctaatcttgatgacatgaaagttgccgaactgaagcaagagttaaagcttcgttctctccccgtctccggaactaagacagagctaattgagaggctgagagcgtatcaggatcagatatctcccgtgccaggcgcaccaaaggctcccgctgccacatctattctgcacaaggccggagaagtggtcgtcgcttttccggctgctcgattgtccacagggccagcgctggtggcagctggcctcgctcctgccgaggtagttgtagctacagtggcctcctccggggtggtaaaatttggctctaccggttctaccccacctgttagtcctactccttcagagagatcactgctcagcaccggggacgaaaatagtaccccgggtgacaccttcggagagatggtgaccagtccactaacccagctcaccctgcaagcctcaccattgcagattttggtcaaagaggagggccctcgcgctggttcttgctgtctttctccgggaggacgcgctgaactcgagggcagggacaaggatcagatgctgcaggagaaggacaaacaaattgaagcccttacacgtatgctccggcagaagcagcagctagttgagagattaaaactccagctggagcaggagaaaagggcacagcagcctgcacctgcgcctgcacccctcggaacacctgtaaagcaggaaaactctttctcaagctgccagttgtctcaacaacccttaggtccagctcacccattcaacccatccctggcggcacctgccacaaatcacattgatccttgtgccgtcgcaccaggtcctccatctgttgtggtcaagcaggaagcgcttcagccggagcctgagcccgtgcctgctccccagctactgctggggccacagggaccctcgctcatcaaaggagtggccccaccgactttaattacagacagtacaggcacccatctagtgctcacggtcaccaataaaaacgctgactctcctggtttaagcagcggttcaccacagcaaccgagctcacagcccggatctccagccccagccccatccgcacagatggatctggaacaccctctccagcccctattcggaaccccaaccagcctgctcaagaaggaaccccctggatatgaggaggcaatgagccagcagcctaagcagcaggagaacggctcttcttctcagcagatggacgacctgtttgatatactgatccagagcggcgagataagcgccgactttaaggagccaccaagcttgccaggcaaggaaaaaccaagccccaagaccgtgtgtgggtctcccctggccgcacagccaagcccaagcgcagaactgccccaggctgctccacctcccccaggtagcccaagtctgcctggacggctcgaggatttcctggaatcctccacggggttgcctctgctaactagtggacacgatggacctgagcctctgtccttgatcgatgacctacattctcagatgctcagcagtaccgctattcttgaccaccctccgagcccgatggacaccagcgagttgcattttgttcctgaaccttcatcaaccatgggtctagatctggctgatggccatctagatagcatggactggctggagctctcttcaggtggacctgttttgtctctggccccactatctaccacggcaccatcgctgttcagtaccgactttttggacggccacgacctccagctccactgggatagttgcctgtag

SEQ ID NO: 102100 - DNA, 2646 bp, Artificial Sequence
  derived and/or modified sequence
atgccccccctgaagagccccgccgccttccacgagcagagaagaagcctggagagagccagaaccgaggactacctgaagagaaagatcagaagcagacccgagagaagcgagctggtgagaatgcacatcctggaggagaccagcgccgagcccagcctgcaggccaagcagctgaagctgaagagagccagactggccgacgacctgaacgagaagatcgcccagagacccggccccatggagctggtggagaagaacatcctgcccgtggagagcagcctgaaggaggccatcatcgtgggccaggtgaactaccccaaggtggccgacagcagcagcttcgacgaggacagcagcgacgccctgagccccgagcagcccgccagccacgagagccagggcagcgtgcccagccccctggaggccagagtgagcgagcccctgctgagcgccaccagcgccagccccacccagcagagccagcccaagagcgccagcgagaagagccagagaagcaagaaggccaaggagctgaagcccaaggtgaagaagctgaagtaccaccagtacatcccccccgaccagaagcaggacagaggcgccccccccatggacagcagctacgccaagatcctgcagcagcagcagctgttcctgcagctgcagatcctgaaccagcagcagcagcagcaccacaactaccaggccatcctgcccgccccccccaagagcgccggcgaggccctgggcagcagcggcaccccccccgtgagaagcctgagcaccaccaacagcagcagcagcagcggcgcccccggcccctgcggcctggccagacagaacagcaccagcctgaccggcaagcccggcgccctgcccgccaacctggacgacatgaaggtggccgagctgaagcaggagctgaagctgagaagcctgcccgtgagcggcaccaagaccgagctgatcgagagactgagagcctaccaggaccagatcagccccgtgcccggcgcccccaaggcccccgccgccaccagcatcctgcacaaggccggcgaggtggtggtggccttccccgccgccagactgagcaccggccccgccctggtggccgccggcctggcccccgccgaggtggtggtggccaccgtggccagcagcggcgtggtgaagttcggcagcaccggcagcaccccccccgtgagccccacccccagcgagagaagcctgctgagcaccggcgacgagaacagcacccccggcgacaccttcggcgagatggtgaccagccccctgacccagctgaccctgcaggccagccccctgcagatcctggtgaaggaggagggccccagagccggcagctgctgcctgagccccggcggcagagccgagctggagggcagagacaaggaccagatgctgcaggagaaggacaagcagatcgaggccctgaccagaatgctgagacagaagcagcagctggtggagagactgaagctgcagctggagcaggagaagagagcccagcagcccgcccccgcccccgcccccctgggcacccccgtgaagcaggagaacagcttcagcagctgccagctgagccagcagcccctgggccccgcccaccccttcaaccccagcctggccgcccccgccaccaaccacatcgacccctgcgccgtggcccccggcccccccagcgtggtggtgaagcaggaggccctgcagcccgagcccgagcccgtgcccgccccccagctgctgctgggcccccagggccccagcctgatcaagggcgtggccccccccaccctgatcaccgacagcaccggcacccacctggtgctgaccgtgaccaacaagaacgccgacagccccggcctgagcagcggcagcccccagcagcccagcagccagcccggcagccccgcccccgcccccagcgcccagatggacctggagcaccccctgcagcccctgttcggcacccccaccagcctgctgaagaaggagccccccggctacgaggaggccatgagccagcagcccaagcagcaggagaacggcagcagcagccagcagatggacgacctgttcgacatcctgatccagagcggcgagatcagcgccgacttcaaggagccccccagcctgcccggcaaggagaagcccagccccaagaccgtgtgcggcagccccctggccgcccagcccagccccagcgccgagctgccccaggccgccccccccccccccggcagccccagcctgcccggcagactggaggacttcctggagagcagcaccggcctgcccctgctgaccagcggccacgacggccccgagcccctgagcctgatcgacgacctgcacagccagatgctgagcagcaccgccatcctggaccacccccccagccccatggacaccagcgagctgcacttcgtgcccgagcccagcagcaccatgggcctggacctggccgacggccacctggacagcatggactggctggagctgagcagcggcggccccgtgctgagcctggcccccctgagcaccaccgcccccagcctgttcagcaccgacttcctggacggccacgacctgcagctgcactgggacagctgcctgtag

SEQ ID NO: 102101 - protein, 798 aa, Artificial Sequence
  derived and/or modified sequence
MPPLKSPAAFHEQRRSLERARTEDYLKRKIRSRPERSELVRMHILEETSAEPSLQAKQLKLKRARLADDLNEKIAQRPGPMELVEKNILPVESSLKEAIIVGQVNYPKVADSSSFDEDSSDALSPEQPASHESQGSVPSPLEARVSEPLLSATSASPTQVVSQLPMGRDSREMLFLAEQPPLPPPPLLPPSLTNGTTIPTAKSTPTLIKQSQPKSASEKSQRSKKAKELKPKVKKLKYHQYIPPDQKQDRGAPPMDSSYAKILQQQQLFLQLQILNQQQQQHHNYQAILPAPPKSAGEALGSSGTPPVRSLSTTNSSSSSGAPGPCGLARQNSTSLTGKPGALPANLDDMKVAELKQELKLRSLPVSGTKTELIERLRAYQDQISPVPGAPKAPAATSILHKAGEVVVAFPAARLSTGPALVAAGLAPAEVVVATVASSGVVKFGSTGSTPPVSPTPSERSLLSTGDENSTPGDTFGEMVTSPLTQLTLQASPLQILVKEEGPRAGSCCLSPGGRAELEGRDKDQMLQEKDKQIEALTRMLRQKQQLVERLKLQLEQEKRAQQPAPAPAPLGTPVKQENSFSSCQLSQQPLGPAHPFNPSLAAPATNHIDPCAVAPGPPSVVVKQEALQPEPEPVPAPQLLLGPQGPSLIKGVAPPTLITDSTGTHLVLTVTNKNADSPGLSSGSPQQPSSQPGSPAPAPSAQMDLEHPLQPLFGTPTSLLKKEPPGYEEAMSQQPKQQENGSSSQQMDDLFDILIQSGGNPRNFSRFQGAAIPAREGEAIPEDSLWVPPGSTAITFC

SEQ ID NO: 102102 - DNA, 2397 bp, Artificial Sequence
  derived and/or modified sequence
atgcctcccctgaagtcccctgctgctttccacgagcagcgccgtagtctggaaagagccagaacagaagactatctcaaaaggaagattcggtcccgccctgaaagaagcgagctcgtacgaatgcacattttggaggagacaagcgccgagccaagcctccaggccaaacaacttaaactgaaacgcgcacggctggcagacgacctgaatgagaagatcgctcagcggccaggaccgatggagttggtggagaagaacatcttacctgtggagagttctcttaaagaggccataattgtcggacaggttaattaccctaaggtggctgattcctcctcattcgatgaggactccagtgacgcactttcgccagaacaacccgccagccacgaaagccagggaagcgtgccgtcccctctggaggcccgggtatccgagccgctcctgtcggctacgtcagcctcaccaacccaggtggtgtcacagctgccaatggggcgagactcaagagagatgctctttctggctgaacagcctccactgccacccccgccacttctgcctccaagtcttacaaatggtacaacaatacctaccgcaaagagtacaccaacactgattaagcagtcccagcccaaatctgcctccgaaaaatcccagaggagtaaaaaagcaaaagaactgaagccaaaagtgaaaaagttgaaataccaccagtatattccccctgatcagaaacaagaccgtggtgctcccccgatggattctagctacgctaagattctacagcagcaacagttattcctgcagctgcaaatcctgaaccagcaacagcagcagcaccataattaccaggcgattttacctgccccacccaagtcagctggtgaagcgctagggtccagtgggacaccacctgtgcggtcactcagtaccaccaactcctcctcaagctccggtgcgcctggcccctgcgggctggcacgccaaaactccacctccctgacaggaaagcccggcgccctaccagccaacctggacgacatgaaggtcgccgaacttaagcaagagctaaaacttcgcagcctgccagttagtggcacaaaaaccgagttgatcgaacgattgcgtgcgtaccaggaccagatctcccctgtccctggagcccctaaagcgcctgcagccactagcatcctgcacaaagccggagaagtcgttgtcgcgttcccagcggcccgtctgtctacagggcccgctctagttgcggccggacttgcccctgcggaagtggtggtggccaccgttgcaagctcgggtgtggtcaaattcggatctaccggctctaccccccctgttagccccacaccttctgagcggagcctcctgagcaccggtgacgagaattccacacctggagatacgtttggtgagatggttacctctcccttaacccagctcacactgcaggcttccccgttgcagatcctggtcaaggaggaaggcccgcgggctggtagctgctgtctaagccctggcggcagggccgaactggagggccgtgataaggaccagatgctgcaagagaaagacaagcagatcgaggccttaacaaggatgttacgacagaagcagcagttggtcgagcgactcaagctgcagttggagcaggagaagcgggcgcaacagcccgcacctgcccccgcccctctggggactcctgtcaaacaagaaaattcgttctcttcctgccagctgagccaacagccgctgggtcctgcgcatcccttcaatccaagccttgctgcgcccgctactaaccacattgatccctgtgctgtggctcctggaccacccagtgtggtcgtaaagcaggaggccctgcaaccagagccagaacctgtccctgctccacaactgcttcttggaccacagggaccaagtctcatcaagggcgtggctcccccaaccctgatcacagacagcactggaacccatctggtgttgaccgtgactaacaagaacgctgattcgcctggcttgtctagtggttctccgcagcaaccctccagccaacctggaagtccggccccagcgccgtccgcacagatggacttggagcacccgctccaaccactctttggtacccctaccagcttgttgaagaaagagcctcccggatatgaggaagcgatgagtcagcagcccaaacagcaagaaaatggctcaagttcacaacagatggatgatctctttgacattttgatccagtcgggcgggaacccacgaaacttttcccgcttccaaggcgctgccattccagcacgtgaaggcgaggcaatcccagaggattccctgtgggtccctcccgggtcaactgctataactttctgttag

SEQ ID NO: 102103 - DNA, 2397 bp, Artificial Sequence
  derived and/or modified sequence
atgccacccctgaagagccctgctgccttccacgagcagaggaggagcctggagcgggccaggacagaggactacctgaagaggaagatccgcagcaggcctgagaggtctgagctggtgaggatgcacatcctggaggagaccagcgctgagcccagcctgcaggccaagcagctgaagctgaagagggcccggctggctgatgacctgaatgagaagatcgcccagaggcctggccccatggagctggtggagaagaacatcctgcctgtggagagcagcctgaaggaggccatcatcgtgggccaggtgaactaccccaaggtggccgacagcagcagctttgatgaggacagcagtgatgccctgagccctgagcagcctgccagccatgagagccagggctctgtgcccagccccctggaggcccgggtgtctgagcccctgctgagcgccaccagcgccagccccacccaggtggtgtcccagctgcccatgggccgggacagccgggagatgctgttcctggccgagcagccccccctgcccccaccacccctgctgccccccagcctgaccaacggcaccaccatccccacagccaagagcacccccaccctcatcaagcagagccagcccaagagcgccagcgagaagagccagaggagcaagaaggccaaggagctgaagcccaaggtgaagaagctgaagtaccaccagtacatccccccagaccagaagcaggacagaggagccccacccatggacagcagctatgccaagatcctgcagcagcagcagctgttcctgcagctgcagatcctgaaccagcagcagcagcagcaccacaactaccaggccatcctgcctgccccacccaagtctgctggggaggccctgggcagcagcggcaccccacctgtgcgcagcctgagcaccaccaacagcagcagcagcagcggggcccctggcccctgtggcctggcccggcagaacagcaccagcctgaccgggaagccaggggccctgcctgccaacctggatgacatgaaggtggccgagctgaagcaggagctgaagctgcggagcctgcctgtgtctggcaccaagacagagctgattgaaaggctgcgggcctaccaggaccagatcagccctgtgcctggggcccccaaggccccagctgccaccagcatcctgcacaaggccggggaggtggtggtggccttccctgctgcccggctgagcactggacctgccctggtggccgccggcctggccccagctgaggtggtggtggccaccgtggccagcagtggagtggtgaagtttggcagcacaggcagcaccccacctgtgagccccacccccagcgagaggagcctgctgagcactggagatgagaacagcacccctggggacaccttcggggagatggtgaccagccccctgacccagctgaccctgcaggccagccccctgcagatcctggtgaaggaggagggccccagggctggcagctgctgcctgagccctgggggccgggcagagctggagggccgggacaaggaccagatgctgcaggagaaggacaagcagatcgaggccctgaccaggatgctgcggcagaagcagcagctggtggagcggctgaagctgcagctggagcaggagaagagggcccagcagcctgccccagccccagcccccctgggcacccctgtgaagcaggagaacagcttcagcagctgccagctgagccagcagcccctgggccctgcccaccccttcaaccccagcctggccgccccagccaccaaccacatcgacccctgtgctgtggcccctggcccccccagcgtggtggtgaagcaggaggccctgcagcctgagcctgagcctgtgcctgccccccagctgctgctgggcccccagggccccagcctcatcaagggcgtggccccacccaccctcatcacagacagcacaggcacccacctggtgctgactgtgaccaacaagaatgctgacagccctggcctgagcagcggcagcccccagcagcccagcagccagcccggcagccctgccccagcccccagcgcccagatggacctggagcaccccctgcagcccctgtttggcacccccaccagcctgctgaagaaggagcccccaggctatgaggaggccatgagccagcagcccaagcagcaggagaatggcagcagcagccagcagatggatgacctgtttgacatcctgatccagagcggcggcaaccccaggaacttcagccgcttccagggcgccgccatcccagcccgggagggggaggccatccctgaggacagcctgtgggtgcccccaggcagcacagccatcaccttctgctag

SEQ ID NO: 102104 - DNA, 4505 bp, Artificial Sequence
  derived and/or modified sequence
ggcggcagtgtctgtggtggccgcggcggcgagagcgacggtcccatctttcccaccctcttggttgccgctggccacacgccctccgctggcggcgacttctcagctccgtgcgcccgggctggacagtgagcctcgagaggagacgcgggcggctagagccggagtggggcgagccgcggaacccggccgggagccgcgcgaggcgtgatcggagggtatggttggcatggaattgaatttcatctgtctgtgggaattgtaagcaagattgccatcacgaaagccaaagtggatttctccagtgtggtgtgcctgcccccttccgtcattgctgtgaatgggctggacggaggaggggccggcgaaaatgatgatgaaccagtgctcgtgtccttatctgcggcacccagtccccagagtgaagctgttgccaatgaactgcaggagctctccttgcagcccgagctgaccctaggcctccaccctggcaggaatcccaatttgcctccacttagtgagcggaagaatgtgctacagttgaaactccagcagcgccggacccgggaagaactggtgagccaagggatcatgccgcctttgaaaagtccagccgcatttcatgagcagagaaggagcttggagcgggccaggacagaggactatctcaaacggaagattcgttcccggccggagagatcggagctggtcaggatgcacattttggaagagacctcggctgagccatccctccaggccaagcagctgaagctgaagagagccagactagccgatgacctcaatgagaagattgcacagaggcctggccccatggagctggtggagaagaacatccttcctgttgagtccagcctgaaggaagccatcattgtgggccaggtgaactatcccaaagtagcagacagctcttccttcgatgaggacagcagcgatgccttatcccccgagcagcctgccagccatgagtcccagggttctgtgccgtcacccctggaggcccgagtcagcgaaccactgctcagtgccacctctgcatcccccacccaggttgtgtctcaacttccgatgggccgggattccagagaaatgcttttcctggcagagcagcctcctctgcctcccccacctctgctgcctcccagcctcaccaatggaaccactatccccactgccaagtccacccccacactcattaagcaaagccaacccaagtctgccagtgagaagtcacagcgcagcaagaaggccaaggagctgaagccaaaggtgaagaagctcaagtaccaccagtacatccccccggaccagaagcaggacaggggggcaccccccatggactcatcctacgccaagatcctgcagcagcagcagctcttcctccagctgcagatcctcaaccagcagcagcagcagcaccacaactaccaggccatcctgcctgccccgccaaagtcagcaggcgaggccctgggaagcagcgggacccccccagtacgcagcctctccactaccaatagcagctccagctcgggcgcccctgggccctgtgggctggcacgtcagaacagcacctcactgactggcaagccgggagccctgccggccaacctggacgacatgaaggtggcagagctgaagcaggagctgaagttgcgatcactgcctgtctcgggcaccaaaactgagctgattgagcgccttcgagcctatcaagaccaaatcagccctgtgccaggagcccccaaggcccctgccgccacctctatcctgcacaaggctggcgaggtggtggtagccttcccagcggcccggctgagcacggggccagccctggtggcagcaggcctggctccagctgaggtggtggtggccacggtggccagcagtggggtggtgaagtttggcagcacgggctccacgccccccgtgtctcccaccccctcggagcgctcactgctcagcacgggcgatgaaaactccacccccggggacacctttggtgagatggtgacatcacctctgacgcagctgaccctgcaggcctcgccactgcagatcctcgtgaaggaggagggcccccgggccgggtcctgttgcctgagccctggggggcgggcggagctagaggggcgcgacaaggaccagatgctgcaggagaaagacaagcagatcgaggcgctgacgcgcatgctccggcagaagcagcagctggtggagcggctcaagctgcagctggagcaggagaagcgagcccagcagcccgcccccgcccccgcccccctcggcacccccgtgaagcaggagaacagcttctccagctgccagctgagccagcagcccctgggccccgctcacccattcaaccccagcctggcggccccagccaccaaccacatagacccttgtgctgtggccccggggcccccgtccgtggtggtgaagcaggaagccttgcagcctgagcccgagccggtccccgccccccagttgcttctggggcctcagggccccagcctcatcaagggggttgcacctcccaccctcatcaccgactccacagggacccaccttgtcctcaccgtgaccaataagaatgcagacagccctggcctgtccagtgggagcccccagcagccctcgtcccagcctggctctccagcgcctgccccctctgcccagatggacctggagcacccactgcagcccctctttgggacccccacttctctgctgaagaaggaaccacctggctatgaggaagccatgagccagcagcccaaacagcaggaaaatggttcctcaagccagcagatggacgacctgtttgacattctcattcagagcggaggtaaccccagaaatttcagcagatttcaaggagccgccatccctgccagggaaggagaagccatccccgaagacagtctgtgggtcccccctggcagcacagccatcaccttctgctgagctcccccaggctgccccacctcctccaggctcaccctccctccctggacgcctggaggacttcctggagagcagcacggggctgcccctgctgaccagtgggcatgacgggccagagcccctttccctcattgacgacctccatagccagatgctgagcagcactgccatcctggaccaccccccgtcacccatggacacctcggaattgcactttgttcctgagcccagcagcaccatgggcctggacctggctgatggccacctggacagcatggactggctggagctgtcgtcaggtggtcccgtgctgagcctagcccccctcagcaccacagcccccagcctcttctccacagacttcctcgatggccatgatttgcagctgcactgggattcctgcttgtagctctctggctcaagacggggtggggaaggggctgggagccagggtactccaatgcgtggctctcctgcgtgattcggcctctccacatggttgtgagtcttgacaatcacagcccctgctttttcccttccctgggaggctagaacagagaagcccttactcctggttcagtgccacgcagggcagaggagagcagctgtcaagaagcagccctggctctcacgctggggttttggacacacggtcagggtcagggccatttcagcttgacctccttttttgaggtcagggggcactgtctgtctggctacaatttggctaaggtaggtgaagcctggccaggcgggaggcttctcttctgacccagggctgagacaggttaaggggtgaatctccttcctttctctccctgctttgctgtgaagggagaaattagcctgggcctctaccccctattccctgtgtctgccaaccccaggatcccagggctccctgccattttagtgtcttggtgtagtgtaaccatttagtggttggtggcaacaattttatgtacaggtgtatatacctctatattatatatcgacatacatatatatttttgggggggggcggacaggagatgggtgcaactccctcccatcctactctcacagaagggcctggatgcaaggttacccttgagctgtgtgccacagtctggtgcccagtctggcatgcagctacccaggcccacccatcacgtgtgattgacatgtaggtaccctgccacggcctatgccccacctgccctgcttcctggctccttatcagtgccatgagggcagaggtgctacctggccttcctgccaggagctctccacccactcacattccgtccccgccgcctcactgcagccagcgtggccctaggacaggaggagcttcgggcccagcttcaccctgcggtggggctgaggggtggccatctcctgccctggggccactggcttcacattctgggctgactcataggggagtaggggtggagtcaccaaaaccagtgctgggacaaagatggggaaggtgtgtgaactttttaaaataaacacaaaaacacaggcctgtt

SEQ ID NO: 102105 - DNA, 2397 bp, Artificial Sequence
  derived and/or modified sequence
atgccccccctgaagagccccgccgccttccacgagcagcggcggtccctcgagagggcaaggaccgaggattatctcaagaggaaaatccgttccaggcctgagagatctgaattggtgcggatgcacattctagaggagacatccgccgagcccagcttacaggccaaacagttaaaactcaagcgagctagacttgcggacgacctgaacgagaagatcgcgcagcggcctgggcccatggaactcgtcgaaaaaaatatccttcccgtggaaagctcacttaaggaggctatcatcgtcgggcaggtgaattatccaaaagttgccgactcatcctcattcgatgaggattcttccgacgccctgagccccgagcagccagcctctcacgaatcacaggggtcggtacccagccccctcgaggccagggttagtgaaccgctccttagcgctacctccgcaagccctacccaagttgtttcccagttacccatgggccgagactccagggagatgttgttcttagctgagcaaccacctttgccaccacctccattattgccacccagcctgactaatggaaccacaatacccacagctaagagtacacctacccttattaagcagagccagccgaaaagtgcttcagagaagtctcagaggtccaagaaggctaaggagttgaagcctaaagtcaaaaaactaaagtaccatcagtatataccccccgaccagaagcaagacaggggggcgcctccaatggactcttcgtatgcaaaaatcctccaacagcagcagttgtttctacagctgcagatcctcaaccaacagcagcagcagcaccataactatcaagccatcctccctgccccacccaaatctgcaggcgaagccttggggtcatctggtaccccacctgtccggagcttgtccacaaccaattcttcctcatccagcggggcgcccggaccttgcggcttggcccgacaaaattctacctccctgacaggcaagcccggggccctacctgcgaatctggatgatatgaaagtggcagaacttaaacaggagctgaagctccggtcacttccagtcagtggaactaaaaccgagctgatagagcgattgcgagcataccaggaccagatcagcccagtccctggggcccctaaagcccctgccgccacttctatcctccacaaggccggggaggttgtggtggcgtttccagcagcccggctgtctacaggacctgcccttgtggcagcaggcctggcaccagctgaagttgttgtcgctaccgtggcaagctctggggtagtcaaatttggctccacaggctcgacccctcccgtcagccctaccccaagcgaacggtcactcctaagcacaggcgatgagaattccacccctggtgacaccttcggagagatggtaaccagcccacttacgcagctcaccctgcaggcttctcctctccagattctcgtgaaggaggaaggaccacgcgccgggtcctgttgtcttagtccgggaggtcgtgccgaactcgagggccgggacaaggaccagatgcttcaggagaaagataagcagatcgaggccttgacacgcatgttgcgccaaaagcaacagctcgtagagagactgaaactccagctggaacaagagaaacgggcacagcagccagcccccgctccagcccctttgggaacacccgttaaacaggaaaactccttctcttcctgccagctctcccagcagccgctcgggcctgctcatccctttaatcctagcctggccgcaccggctactaaccacatcgacccatgcgctgtagcccccggacctccatctgtcgttgtcaagcaggaggctcttcagcccgagcccgagcccgttccggctccccagctgttacttggcccccaggggccgtccctgattaaaggagtcgctccccccaccctgattacagatagtaccggaacccaccttgtgctgactgtgaccaacaaaaatgccgactctcccggtctgagcagcgggagccctcaacagccttctagtcagcctggcagccccgcgcctgccccgtcagcccagatggacctagaacaccctctgcagcccctatttggcactccaacaagtctgcttaaaaaggagccaccaggctacgaagaagctatgtcacagcagccgaagcagcaagaaaatggctcatctagccagcagatggacgacctttttgacatcctaattcagtctggaggcaacccccgaaatttctccaggttccagggcgcagctatacctgcccgggaaggagaagcaattcctgaggatagcctgtgggttcctcccggttcaactgctatcacgttctgttag

SEQ ID NO: 102106 - DNA, 2397 bp, Artificial Sequence
  derived and/or modified sequence
atgcctccgctgaagagcccagctgctttccacgaacagagacgatctctcgaacgcgcaagaacagaggactacctaaagaggaagattcgttcccggccagaacgctcagaactcgttcggatgcacatactcgaagaaacttcagctgagccatccctgcaagcaaagcaactcaaattaaagagggcacgcttggccgacgacctaaatgagaagatagctcaacggccaggcccaatggagttggtggaaaagaacatcctcccggtagagagcagcttgaaagaagccatcattgtgggacaggtgaattatccaaaagtagcagacagcagctcgttcgacgaggactctagcgacgccttgagccccgagcagcctgcgtcacatgaaagtcaaggatccgtccccagtccattagaagcgagggtctcagaaccgctgctctcagctaccagcgccagccccacccaggtggtgtctcagctaccaatgggacgggacagccgcgaaatgctttttctggcagaacagccgccactgcctccaccccctctgctgcccccttccctgacaaacggcaccactatccccactgccaaaagcacgcccactcttatcaaacagtcacagccgaaatcggcgagtgagaagtcccagcggagcaagaaggccaaagaattaaagccaaaagttaagaagcttaaataccaccaatacatcccacccgaccagaagcaggatagaggggctcctccgatggactcctcttatgctaaaattcttcagcagcagcagcttttcctgcagctgcagatccttaaccagcaacaacaacagcaccataactatcaggccattcttcccgcaccaccaaaaagcgctggggaagctctgggatccagtggcaccccccctgtgcgcagtctaagtaccacaaatagttcctcaagctctggggcacccggaccctgcggtttagccaggcaaaattcaacatcactgaccgggaagccaggagcactgccagcgaatctcgacgatatgaaagtggctgagctgaagcaggagctgaaacttcggagtctgcccgtgagcggtacaaaaactgaattgattgaacgactgagggcctaccaagatcagatttctcccgtgccaggggctcctaaggctcctgcggcaactagcattcttcacaaagccggagaggtggtcgtagcattcccagccgcaagactgagtaccggcccagccttagttgccgcaggcctcgccccagctgaggtggtggtggccaccgtggccagctcaggtgtggtaaaattcgggtctacagggagtacccccccagtcagcccaacgccctcagagcgaagcttactgagcaccggcgatgagaacagcacgccgggtgatactttcggcgaaatggttacctcacccctgacacagctgaccctgcaggctagccccctgcaaatcctggtaaaggaggagggacctcgtgcagggagttgctgtctctcacctgggggtcgggctgagctggagggacgcgacaaggaccagatgctccaagaaaaggacaagcagattgaagcactcactcggatgcttcggcaaaagcagcagttggtggagcggctaaaactgcagttggaacaggagaagagggcccagcaacccgctcccgctcccgctcctctgggcacacccgtgaaacaggagaactccttcagctcatgccaactgagccagcaacccctgggacccgctcatccctttaacccctccttggcagccccagccaccaaccacattgacccctgcgcagtagcacctgggcctccatctgtcgttgtgaagcaggaagctcttcaaccagagcccgagcccgtgcctgcgccacagctccttttggggccacagggaccatctcttattaagggcgtagccccaccaactctgataacagatagcacaggcacacacttagtcttgaccgtgaccaacaagaacgcggattccccgggactatccagtggtagcccacagcaaccaagcagccagcccggaagccctgctccagccccttctgcccagatggatctggagcacccactgcagccactgttcggcacacccacaagcctgcttaagaaagagcccccagggtatgaggaagctatgagccagcagcccaagcagcaagaaaacggatcttcttcacagcaaatggatgacctgttcgatatcctcattcagagtggagggaatcctaggaatttcagccggtttcagggggcagcgattccggctcgcgagggagaggctatccccgaagactcactttgggttccaccgggatccactgctattactttttgctag

SEQ ID NO: 102107 - DNA, 2397 bp, Artificial Sequence
  derived and/or modified sequence
atgccccccctgaagagccccgccgccttccacgagcagagaagaagcctggagagagccagaaccgaggactacctgaagagaaagatcagaagcagacccgagagaagcgagctggtgagaatgcacatcctggaggagaccagcgccgagcccagcctgcaggccaagcagctgaagctgaagagagccagactggccgacgacctgaacgagaagatcgcccagagacccggccccatggagctggtggagaagaacatcctgcccgtggagagcagcctgaaggaggccatcatcgtgggccaggtgaactaccccaaggtggccgacagcagcagcttcgacgaggacagcagcgacgccctgagccccgagcagcccgccagccacgagagccagggcagcgtgcccagccccctggaggccagagtgagcgagcccctgctgagcgccaccagcgccagccccacccaggtggtgagccagctgcccatgggcagagacagcagagagatgctgttcctggccgagcagccccccctgccccccccccccctgctgccccccagcctgaccaacggcaccaccatccccaccgccaagagcacccccaccctgatcaagcagagccagcccaagagcgccagcgagaagagccagagaagcaagaaggccaaggagctgaagcccaaggtgaagaagctgaagtaccaccagtacatcccccccgaccagaagcaggacagaggcgccccccccatggacagcagctacgccaagatcctgcagcagcagcagctgttcctgcagctgcagatcctgaaccagcagcagcagcagcaccacaactaccaggccatcctgcccgccccccccaagagcgccggcgaggccctgggcagcagcggcaccccccccgtgagaagcctgagcaccaccaacagcagcagcagcagcggcgcccccggcccctgcggcctggccagacagaacagcaccagcctgaccggcaagcccggcgccctgcccgccaacctggacgacatgaaggtggccgagctgaagcaggagctgaagctgagaagcctgcccgtgagcggcaccaagaccgagctgatcgagagactgagagcctaccaggaccagatcagccccgtgcccggcgcccccaaggcccccgccgccaccagcatcctgcacaaggccggcgaggtggtggtggccttccccgccgccagactgagcaccggccccgccctggtggccgccggcctggcccccgccgaggtggtggtggccaccgtggccagcagcggcgtggtgaagttcggcagcaccggcagcaccccccccgtgagccccacccccagcgagagaagcctgctgagcaccggcgacgagaacagcacccccggcgacaccttcggcgagatggtgaccagccccctgacccagctgaccctgcaggccagccccctgcagatcctggtgaaggaggagggccccagagccggcagctgctgcctgagccccggcggcagagccgagctggagggcagagacaaggaccagatgctgcaggagaaggacaagcagatcgaggccctgaccagaatgctgagacagaagcagcagctggtggagagactgaagctgcagctggagcaggagaagagagcccagcagcccgcccccgcccccgcccccctgggcacccccgtgaagcaggagaacagcttcagcagctgccagctgagccagcagcccctgggccccgcccaccccttcaaccccagcctggccgcccccgccaccaaccacatcgacccctgcgccgtggcccccggcccccccagcgtggtggtgaagcaggaggccctgcagcccgagcccgagcccgtgcccgccccccagctgctgctgggcccccagggccccagcctgatcaagggcgtggccccccccaccctgatcaccgacagcaccggcacccacctggtgctgaccgtgaccaacaagaacgccgacagccccggcctgagcagcggcagcccccagcagcccagcagccagcccggcagccccgcccccgcccccagcgcccagatggacctggagcaccccctgcagcccctgttcggcacccccaccagcctgctgaagaaggagccccccggctacgaggaggccatgagccagcagcccaagcagcaggagaacggcagcagcagccagcagatggacgacctgttcgacatcctgatccagagcggcggcaaccccagaaacttcagcagattccagggcgccgccatccccgccagagagggcgaggccatccccgaggacagcctgtgggtgccccccggcagcaccgccatcaccttctgctag

SEQ ID NO: 102108 - protein, 1124 aa, Artificial Sequence
  derived and/or modified sequence
MGENEDEKQAQAGQVFENFVQASTCKGTLQAFNILTRHLDLDPLDHRNFYSKLKSKVTTWKAKALWYKLDKRGSHKEYKRGKSCTNTKCLIVGGGPCGLRTAIELAYLGAKVVVVEKRDSFSRNNVLHLWPFTIHDLRGLGAKKFYGKFCAGSIDHISIRQLQLILFKVALMLGVEIHVNVEFVKVLEPPEDQENQKIGWRAEFLPTDHSLSEFEFDVIIGADGRRNTLEGFRRKEFRGKLAIAITANFINRNSTAEAKVEEISGVAFIFNQKFFQDLKEETGIDLENIVYYKDCTHYFVMTAKKQSLLDKGVIINDYIDTEMLLCAENVNQDNLLSYAREAADFATNYQLPSLDFAMNHYGQPDVAMFDFTCMYASENAALVRERQAHQLLVALVGDSLLEPFWPMGTGCARGFLAAFDTAWMVKSWNQGTPPLELLAERESLYRLLPQTTPENINKNFEQYTLDPGTRYPNLNSHCVRPHQVKHLYITKELEHYPLERLGSVRRSVNLSRKESDIRPSKLLTWCQQQTEGYQHVNVTDLTTSWRSGLALCAIIHRFRPELINFDSLNEDDAVENNQLAFDVAEREFGIPPVTTGKEMASAQEPDKLSMVMYLSKFYELFRGTPLRPVDSWRKNYGENADLSLAKSSISNNYLNLTFPRKRTPRVDGQTGENDMNKRRRKGFTNLDEPSNFSSRSLGSNQECGSSKEGGNQNKVKSMANQLLAKFEESTRNPSLMKQERRVSGIGKPVLCSSSGPPVHSCCPKPEEATPSPSPPLKRQFPSVVVTGHVLRELKQVSAGSECLSRPWRARAKSDLQLGGTENFATLPSTRPRAQALSGVLWRLQQVEEKILQKRAQNLANREFHTKNIKEKAAHLASMFGHGDFPQNKLLSKGLSHTHPPSPPSRLPSPDPAASSSPSTVDSASPARKEKKSPSGFHFHPSHLRTVHPQLTVGKVSSGIGAAAEVLVNLYMNDHRPKAQATSPDLESMRKSFPLNLGGSDTCYFCKKRVYVMERLSAEGHFFHRECFRCSICATTLRLAAYTFDCDEGKFYCKPHFIHCKTNSKQRKRRAELKQQREEEATWQEQEAPRRDTPTESSCAVAAIGTLEGSPPVHFSLPVLHPLLG

SEQ ID NO: 102109 - DNA, 3375 bp, Artificial Sequence
  derived and/or modified sequence
atgggagagaatgaggatgagaaacaggcccaggctggccaggtcttcgaaaacttcgtgcaggcctctacttgcaaaggaacactgcaggcgtttaacatcttaacccggcacctcgatttggatcctctggaccacaggaacttttatagtaaacttaagtctaaagttaccacatggaaagccaaagcactgtggtacaagctggacaaacgtggcagtcataaggagtataagcggggcaagagttgtacaaacacaaaatgcctgatcgtcggcggaggtccctgcggcctccgcacggccatcgagctcgcttatctgggggcaaaagtggtggttgtggagaagagggactccttctctagaaacaatgtgttgcatctttggccctttacaattcatgatctcagaggccttggcgcaaaaaaattctatggtaagttctgtgccggatccatcgatcacatttcaatcaggcaactccagctgatattattcaaggtggcactaatgttaggtgtggaaatccacgtgaatgttgagtttgtaaaagtgttagagcctccagaagaccaggaaaaccagaagattgggtggcgagcggaattcttgcctacagaccacagtttatcagaatttgagtttgatgtgatcattggcgccgacggccggaggaacacactcgagggtttccggcgaaaggagttccgaggtaagctggccattgccattacagccaatttcatcaataggaactcaacggcagaggctaaggtggaagagattagtggagtggcgtttatctttaatcagaagttctttcaagacctgaaggaggaaactgggattgacttggaaaatatcgtctactataaggattgcacacattattttgtgatgaccgcgaaaaagcagtcactcctcgataagggcgtcatcatcaatgattacattgacactgagatgctcttgtgtgccgagaatgtgaaccaggacaacctactctcatacgccagagaagccgctgatttcgccaccaattaccagcttccctccctggactttgccatgaatcattacggccaaccagatgtagctatgtttgactttacttgtatgtatgcctctgaaaatgctgctttagtaagagaaagacaagctcaccaactgctggtcgctctggtaggagactcactgttggaacccttttggcccatgggcacgggctgtgccagggggtttctggccgccttcgacacagcttggatggtgaaatcatggaatcaaggtactccgccccttgaactcctcgcagagagggaatcgctatacagacttctgccgcagacaactcccgagaacatcaacaagaacttcgagcaatataccctcgatcctggcacccggtatcccaacctgaatagccattgcgtccgcccccaccaggtaaagcatttgtatataaccaaagagctggaacactatccactggaacgccttgggtcagtacgcaggtccgtcaacctgtcacggaaagagtctgacatcagaccatccaaacttctgacttggtgccagcagcagaccgaagggtatcagcacgtcaacgtgaccgacctgaccacaagttggcggagtgggctggccctgtgtgcaatcattcaccgattcagacccgaactgattaacttcgactctttgaacgaagacgacgcagtggagaacaatcaactggcttttgacgtggcggaaagagagttcggcatcccgcccgtgactaccggtaaagagatggcctccgcgcaagagcccgataagctgtctatggtcatgtatctctccaagttctacgagctgtttagaggcaccccactcagacctgtcgactcttggagaaagaattatggcgagaacgccgacttaagtctggcgaagagctcaatctccaacaattatctcaaccttaccttccctcgtaaaaggaccccaagagtggatggccagactggtgagaatgatatgaacaaaagaaggagaaaggggttcacgaatttggatgagccttccaacttttcatcgcggtctctggggtctaatcaggaatgcgggagtagcaaagaaggaggtaaccagaacaaggtaaagtcaatggctaaccaattactggctaaatttgaggaatcaacgcgcaatcccagcctcatgaagcaagagaggcgtgtgtctggcatcggaaagcctgtgttgtgttcatcctccggaccccccgtacattcatgttgccccaaaccagaagaggccaccccttcgcccagtccacccctcaaacgccagttcccgtcagtggtagttacaggccatgttctccgcgagcttaagcaggtgtccgccggatctgagtgcctctcaagaccgtggagagctagggccaagtctgatctgcaactgggcggtaccgagaacttcgccactctgccttctacacgaccacgcgcccaggccctctccggggtgttgtggcggctgcagcaggtggaggagaagatccttcagaagcgtgcccagaacctagcaaacagagaatttcatacgaagaacattaaggagaaagccgcccatctggccagtatgttcggccacggcgactttccgcaaaataagttgctgtcgaagggcctgtcacatacccaccccccgagtccaccttcacggctgccctcacctgatccagccgctagtagctcgcccagcaccgtggattccgcctcccctgccagaaaagagaagaagagtcctagtggcttccacttccatccttcccatctccgcactgttcacccgcagcttaccgtgggaaaagttagctctggaattggggccgctgccgaggtgctggtgaatctttatatgaacgaccataggccgaaggcgcaggcaacaagccctgacctggaatctatgaggaagtccttcccactgaaccttggcggaagcgacacctgttacttttgcaagaaaagagtgtacgtgatggagcggttgtctgccgaggggcactttttccatagggagtgcttcaggtgtagtatatgcgctaccactttaaggctggccgcctatacctttgactgcgacgaaggcaagttctactgtaaaccccacttcatacactgcaaaacaaactctaagcagagaaaaagaagagctgaactcaagcaacagagagaggaggaggctacctggcaagaacaggaagctccacggcgggacacaccaaccgaatcgagttgcgcagttgccgccataggcacattggagggtagtccccctgttcacttctcactcccggtactacatccgctcctcgggtag

SEQ ID NO: 102110 - DNA, 3375 bp, Artificial Sequence
  derived and/or modified sequence
atgggagaaaatgaagatgagaagcaggcccaggccggccaggtgtttgaaaattttgtgcaggccagcacctgcaagggcaccctgcaggccttcaacatcctgaccaggcacctggacctggaccccctggaccacaggaacttctacagcaagctgaagagcaaggtgaccacctggaaggccaaggccctgtggtacaagctggacaagaggggcagccacaaggagtacaagaggggcaagagctgcaccaacaccaagtgcctgattgtgggcggcggcccctgtggcctgaggacagccatcgagctggcctacctgggcgccaaggtggtggtggtggagaagagggacagcttcagcagaaataatgtgctgcacctgtggcccttcaccatccatgacctgcggggcctgggcgccaagaagttctacggcaagttctgtgccggcagcattgaccacatcagcatccggcagctgcagctgatcctcttcaaggtggccctgatgctgggcgtggagatccacgtgaatgtggagtttgtgaaggtgctggagcccccagaggaccaggagaaccagaagattggctggagggctgagttcctgcccacagaccacagcctgtctgaatttgaatttgatgtgatcatcggggctgatggaagaagaaacaccctggagggcttccggaggaaggagttccggggcaagctggccatcgccatcacagccaacttcatcaacagaaacagcacagctgaggccaaggtggaggagatcagcggcgtggccttcatcttcaaccagaagttcttccaggacctgaaggaggagaccggcatcgacctggagaacatcgtgtactacaaggactgcacccactactttgtgatgacagccaagaagcagagcctgctggacaagggcgtcatcatcaatgactacatcgacacagagatgctgctgtgtgccgagaatgtgaaccaggacaacctgctgtcctatgcccgggaggccgctgactttgccaccaactaccagctgcccagcctggactttgccatgaaccactacggccagccagatgtggccatgtttgacttcacctgcatgtatgcctctgaaaatgctgccctggtgcgggagcggcaggcccaccagctgctggtggccctggtgggggacagcctgctggagcccttctggcccatgggcaccggctgtgcccggggcttcctggccgcctttgacacagcctggatggtgaagtcctggaaccagggcaccccacccctggagctgctggccgagcgggagagcctgtaccgcctgctgccccagaccaccccagagaacatcaacaagaactttgagcagtacaccctggaccccggcacccgctaccccaacctgaacagccactgtgtgcggccccaccaggtgaagcacctgtacatcaccaaggagctggagcactaccccctggagcggctgggctctgtgagaagatctgtgaacctgagcaggaaggagagtgacatccggcccagcaagctgctgacctggtgccagcagcagacagagggctaccagcacgtgaatgtgacagacctgaccacctcctggaggagcggcctggccctgtgtgccatcatccaccgcttccggcctgagctgatcaactttgacagcctgaatgaagatgatgctgtggagaacaaccagctggcctttgatgtggccgagcgggagtttggcatcccccctgtgaccaccgggaaggagatggccagcgcccaggagccagacaagctgtccatggtgatgtacctgagcaagttctatgagctgttccggggcacccccctgcggcctgtggacagctggaggaagaactacggggagaatgctgacctgagcctggccaagagcagcatcagcaacaactacctgaacctgaccttccccaggaagaggaccccccgggtggatggccagacaggagaaaatgacatgaacaagagaagaaggaagggcttcaccaacctggatgagcccagcaacttcagcagccgcagcctgggcagcaaccaggagtgtggcagcagcaaggagggcggcaaccagaacaaggtgaagtccatggccaaccagctgctggccaagtttgaggagagcaccaggaaccccagcctgatgaagcaggagcggcgggtgtctggaattggcaagcctgtgctgtgcagcagcagcggcccccctgtgcacagctgctgccccaagccagaggaggccacccccagccccagcccccccctgaagaggcagttccccagcgtggtggtgacaggccacgtgctgcgggagctgaagcaggtgtctgctggctctgaatgtctgagccggccctggagggcccgggccaagagtgacctgcagctgggcggcacagaaaattttgccaccctgcccagcacccggccccgggcccaggccctgtctggagtgctgtggaggctgcagcaggtggaggagaagatcctgcagaagagggcccagaacctggccaaccgggagttccacaccaagaacatcaaggagaaggccgcccacctggcctccatgtttggacatggagacttcccccagaacaagctgctgagcaagggcctgagccacacccacccccccagcccccccagccggctgcccagcccagaccctgctgccagcagcagccccagcacagtggacagcgccagccctgccaggaaggagaagaagagccccagcggcttccacttccaccccagccacctgaggacagtgcacccccagctgactgtgggcaaggtgtcctctggaattggagctgctgctgaggtgctggtgaacctgtacatgaatgaccaccggcccaaggcccaggccaccagcccagacctggagagcatgaggaagagcttccccctgaacctgggcggcagtgacacctgctacttctgcaagaagagggtgtatgtgatggagcggctgtctgctgagggccacttcttccaccgggagtgcttccgctgcagcatctgtgccaccaccctgcggctggccgcctacacctttgactgtgatgagggcaagttctactgcaagccccacttcatccactgcaagaccaacagcaagcagaggaagagaagagctgagctgaagcagcagcgggaggaggaggccacctggcaggagcaggaggccccccggcgggacacccccacagagagcagctgtgctgtggccgccatcggcaccctggagggcagcccccctgtgcacttcagcctgcctgtgctgcaccccctgctgggctag

SEQ ID NO: 102111 - DNA, 3906 bp, Artificial Sequence
  derived and/or modified sequence
ctcggctggctaagcctgcgccgggccgcctcgctcgctcccagctctgtcagtggcccgcggggcccgatcgctgcgcccgcggccagggccgaggcaggcctgacccggggccgggcagcccgcgcgactttcggaacatggcaacccgtgtgtgtctcatcccagaaagagaagactttaaccactgtgatgcctgagaatccagtgagtgtgacgtttctccagatacttcatgctgttcacctgtgtcctcgccgcaccactgccgcacacgactcctgaaccatgggggaaaacgaggatgagaagcaggcccaggcggggcaggtttttgagaactttgtccaggcatccacgtgcaaaggtaccctccaggccttcaacattctcacacgacacctggacctagaccctctggaccacagaaacttttattccaagctcaagtccaaggtgaccacctggaaagccaaagccctgtggtacaaattggataagcgtggttcccacaaagagtataagcgagggaagtcgtgcacgaacaccaagtgtctcatagttgggggaggaccctgtggcttgcgcactgccattgaacttgcctacctgggagccaaagtggtcgtggtggagaagagggactccttctcccggaacaacgtgctacacctctggcctttcaccatccatgaccttcgtggcctgggagccaagaagttctatgggaagttctgtgctggctccatcgaccatatcagtattcgccaactacagctcatcctattcaaggtggccctgatgctgggagttgaaatccatgtgaatgtggagttcgtgaaggttctagagcctcctgaagatcaagaaaatcaaaaaattggctggcgggcagaatttctccctacagaccattctctgtcggagtttgagtttgacgtcatcattggtgccgatggccgcaggaacaccctggaagggttcagaagaaaagaattccgtgggaagctggcgattgccatcaccgccaacttcataaacagaaacagcacagcggaagccaaggtggaagagattagtggtgtggctttcatcttcaatcagaaattttttcaggaccttaaagaagaaacaggcatagatcttgagaacattgtttactacaaggactgcacccactattttgtaatgacagccaagaagcagagcctgctcgacaaaggtgtcatcattaacgactacatcgacacagagatgctgctgtgtgcggagaacgtgaaccaagacaacctgctatcctatgcccgggaagctgcagactttgccaccaactaccagctgccatccttagactttgccatgaaccactatgggcagcctgatgtggccatgtttgactttacctgcatgtatgcctcagagaacgcggccctggtgcgggagcggcaggcgcaccagctgctcgtggcccttgtgggtgacagcttgcttgagccattttggcccatgggtacaggctgtgcccgtggcttcctggcagcctttgacacggcatggatggtgaagagctggaaccagggcacccctcccctggagctgctggctgaaagggaaagtctctaccggctgttacctcagacaaccccggagaacatcaacaagaactttgagcagtacacgttggacccagggacacggtacccaaacctcaactcacactgtgtcaggccccatcaggtgaagcatttgtatatcactaaggagctggagcactaccctctcgagagactgggctcggtgaggagatctgtcaacctctccaggaaggagtcagatatccggcccagcaagctcctgacctggtgccagcagcagacagagggctaccagcatgtcaacgtcaccgacctgaccacatcctggcgcagtgggttggccctgtgtgccatcatccaccgcttccggcctgagctcatcaactttgactctttgaatgaagatgatgctgtggagaacaaccagctcgcatttgatgtggccgagcgagagtttgggatccctccagtgaccacgggcaaagagatggcatctgcccaggagcctgacaagctcagcatggtcatgtacctctccaagttctacgagctcttccggggcaccccactgaggcccgtggattcttggcgcaaaaactatggagaaaatgctgacctcagcttggccaaatcatccatttctaataactatctcaacctcacatttccaaggaagaggactccacgggtggatggtcaaaccggagagaatgacatgaacaaacggagacggaagggcttcaccaacctggacgagccttcaaacttttccagccgtagcttgggctccaatcaagagtgtgggagcagtaaggaaggtggaaatcagaacaaagtcaagtccatggcgaatcagctgctggccaagtttgaggagagcactcggaacccctcactcatgaagcaggaacgccgtgtctcagggataggtaagccggtcctgtgctcttcctccggccctcctgttcactcttgctgccccaagccggaggaggccacacccagcccatcacctcctctgaaaaggcagttcccctctgtggtcgtgacggggcacgtgctcagagagctcaagcaagtgtctgctggcagtgagtgcctgagcagaccttggagagccagagccaagtctgacctacagctgggtgggacagaaaatttcgctaccctgccttctacccgcccgagggcgcaggctctttccggggtgctgtggcggctgcagcaagtggaggaaaagattctccagaagagggctcagaacttggccaacagggaatttcacacaaagaacattaaggagaaggcggctcaccttgcctccatgtttggacacggggatttcccgcagaataaactactctctaaaggcctgtctcatactcatcctccatctcctccctctcgccttccgtctcctgatccagctgcttcttcctctccatcaactgttgactctgcttctcctgccagaaaggaaaagaagtcaccttcagggttccattttcatcccagccatttgagaacagtgcatcctcagctgacggtagggaaagtgtccagcggaataggggctgcagctgaagtcctggtcaatctgtacatgaatgatcacagacctaaggcccaggccacctctccagacctggaatctatgcgaaagtcatttccccttaacctgggaggcagcgacacgtgttacttctgtaagaaacgtgtgtacgtgatggaacggctgagcgccgagggccacttcttccaccgggagtgtttccgctgcagcatctgtgccaccaccttgcgcctggccgcctacacctttgactgcgatgaaggcaaattttactgcaagcctcacttcattcactgtaaaaccaatagcaaacaacggaagagacgggcagagttgaagcaacaaagagaggaggaggcaacatggcaagagcaggaagcccctcggagagacactcccaccgaaagttcttgcgcagtggccgccattggcaccctggaaggcagccccccagttcatttcagccttccagtgctacacccacttcttggctgacacacttctgctctaagagtctccctccctttatagaatgtcaaccaaagagtgccctcctcccctctcagcctcctctttagctagcctccccatctcatcacaacgcatgtctgtgacctttggtaatcatttacagtgccacacggaaccctgtattttgcacacagcaaaacaaacaatgtttagctttatttatggtatttgatgctgtaaatggaaataaatattgttctttataaa

SEQ ID NO: 102112 - DNA, 3375 bp, Artificial Sequence
  derived and/or modified sequence
atgggcgagaacgaggacgagaagcaggcccaggccggccaggtgtttgaaaactttgtgcaggccagcacttgtaagggcacacttcaggccttcaatattctcaccagacacctggacctcgaccccttagatcacagaaatttctattccaaactgaagtcaaaagttacaacatggaaagccaaggccttatggtacaaactggacaaacgcgggagccataaagagtacaaaagaggcaagtcatgcactaacactaaatgtttaatcgtcgggggggggccttgtggactccggactgcaatcgaactggcctatctgggtgccaaggtcgtggtggtggagaagcgggattcgttctctcggaacaatgtcctccacctgtggccatttaccatccacgaccttcgcggactcggagccaagaaattttacggtaaattttgtgccggttctatcgaccatatatctatccgccagctgcagctaatattgtttaaggtcgctttgatgctgggtgttgaaatacacgtcaatgtcgagtttgttaaggtactcgagcctcccgaagaccaggagaatcaaaaaattggatggagggcagaatttttgcctacagatcactcgttgtcagagttcgagttcgatgtgattattggcgccgacggacgccgaaacaccctcgaggggtttaggaggaaggaatttcgtggcaaactggccatcgctatcacggctaacttcatcaatcgcaactctacagctgaagcaaaggtggaagagatcagcggtgttgcctttatattcaatcagaagttttttcaggatcttaaagaggaaacagggatcgaccttgaaaacatcgtctactacaaggattgtactcactacttcgtgatgactgccaagaaacagtctttgctggacaaaggggtaatcattaacgactatatagatacagaaatgttgctctgtgcagagaatgtaaatcaggataacctgctgtcctacgctcgcgaggccgccgacttcgctacaaattatcaactgccctccctggacttcgctatgaatcactacggacaacctgacgtcgccatgtttgacttcacttgcatgtatgcctccgagaacgctgcactggtccgcgagcgacaggcacaccaactactggtggccttagttggtgatagcttgctcgagcccttttggccaatggggaccggctgcgctcggggattcttggccgccttcgatacagcctggatggtgaagtcgtggaaccagggcaccccacctttggagctgttggcagagagagagagcctctatcgcctgcttccccagaccacccctgaaaacatcaacaaaaactttgagcagtataccctcgatcccgggacacgatacccgaacctgaacagccactgtgtgcgccctcaccaggttaaacacctgtacatcactaaggagctggagcactatcccctggaaaggctgggttctgtacggcgatccgtgaatttgagtaggaaggaatctgacatccggcccagcaagttgctaacttggtgccagcagcagacggaaggctaccagcacgtaaatgtgacggaccttaccacgtcttggaggagtggcctagccctctgcgctataattcacaggttccgacccgaactgatcaacttcgatagtttgaatgaagacgatgccgtcgaaaacaatcagctcgccttcgatgtggctgaacgcgagttcggtatcccacctgttaccaccggaaaggaaatggctagtgctcaggagcccgacaagctgtcaatggttatgtatctgtccaagttttatgaactgttccgggggactccacttcgcccagtggactcctggcgcaaaaactacggagaaaacgcagatctgagtctcgcgaagagctccatttccaataattatctgaacttgacatttccacgaaaaaggacccctagggtagatggccagaccggtgaaaacgacatgaacaagcgcagaagaaagggttttactaaccttgacgaaccctccaacttcagctccagatcgcttggctccaaccaggagtgtggttcatccaaggaaggcgggaaccaaaataaagtgaagtccatggccaatcagctcctggctaagtttgaagagtcaactcgcaacccctccctaatgaagcaggagcgccgagtgtctggcatcggtaaaccagtactttgttcctccagtggaccgccagtgcactcttgttgccctaaaccagaagaggctacaccttccccatccccccccctgaaacggcagttccctagcgttgtcgtgaccggacacgtcctgcgtgagctgaagcaggtgtcggccggctctgagtgtctctctagaccatggcgcgccagggccaaatccgacctgcagcttggcggcactgagaatttcgctactctgccaagcacccgtcccagggcccaggctctttccggtgtgctttggcggctgcagcaagtagaggaaaagattcttcagaagcgtgcacagaaccttgccaatcgagagttccataccaaaaacatcaaggagaaggccgcacatctcgcctcaatgtttggccatggcgattttccccagaataaattactctctaaggggctgtctcacacccatcctcctagtccccctagccgcctccctagccctgacccggccgcgtcctcttctccctccacggtcgactctgcctcgcccgctcgcaaagagaaaaagagtccttcgggcttccattttcaccctagccacctcagaacagtgcacccacagctgactgtgggtaaggtgtcctcaggaattggggctgccgcagaggtcctggtaaatctttacatgaatgatcatagaccaaaggcgcaggccacttctccagatctagagtctatgcgtaaaagctttcccctgaacttaggcggaagcgacacctgctatttttgtaagaaacgagtttacgttatggagcgcctgtctgcggaaggtcattttttccaccgtgaatgtttcaggtgtagcatttgtgcaaccaccctgagactcgccgcgtacacttttgattgtgacgagggaaaattttactgcaagccccacttcatccactgtaagaccaactccaaacagagaaaacgacgggcagaacttaaacagcagagggaagaggaggccacctggcaggagcaagaagcccctcgacgcgacacacctactgaatcaagctgcgctgtggcagctataggtacgcttgagggcagcccacctgtgcacttctccctcccggtactgcaccccctgctgggatag

SEQ ID NO: 102113 - DNA, 3375 bp, Artificial Sequence
  derived and/or modified sequence
atgggcgagaatgaggacgagaaacaagcgcaagcaggtcaggtcttcgaaaactttgtgcaggcttcgacctgcaagggaacgctccaagcattcaacatactgaccaggcacctcgatctcgatcccttagaccaccgcaatttttactccaaattgaagtccaaagtgactacatggaaagccaaggccttgtggtacaagcttgataagagaggctcccacaaggagtataagagggggaaaagttgcaccaacactaaatgcctgatcgtggggggaggaccttgcgggctgaggaccgctatcgagctggcctaccttggcgcaaaagtcgtggtggtcgagaaacgcgactcattttctcggaacaatgttcttcacctttggccctttaccatccacgatctgaggggcctcggggcaaaaaaattttacggcaagttctgcgccggaagtatcgaccatattagcatcaggcagttgcagttgattttgttcaaagtggctttaatgctgggcgttgagatccacgtgaacgtggaattcgtaaaagtgctagaacctccagaagaccaagagaaccaaaagatcgggtggagagccgaatttcttcccaccgaccatagtctcagtgagttcgagtttgacgtgataattggcgcagatgggaggagaaataccctggagggctttcggagaaaagaatttcggggaaagcttgccatcgcaataaccgccaacttcattaaccgcaacagcacggccgaagccaaggtggaggaaataagcggggttgcctttatcttcaaccagaaattctttcaggacctgaaagaggaaacagggatcgatttagagaacatcgtctattataaggactgcactcattattttgtcatgacagcaaaaaagcagtctctgctcgataaaggtgttatcatcaatgactacatcgacactgaaatgctgttgtgtgccgaaaacgtcaaccaggacaacctcttgagctacgcaagggaagcagctgatttcgctacgaattaccagctgccttccctggatttcgcaatgaatcattacggccagccagatgtggcaatgtttgattttacctgtatgtatgcctccgagaacgccgctctagtgcgggagcgccaggcccaccaattgctagttgcacttgtaggcgactccttgctcgagcctttctggcccatgggtacaggatgcgcaaggggattcctagcagccttcgataccgcatggatggtcaagagctggaaccaaggtacccctccactcgaactcctcgccgagcgagagtcactatacaggctgcttccacagaccactcccgagaatatcaataaaaattttgagcaatacacattggatcccggaacgaggtatccgaatctgaatagccactgcgtgcgaccacaccaagtgaaacacctatatataaccaaagagttagagcattatccactcgaacgcttgggctcagtgaggaggagcgtaaacttgtcccgcaaggaatccgacatacgaccttccaaattactcacatggtgccagcagcagaccgagggctaccagcatgtaaacgtcaccgacctgaccacttcatggcgctccggcctggcactctgcgccattattcatcgttttaggcctgaactcataaactttgactctctgaatgaagatgacgccgtggaaaataaccagctcgcatttgatgtcgcagagcgcgaatttgggattcctccagtgaccaccggaaaagaaatggcaagcgcacaggaaccggataaactaagtatggtaatgtatcttagcaagttctacgagctgttccgaggtacacccttgcggccagtggactcctggcgtaagaattatggtgaaaacgcagatcttagcctcgcgaagtcaagtatttccaataactaccttaaccttacctttccacgtaagcgcacaccaagagtcgacggacagacgggtgagaacgacatgaataaaagacgcagaaagggattcactaatttagatgaacccagcaatttctctagccgctccctcgggtcaaatcaggagtgtggctctagcaaagaagggggtaaccaaaacaaggtgaaatctatggccaaccaactcctggcaaaatttgaagaaagtactcgcaacccaagtctcatgaagcaggaaaggcgggtcagcggtataggcaagccggttctttgttccagcagcggaccccctgtacactcatgctgcccaaaacctgaagaagcaacaccttctcccagtccacctctgaagcggcagtttcccagtgtagtcgtgaccggacacgttctgagggaactcaaacaagtgtcggcaggttccgagtgtctgtcaaggccatggagggcaagagctaaatccgatctgcagctcgggggtacagaaaactttgcaactctgccctctacgagacctagagcacaggcgctgtccggtgtgctctggcgcctgcagcaggtagaggagaagatattacagaagagggcccagaatctcgcaaatagggagttccacaccaagaatattaaggaaaaggcagcccacctggcttcaatgtttgggcacggcgactttccacagaacaaattgctgagcaaagggcttagccatactcaccccccaagcccccctagtcggctcccttctccagaccctgcagcctcttctagcccttcaaccgttgattcagcttcccccgcaagaaaagaaaagaagagcccttccggttttcatttccacccctcccacctgcggaccgtgcatccccagcttactgttggaaaagtgtcctcggggatcggagctgctgctgaggttctggtgaacctgtacatgaatgaccaccgccctaaagctcaggccacatcccccgatttggaaagcatgcgtaaaagtttccccctcaatctgggcggatctgacacctgttatttctgtaagaaaagagtatacgtcatggagaggctgagcgcggaaggacacttctttcatcgggagtgtttccgatgctcaatttgcgctactactctgcgcctggctgcatatacatttgattgcgatgaggggaagttctactgtaaaccccactttatccactgcaagaccaactccaaacagcggaaacgtcgggctgagttaaagcagcagagggaagaagaagctacctggcaggagcaggaggctcccagaagagacaccccgaccgagagcagctgcgctgtggcggcaatcggtacattagaagggagcccacccgtccacttctccttacccgtgctgcaccccctgttgggttag

SEQ ID NO: 102114 - DNA, 3375 bp, Artificial Sequence
  derived and/or modified sequence
atgggcgagaacgaggacgagaagcaggcccaggccggccaggtgttcgagaacttcgtgcaggccagcacctgcaagggcaccctgcaggccttcaacatcctgaccagacacctggacctggaccccctggaccacagaaacttctacagcaagctgaagagcaaggtgaccacctggaaggccaaggccctgtggtacaagctggacaagagaggcagccacaaggagtacaagagaggcaagagctgcaccaacaccaagtgcctgatcgtgggcggcggcccctgcggcctgagaaccgccatcgagctggcctacctgggcgccaaggtggtggtggtggagaagagagacagcttcagcagaaacaacgtgctgcacctgtggcccttcaccatccacgacctgagaggcctgggcgccaagaagttctacggcaagttctgcgccggcagcatcgaccacatcagcatcagacagctgcagctgatcctgttcaaggtggccctgatgctgggcgtggagatccacgtgaacgtggagttcgtgaaggtgctggagccccccgaggaccaggagaaccagaagatcggctggagagccgagttcctgcccaccgaccacagcctgagcgagttcgagttcgacgtgatcatcggcgccgacggcagaagaaacaccctggagggcttcagaagaaaggagttcagaggcaagctggccatcgccatcaccgccaacttcatcaacagaaacagcaccgccgaggccaaggtggaggagatcagcggcgtggccttcatcttcaaccagaagttcttccaggacctgaaggaggagaccggcatcgacctggagaacatcgtgtactacaaggactgcacccactacttcgtgatgaccgccaagaagcagagcctgctggacaagggcgtgatcatcaacgactacatcgacaccgagatgctgctgtgcgccgagaacgtgaaccaggacaacctgctgagctacgccagagaggccgccgacttcgccaccaactaccagctgcccagcctggacttcgccatgaaccactacggccagcccgacgtggccatgttcgacttcacctgcatgtacgccagcgagaacgccgccctggtgagagagagacaggcccaccagctgctggtggccctggtgggcgacagcctgctggagcccttctggcccatgggcaccggctgcgccagaggcttcctggccgccttcgacaccgcctggatggtgaagagctggaaccagggcaccccccccctggagctgctggccgagagagagagcctgtacagactgctgccccagaccacccccgagaacatcaacaagaacttcgagcagtacaccctggaccccggcaccagataccccaacctgaacagccactgcgtgagaccccaccaggtgaagcacctgtacatcaccaaggagctggagcactaccccctggagagactgggcagcgtgagaagaagcgtgaacctgagcagaaaggagagcgacatcagacccagcaagctgctgacctggtgccagcagcagaccgagggctaccagcacgtgaacgtgaccgacctgaccaccagctggagaagcggcctggccctgtgcgccatcatccacagattcagacccgagctgatcaacttcgacagcctgaacgaggacgacgccgtggagaacaaccagctggccttcgacgtggccgagagagagttcggcatcccccccgtgaccaccggcaaggagatggccagcgcccaggagcccgacaagctgagcatggtgatgtacctgagcaagttctacgagctgttcagaggcacccccctgagacccgtggacagctggagaaagaactacggcgagaacgccgacctgagcctggccaagagcagcatcagcaacaactacctgaacctgaccttccccagaaagagaacccccagagtggacggccagaccggcgagaacgacatgaacaagagaagaagaaagggcttcaccaacctggacgagcccagcaacttcagcagcagaagcctgggcagcaaccaggagtgcggcagcagcaaggagggcggcaaccagaacaaggtgaagagcatggccaaccagctgctggccaagttcgaggagagcaccagaaaccccagcctgatgaagcaggagagaagagtgagcggcatcggcaagcccgtgctgtgcagcagcagcggcccccccgtgcacagctgctgccccaagcccgaggaggccacccccagccccagcccccccctgaagagacagttccccagcgtggtggtgaccggccacgtgctgagagagctgaagcaggtgagcgccggcagcgagtgcctgagcagaccctggagagccagagccaagagcgacctgcagctgggcggcaccgagaacttcgccaccctgcccagcaccagacccagagcccaggccctgagcggcgtgctgtggagactgcagcaggtggaggagaagatcctgcagaagagagcccagaacctggccaacagagagttccacaccaagaacatcaaggagaaggccgcccacctggccagcatgttcggccacggcgacttcccccagaacaagctgctgagcaagggcctgagccacacccacccccccagcccccccagcagactgcccagccccgaccccgccgccagcagcagccccagcaccgtggacagcgccagccccgccagaaaggagaagaagagccccagcggcttccacttccaccccagccacctgagaaccgtgcacccccagctgaccgtgggcaaggtgagcagcggcatcggcgccgccgccgaggtgctggtgaacctgtacatgaacgaccacagacccaaggcccaggccaccagccccgacctggagagcatgagaaagagcttccccctgaacctgggcggcagcgacacctgctacttctgcaagaagagagtgtacgtgatggagagactgagcgccgagggccacttcttccacagagagtgcttcagatgcagcatctgcgccaccaccctgagactggccgcctacaccttcgactgcgacgagggcaagttctactgcaagccccacttcatccactgcaagaccaacagcaagcagagaaagagaagagccgagctgaagcagcagagagaggaggaggccacctggcaggagcaggaggcccccagaagagacacccccaccgagagcagctgcgccgtggccgccatcggcaccctggagggcagcccccccgtgcacttcagcctgcccgtgctgcaccccctgctgggctag

SEQ ID NO: 102115 - protein, 934 aa, Artificial Sequence
  derived and/or modified sequence
MGENEDEKQAQAGQVFENFVQASTCKGTLQAFNILTRHLDLDPLDHRNFYSKLKSKVTTWKAKALWYKLDKRGSHKEYKRGKSCTNTKCLIVGGGPCGLRTAIELAYLGAKVVVVEKRDSFSRNNVLHLWPFTIHDLRGLGAKKFYGKFCAGSIDHISIRQLQLILFKVALMLGVEIHVNVEFVKVLEPPEDQENQKIGWRAEFLPTDHSLSEFEFDVIIGADGRRNTLEGFRRKEFRGKLAIAITANFINRNSTAEAKVEEISGVAFIFNQKFFQDLKEETGIDLENIVYYKDCTHYFVMTAKKQSLLDKGVIINDYIDTEMLLCAENVNQDNLLSYAREAADFATNYQLPSLDFAMNHYGQPDVAMFDFTCMYASENAALVRERQAHQLLVALVGDSLLEPFWPMGTGCARGFLAAFDTAWMVKSWNQGTPPLELLAERESLYRLLPQTTPENINKNFEQYTLDPGTRYPNLNSHCVRPHQVKHLYITKELEHYPLERLGSVRRSVNLSRKESDIRPSKLLTWCQQQTEGYQHVNVTDLTTSWRSGLALCAIIHRFRPELINFDSLNEDDAVENNQLAFDVAEREFGIPPVTTGKEMASAQEPDKLSMVMYLSKFYELFRGTPLRPVDSWRKNYGENADLSLAKSSISNNYLNLTFPRKRTPRVDGQTGENDMNKRRRKGFTNLDEPSNFSSRSLGSNQECGSSKEGGNQNKVKSMANQLLAKFEESTRNPSLMKQEKKSPSGFHFHPSHLRTVHPQLTVGKVSSGIGAAAEVLVNLYMNDHRPKAQATSPDLESMRKSFPLNLGGSDTCYFCKKRVYVMERLSAEGHFFHRECFRCSICATTLRLAAYTFDCDEGKFYCKPHFIHCKTNSKQRKRRAELKQQREEEATWQEQEAPRRDTPTESSCAVAAIGTLEGSPPVHFSLPVLHPLLG

SEQ ID NO: 102116 - DNA, 2805 bp, Artificial Sequence
  derived and/or modified sequence
atgggagagaacgaggatgagaagcaggcccaggctggtcaagttttcgagaactttgtgcaggctagcacgtgcaagggcactcttcaggcctttaacatcctcacacggcatctggatctcgatcccttagaccaccggaacttctatagtaaactaaagagcaaggtgaccacctggaaggcaaaagctctctggtataaactggataagagaggcagccataaagaatacaagcgcggtaaatcgtgtacaaacacaaaatgcctgatagttggagggggaccttgcggcttgcgtacagcgatcgagttggcttatttaggcgcaaaagtcgtcgtggtggaaaaacgggatagcttttcacgcaacaacgtcctgcacctctggccgttcacaatacacgacctgcgggggctgggtgctaagaaattctacgggaaattttgcgccggctccattgaccacatatcaattagacagttacagctgattttatttaaagttgccctcatgttaggggtggaaattcacgtgaacgttgagttcgtgaaagttttggagccccccgaagatcaagagaatcaaaagatcgggtggagggctgaattcttgcccaccgaccatagtctgagtgagttcgaattcgacgtgattatcggcgccgacggccgcagaaatacccttgagggctttagacggaaagagtttcgagggaaactggccatcgcaattacagccaatttcatcaatagaaatagtaccgcggaggcaaaggtggaggagatttctggggtggcctttatatttaaccagaaattcttccaggatctgaaagaggaaacaggaattgatttggaaaacatcgtatattacaaagattgcacccattactttgtgatgaccgcaaagaagcagtctctgcttgataagggggttatcattaacgactatatcgatacagagatgctgctgtgcgctgaaaacgttaatcaggataatctgctgagctacgccagggaggcggctgactttgccactaattatcaactcccaagtttggacttcgcaatgaatcattacggacagcctgacgtggcaatgtttgacttcacctgtatgtacgcttcggaaaacgcagccctggtgcgcgagcgacaggctcaccaactcctggtggctctggtgggtgactctcttttagagccattttggcccatgggtacagggtgcgctcgggggtttctggccgccttcgacaccgcctggatggtgaagtcttggaaccagggcacaccccctctcgaattgctggctgaaagagagtcactgtacaggctactcccacagacaactcccgagaatatcaataaaaacttcgagcagtacacactcgacccaggcacccggtaccccaatttgaactcccactgtgtgcgaccccaccaggtgaagcatctgtacattacaaaagaactagagcactatcctctggaacgattgggttcagtgcggaggtccgtgaatctgagccggaaggaatccgacatcaggcccagcaaactgctgacttggtgtcagcagcagactgaaggctatcagcatgtgaatgtaacggaccttactaccagttggagatctggcctagccctttgtgccataattcatagattccgtcccgagctgatcaacttcgatagtttgaacgaggacgatgcggtggagaacaaccaactggcttttgatgtcgcagagcgcgaatttggtatcccccctgtgacaaccggtaaagagatggctagcgcacaggaacccgacaagctgtctatggtgatgtacctgtcgaagttttacgagctgttccgtggtaccccactaagacctgtggattcgtggaggaagaactatggcgagaatgctgatctgtccctggcaaaaagcagtatttccaacaactacctgaatcttacatttccccggaaacggacaccccgagttgacggccagaccggagaaaacgatatgaataagcgcaggagaaagggattcacaaatctggacgagccttcaaatttcagctcacgctccctcgggtcaaatcaagagtgtggatccagcaaggaaggcggaaatcaaaacaaggtgaaaagcatggctaatcagctcttagcaaaatttgaggagtccacacggaacccctcactgatgaaacaggaaaagaagagcccatctggctttcatttccatccttctcatcttcgcacggtacatccccagctaacagttgggaaagtgtcaagcggcatcggcgccgccgcagaggtgctagtcaatctgtacatgaacgatcaccgacccaaggcccaggccacatccccagacctcgaatccatgcgcaaatcgttcccccttaacttgggaggttcagacacctgttacttctgtaagaagcgtgtgtatgtgatggaacgcctctctgcagaagggcacttttttcacagggaatgttttaggtgttcaatctgtgctacaaccctccggctggcagcttacaccttcgattgcgacgaagggaagttttattgtaaaccgcactttattcattgcaaaacaaatagcaaacagcgaaagagaagagccgagctgaaacagcagcgcgaagaggaggcaacttggcaggaacaggaggcgcctcggcgggacactcctactgagtcttcatgtgcggtcgcggcaattggtacactggaggggtctcctcctgtccacttctccttgcccgttttacacccactgttgggatag

SEQ ID NO: 102117 - DNA, 2805 bp, Artificial Sequence
  derived and/or modified sequence
atgggagaaaatgaagatgagaagcaggcccaggccggccaggtgtttgaaaattttgtgcaggccagcacctgcaagggcaccctgcaggccttcaacatcctgaccaggcacctggacctggaccccctggaccacaggaacttctacagcaagctgaagagcaaggtgaccacctggaaggccaaggccctgtggtacaagctggacaagaggggcagccacaaggagtacaagaggggcaagagctgcaccaacaccaagtgcctgattgtgggcggcggcccctgtggcctgaggacagccatcgagctggcctacctgggcgccaaggtggtggtggtggagaagagggacagcttcagcagaaataatgtgctgcacctgtggcccttcaccatccatgacctgcggggcctgggcgccaagaagttctacggcaagttctgtgccggcagcattgaccacatcagcatccggcagctgcagctgatcctcttcaaggtggccctgatgctgggcgtggagatccacgtgaatgtggagtttgtgaaggtgctggagcccccagaggaccaggagaaccagaagattggctggagggctgagttcctgcccacagaccacagcctgtctgaatttgaatttgatgtgatcatcggggctgatggaagaagaaacaccctggagggcttccggaggaaggagttccggggcaagctggccatcgccatcacagccaacttcatcaacagaaacagcacagctgaggccaaggtggaggagatcagcggcgtggccttcatcttcaaccagaagttcttccaggacctgaaggaggagaccggcatcgacctggagaacatcgtgtactacaaggactgcacccactactttgtgatgacagccaagaagcagagcctgctggacaagggcgtcatcatcaatgactacatcgacacagagatgctgctgtgtgccgagaatgtgaaccaggacaacctgctgtcctatgcccgggaggccgctgactttgccaccaactaccagctgcccagcctggactttgccatgaaccactacggccagccagatgtggccatgtttgacttcacctgcatgtatgcctctgaaaatgctgccctggtgcgggagcggcaggcccaccagctgctggtggccctggtgggggacagcctgctggagcccttctggcccatgggcaccggctgtgcccggggcttcctggccgcctttgacacagcctggatggtgaagtcctggaaccagggcaccccacccctggagctgctggccgagcgggagagcctgtaccgcctgctgccccagaccaccccagagaacatcaacaagaactttgagcagtacaccctggaccccggcacccgctaccccaacctgaacagccactgtgtgcggccccaccaggtgaagcacctgtacatcaccaaggagctggagcactaccccctggagcggctgggctctgtgagaagatctgtgaacctgagcaggaaggagagtgacatccggcccagcaagctgctgacctggtgccagcagcagacagagggctaccagcacgtgaatgtgacagacctgaccacctcctggaggagcggcctggccctgtgtgccatcatccaccgcttccggcctgagctgatcaactttgacagcctgaatgaagatgatgctgtggagaacaaccagctggcctttgatgtggccgagcgggagtttggcatcccccctgtgaccaccgggaaggagatggccagcgcccaggagccagacaagctgtccatggtgatgtacctgagcaagttctatgagctgttccggggcacccccctgcggcctgtggacagctggaggaagaactacggggagaatgctgacctgagcctggccaagagcagcatcagcaacaactacctgaacctgaccttccccaggaagaggaccccccgggtggatggccagacaggagaaaatgacatgaacaagagaagaaggaagggcttcaccaacctggatgagcccagcaacttcagcagccgcagcctgggcagcaaccaggagtgtggcagcagcaaggagggcggcaaccagaacaaggtgaagtccatggccaaccagctgctggccaagtttgaggagagcaccaggaaccccagcctgatgaagcaggagaagaagagccccagcggcttccacttccaccccagccacctgaggacagtgcacccccagctgactgtgggcaaggtgtcctctggaattggagctgctgctgaggtgctggtgaacctgtacatgaatgaccaccggcccaaggcccaggccaccagcccagacctggagagcatgaggaagagcttccccctgaacctgggcggcagtgacacctgctacttctgcaagaagagggtgtatgtgatggagcggctgtctgctgagggccacttcttccaccgggagtgcttccgctgcagcatctgtgccaccaccctgcggctggccgcctacacctttgactgtgatgagggcaagttctactgcaagccccacttcatccactgcaagaccaacagcaagcagaggaagagaagagctgagctgaagcagcagcgggaggaggaggccacctggcaggagcaggaggccccccggcgggacacccccacagagagcagctgtgctgtggccgccatcggcaccctggagggcagcccccctgtgcacttcagcctgcctgtgctgcaccccctgctgggctag

SEQ ID NO: 102118 - DNA, 3585 bp, Artificial Sequence
  derived and/or modified sequence
atgcactgaggtaccaagactaatgaaggtccggccctccccagtgtaggaggcaggtaaatgatcacactgtgacaaatgctcaaacggggatgtgcttgcaaaggctagagacagcacgggaggaaggagcagtccattctgctgagagtgtgagtaccgagaaagcatggcactgggcttgaaggatgaggagttcgccagacacagaggatgaggagagcagcacgaacatggcaacccgtgtgtgtctcatcccagaaagagaagactttaaccactgtgatgcctgagaatccagtgagtgtgacgtttctccagatacttcatgctgttcacctgtgtcctcgccgcaccactgccgcacacgactcctgaaccatgggggaaaacgaggatgagaagcaggcccaggcggggcaggtttttgagaactttgtccaggcatccacgtgcaaaggtaccctccaggccttcaacattctcacacgacacctggacctagaccctctggaccacagaaacttttattccaagctcaagtccaaggtgaccacctggaaagccaaagccctgtggtacaaattggataagcgtggttcccacaaagagtataagcgagggaagtcgtgcacgaacaccaagtgtctcatagttgggggaggaccctgtggcttgcgcactgccattgaacttgcctacctgggagccaaagtggtcgtggtggagaagagggactccttctcccggaacaacgtgctacacctctggcctttcaccatccatgaccttcgtggcctgggagccaagaagttctatgggaagttctgtgctggctccatcgaccatatcagtattcgccaactacagctcatcctattcaaggtggccctgatgctgggagttgaaatccatgtgaatgtggagttcgtgaaggttctagagcctcctgaagatcaagaaaatcaaaaaattggctggcgggcagaatttctccctacagaccattctctgtcggagtttgagtttgacgtcatcattggtgccgatggccgcaggaacaccctggaagggttcagaagaaaagaattccgtgggaagctggcgattgccatcaccgccaacttcataaacagaaacagcacagcggaagccaaggtggaagagattagtggtgtggctttcatcttcaatcagaaattttttcaggaccttaaagaagaaacaggcatagatcttgagaacattgtttactacaaggactgcacccactattttgtaatgacagccaagaagcagagcctgctcgacaaaggtgtcatcattaacgactacatcgacacagagatgctgctgtgtgcggagaacgtgaaccaagacaacctgctatcctatgcccgggaagctgcagactttgccaccaactaccagctgccatccttagactttgccatgaaccactatgggcagcctgatgtggccatgtttgactttacctgcatgtatgcctcagagaacgcggccctggtgcgggagcggcaggcgcaccagctgctcgtggcccttgtgggtgacagcttgcttgagccattttggcccatgggtacaggctgtgcccgtggcttcctggcagcctttgacacggcatggatggtgaagagctggaaccagggcacccctcccctggagctgctggctgaaagggaaagtctctaccggctgttacctcagacaaccccggagaacatcaacaagaactttgagcagtacacgttggacccagggacacggtacccaaacctcaactcacactgtgtcaggccccatcaggtgaagcatttgtatatcactaaggagctggagcactaccctctcgagagactgggctcggtgaggagatctgtcaacctctccaggaaggagtcagatatccggcccagcaagctcctgacctggtgccagcagcagacagagggctaccagcatgtcaacgtcaccgacctgaccacatcctggcgcagtgggttggccctgtgtgccatcatccaccgcttccggcctgagctcatcaactttgactctttgaatgaagatgatgctgtggagaacaaccagctcgcatttgatgtggccgagcgagagtttgggatccctccagtgaccacgggcaaagagatggcatctgcccaggagcctgacaagctcagcatggtcatgtacctctccaagttctacgagctcttccggggcaccccactgaggcccgtggattcttggcgcaaaaactatggagaaaatgctgacctcagcttggccaaatcatccatttctaataactatctcaacctcacatttccaaggaagaggactccacgggtggatggtcaaaccggagagaatgacatgaacaaacggagacggaagggcttcaccaacctggacgagccttcaaacttttccagccgtagcttgggctccaatcaagagtgtgggagcagtaaggaaggtggaaatcagaacaaagtcaagtccatggcgaatcagctgctggccaagtttgaggagagcactcggaacccctcactcatgaagcaggaaaagaagtcaccttcagggttccattttcatcccagccatttgagaacagtgcatcctcagctgacggtagggaaagtgtccagcggaataggggctgcagctgaagtcctggtcaatctgtacatgaatgatcacagacctaaggcccaggccacctctccagacctggaatctatgcgaaagtcatttccccttaacctgggaggcagcgacacgtgttacttctgtaagaaacgtgtgtacgtgatggaacggctgagcgccgagggccacttcttccaccgggagtgtttccgctgcagcatctgtgccaccaccttgcgcctggccgcctacacctttgactgcgatgaaggcaaattttactgcaagcctcacttcattcactgtaaaaccaatagcaaacaacggaagagacgggcagagttgaagcaacaaagagaggaggaggcaacatggcaagagcaggaagcccctcggagagacactcccaccgaaagttcttgcgcagtggccgccattggcaccctggaaggcagccccccagttcatttcagccttccagtgctacacccacttcttggctgacacacttctgctctaaggtgactggttttcttgccaattttcaaagagtggtactaacccccaacccgctttccgcaccccgtcctctccgccagcagtactggttgcactaactgtgagtgtcttgcatactgatggactcatttggtggcatggttggctaacagcatggcggggggtgttcagcttgagacccatgcctgtgttcatttcccatggagctggcagcctggtctaccccaagtgcatgccccgcctctcctctctcccttgggtctgcctgcgtgcatgcttctccagttgcgtctgcgaagctacctactttcttgggagggtcgaccttgatcatgaaacaataccatgagggggcctctgtcacctttgaaaagaacacttttt

SEQ ID NO: 102119 - DNA, 2805 bp, Artificial Sequence
  derived and/or modified sequence
atgggcgagaacgaggacgagaagcaggcccaggccggccaggtgttcgaaaactttgtgcaagcctccacttgcaagggaactcttcaggccttcaatatattgacaagacacctcgatttggaccctttggatcatcggaacttttatagcaagttgaagtccaaggttaccacatggaaggccaaggctttatggtacaaactcgataagagaggctctcacaaggagtacaaaaggggaaaaagctgtactaacaccaagtgtctgattgtcggaggtggcccgtgcggcctgcggacggcgatcgagctagcgtatctcggagcaaaggttgtcgtggtggagaagcgcgattcgttctctcggaacaacgtgctgcatctgtggccgtttaccatccatgatctgcgagggttgggggcaaaaaagttttatggaaaattctgcgccgggagtatagatcatataagcatcaggcagctacaactcatcttgttcaaagtcgcactgatgctgggagtcgaaatccacgtgaatgtggaatttgtaaaggtgttagagccgcccgaggatcaagagaatcagaagattggatggagagcagaattccttccgacagatcatagcctctccgaattcgagttcgacgtgattatcggcgctgacggcagaagaaacaccctggaaggcttccgccggaaagagttcagagggaaactcgcaatcgcaataactgccaatttcatcaatcgaaactccacggcggaggctaaggtcgaggaaatctccggagtagcatttatcttcaatcagaagtttttccaggatctgaaggaagaaacaggtattgacctagagaacatcgtctactataaggactgtacacactattttgtgatgactgcaaaaaagcaatcactcttagataagggggtaattattaatgattacatcgatactgagatgctgctgtgtgccgagaacgtaaaccaggacaacttactttcttacgccagagaggccgctgacttcgcaaccaactaccagcttccatcattggacttcgcaatgaaccactacggccagcccgatgtagccatgtttgatttcacatgcatgtatgcgtccgagaatgcagcccttgtgcgggagcgccaggctcatcaattactggtcgccctggtgggcgacagcctgctagagcccttttggccaatgggaaccgggtgcgccagagggtttctggccgcattcgacacagcttggatggtcaaatcgtggaaccaaggaaccccgcctctcgaattgctcgctgagcgggaatctttgtaccggctgttaccacaaaccacacctgagaacattaacaagaactttgaacagtatacgctcgatccaggtactcgctacccgaacctcaacagccactgcgtgaggccacatcaggtgaagcacctgtatatcacaaaggagctggaacattaccccctggagcgcctcggatcagttcgaagatctgtaaatttatcacgcaaggagtccgatattaggccttcaaagctgctgacctggtgccaacagcaaaccgagggctaccagcatgtcaacgttactgacctgacgactagttggcggtcaggacttgcactatgcgccattatccaccgtttccgacccgagttgatcaatttcgattccctaaacgaggacgatgcagtggaaaacaaccaactggcctttgacgttgccgagcgtgagttcggaatcccccccgtcactactgggaaagagatggcatcagcgcaggagccagacaaattgagcatggtcatgtacctttctaaattctacgaactgttcagaggtacccctttgagaccagttgacagttggaggaaaaattatggcgagaacgcggacctctctctggctaagagttcaatcagtaacaattatctgaatctgacattcccaaggaagcggaccccccgggtagacggccagactggcgaaaacgacatgaacaagcgccgaagaaaaggctttaccaatttggacgagccatctaatttctcttctcggagcctgggctcaaaccaggaatgtgggtccagtaaggaggggggcaatcagaataaggtgaagtccatggccaatcaactcctggccaagttcgaggaatctacccgcaaccctagtctgatgaaacaagagaagaaatctccatccggctttcatttccatccctcccacttgagaaccgtccatcctcagctcaccgtcggcaaggtttcctccggtatcggcgccgcagcagaggtgctggtcaacctgtacatgaatgaccaccggccaaaagcccaagctacgtcaccggacctggagtcaatgcgcaaatccttccccttgaatcttggcgggtctgacacctgctacttctgtaagaaaagagtgtacgtcatggaacgtctgtcagcggaggggcatttcttccatcgggagtgctttcgttgctctatttgcgcgaccacgctgcgtctggccgcgtacacattcgactgcgacgagggaaagttctactgtaaaccacactttatacactgcaagaccaattccaagcagcgaaaacgccgtgcggaacttaagcagcaaagagaagaagaggcaacttggcaggagcaagaggcacctagaagggatacccccactgagtctagttgcgcagttgcagcaataggcactctggagggttctccacccgtccattttagcctgcccgttctgcaccctctcctggggtag

SEQ ID NO: 102120 - DNA, 2805 bp, Artificial Sequence
  derived and/or modified sequence
atgggagaaaatgaggacgagaagcaggctcaggccggtcaggtgttcgaaaacttcgtccaagccagcacttgtaagggaacgttgcaggccttcaacattctcactcggcacctggatctggacccgctggaccatcgcaacttctacagtaagctcaaatctaaggtgaccacttggaaagcaaaagccctttggtacaaacttgacaaacgcggttctcacaaagagtataaaagaggaaagagctgcactaatacgaagtgtctcatcgtggggggtggcccatgcggactgaggactgcaatcgaactcgcctacctgggagcaaaggttgtggtggtagagaaaagggacagcttttctcgtaacaatgtgctgcacctgtggccattcacaattcatgatttgcgcggactgggagctaaaaaattttacggaaagttctgtgccggtagcattgatcatatatccatcaggcagttgcagttaatacttttcaaagtagccttaatgctgggcgtcgagatacacgtaaacgtagagttcgttaaggttttagagccacctgaggaccaggaaaatcagaagatcggatggcgcgcagaatttctacctacagatcacagtctgagcgaatttgagtttgacgtgattattggcgcagacggccgacgcaatacgttggaaggcttccgacgcaaggagttcaggggaaagttagctatcgctattacagccaacttcattaacaggaatagcacagctgaggcgaaagtggaggagatttcaggtgtcgcattcatattcaatcagaaattttttcaagatcttaaggaggagacggggattgacctggaaaacattgtgtactacaaagactgcactcattatttcgttatgacagccaagaaacagtccctgcttgataaaggtgtaattattaatgactacattgatacagaaatgctgctatgcgcagagaacgtcaatcaggataacttgttaagttacgcacgcgaagcagctgacttcgcgactaattaccagctgccaagtctcgactttgctatgaatcattatggccagccagatgtcgctatgtttgactttacttgtatgtacgcctctgagaatgcagctctggtgagggaacgtcaggcccaccagctgctggtggccctggtgggcgatagtctgcttgaacccttttggcctatggggacaggatgcgccagaggctttctggcagcatttgataccgcttggatggtcaagagctggaatcagggcacacctccattggaactcctggccgagcgtgaaagtctgtatcggttgcttccccagacaaccccagagaatattaacaagaattttgaacagtataccctggatcctggtactcgatatcctaacctaaactcgcattgtgtgcggccacaccaggtaaagcacctgtacatcacaaaagaactcgagcactaccctctggagaggctggggagtgttcgcaggagcgtgaacctgtcgaggaaggagagcgacattaggccaagcaaactactgacttggtgccagcagcagaccgaaggctatcagcacgtgaatgtcactgacctgacgacaagttggcggagcggtctggctctgtgtgccatcatacaccgttttcgccctgaattaattaatttcgatagtctgaatgaggatgacgccgtggaaaataaccaactggcttttgacgtggccgagcgggagttcgggattccgccagtgacgacaggaaaggaaatggccagcgctcaggaaccagacaagctgagcatggtgatgtacctctccaagttttacgaactttttagaggaactccactccggccagtggattcttggcgaaaaaattatggtgagaacgccgatctgtcgctggcaaaaagttctatttccaataactacctaaatctcacctttccccgaaagcggacacccagagtagatgggcaaacaggcgagaatgacatgaacaaaagacggcgtaagggatttactaatctcgatgagccgagtaatttctccagtaggtcacttggcagcaaccaggagtgcgggagtagtaaggagggcggtaaccagaacaaggtgaagtccatggcaaaccagctgctcgcgaagttcgaggagagcacaagaaacccatcgctgatgaaacaggagaagaaatcaccttcaggtttccattttcatccatctcacttaagaacggtgcaccctcagctgacagttggtaaagtctcaagcggaatcggagctgccgcagaggtgctcgtgaatctctatatgaatgatcacagaccaaaagctcaggccacatcccctgatctggaaagcatgagaaagtcttttcccctgaatctaggcggatccgatacatgttatttctgtaagaagcgcgtctacgtgatggaaaggctgtccgccgaggggcacttcttccaccgagaatgcttccgttgtagcatttgtgcaaccaccctcaggctggcagcctacaccttcgattgcgacgagggtaaattttactgtaagccgcatttcattcattgcaagactaattccaaacagcgtaaacggagagccgaacttaagcaacaaagggaagaagaagcgacttggcaggaacaggaagcccctagaagggacacacctactgagtcgagctgtgcagtggcagctatcggcacacttgagggctcgccccctgtacacttttctctgcctgtgcttcatccccttctcgggtag

SEQ ID NO: 102121 - DNA, 2805 bp, Artificial Sequence
  derived and/or modified sequence
atgggcgagaacgaggacgagaagcaggcccaggccggccaggtgttcgagaacttcgtgcaggccagcacctgcaagggcaccctgcaggccttcaacatcctgaccagacacctggacctggaccccctggaccacagaaacttctacagcaagctgaagagcaaggtgaccacctggaaggccaaggccctgtggtacaagctggacaagagaggcagccacaaggagtacaagagaggcaagagctgcaccaacaccaagtgcctgatcgtgggcggcggcccctgcggcctgagaaccgccatcgagctggcctacctgggcgccaaggtggtggtggtggagaagagagacagcttcagcagaaacaacgtgctgcacctgtggcccttcaccatccacgacctgagaggcctgggcgccaagaagttctacggcaagttctgcgccggcagcatcgaccacatcagcatcagacagctgcagctgatcctgttcaaggtggccctgatgctgggcgtggagatccacgtgaacgtggagttcgtgaaggtgctggagccccccgaggaccaggagaaccagaagatcggctggagagccgagttcctgcccaccgaccacagcctgagcgagttcgagttcgacgtgatcatcggcgccgacggcagaagaaacaccctggagggcttcagaagaaaggagttcagaggcaagctggccatcgccatcaccgccaacttcatcaacagaaacagcaccgccgaggccaaggtggaggagatcagcggcgtggccttcatcttcaaccagaagttcttccaggacctgaaggaggagaccggcatcgacctggagaacatcgtgtactacaaggactgcacccactacttcgtgatgaccgccaagaagcagagcctgctggacaagggcgtgatcatcaacgactacatcgacaccgagatgctgctgtgcgccgagaacgtgaaccaggacaacctgctgagctacgccagagaggccgccgacttcgccaccaactaccagctgcccagcctggacttcgccatgaaccactacggccagcccgacgtggccatgttcgacttcacctgcatgtacgccagcgagaacgccgccctggtgagagagagacaggcccaccagctgctggtggccctggtgggcgacagcctgctggagcccttctggcccatgggcaccggctgcgccagaggcttcctggccgccttcgacaccgcctggatggtgaagagctggaaccagggcaccccccccctggagctgctggccgagagagagagcctgtacagactgctgccccagaccacccccgagaacatcaacaagaacttcgagcagtacaccctggaccccggcaccagataccccaacctgaacagccactgcgtgagaccccaccaggtgaagcacctgtacatcaccaaggagctggagcactaccccctggagagactgggcagcgtgagaagaagcgtgaacctgagcagaaaggagagcgacatcagacccagcaagctgctgacctggtgccagcagcagaccgagggctaccagcacgtgaacgtgaccgacctgaccaccagctggagaagcggcctggccctgtgcgccatcatccacagattcagacccgagctgatcaacttcgacagcctgaacgaggacgacgccgtggagaacaaccagctggccttcgacgtggccgagagagagttcggcatcccccccgtgaccaccggcaaggagatggccagcgcccaggagcccgacaagctgagcatggtgatgtacctgagcaagttctacgagctgttcagaggcacccccctgagacccgtggacagctggagaaagaactacggcgagaacgccgacctgagcctggccaagagcagcatcagcaacaactacctgaacctgaccttccccagaaagagaacccccagagtggacggccagaccggcgagaacgacatgaacaagagaagaagaaagggcttcaccaacctggacgagcccagcaacttcagcagcagaagcctgggcagcaaccaggagtgcggcagcagcaaggagggcggcaaccagaacaaggtgaagagcatggccaaccagctgctggccaagttcgaggagagcaccagaaaccccagcctgatgaagcaggagaagaagagccccagcggcttccacttccaccccagccacctgagaaccgtgcacccccagctgaccgtgggcaaggtgagcagcggcatcggcgccgccgccgaggtgctggtgaacctgtacatgaacgaccacagacccaaggcccaggccaccagccccgacctggagagcatgagaaagagcttccccctgaacctgggcggcagcgacacctgctacttctgcaagaagagagtgtacgtgatggagagactgagcgccgagggccacttcttccacagagagtgcttcagatgcagcatctgcgccaccaccctgagactggccgcctacaccttcgactgcgacgagggcaagttctactgcaagccccacttcatccactgcaagaccaacagcaagcagagaaagagaagagccgagctgaagcagcagagagaggaggaggccacctggcaggagcaggaggcccccagaagagacacccccaccgagagcagctgcgccgtggccgccatcggcaccctggagggcagcccccccgtgcacttcagcctgcccgtgctgcaccccctgctgggctag

SEQ ID NO: 102122 - protein, 976 aa, Artificial Sequence
  derived and/or modified sequence
MGENEDEKQAQAGQVFENFVQASTCKGTLQAFNILTRHLDLDPLDHRNFYSKLKSKVTTWKAKALWYKLDKRGSHKEYKRGKSCTNTKCLIVGGGPCGLRTAIELAYLGAKVVVVEKRDSFSRNNVLHLWPFTIHDLRGLGAKKFYGKFCAGSIDHISIRQLQLILFKVALMLGVEIHVNVEFVKVLEPPEDQENQKIGWRAEFLPTDHSLSEFEFDVIIGADGRRNTLEGFRRKEFRGKLAIAITANFINRNSTAEAKVEEISGVAFIFNQKFFQDLKEETGIDLENIVYYKDCTHYFVMTAKKQSLLDKGVIINDYIDTEMLLCAENVNQDNLLSYAREAADFATNYQLPSLDFAMNHYGQPDVAMFDFTCMYASENAALVRERQAHQLLVALVGDSLLEPFWPMGTGCARGFLAAFDTAWMVKSWNQGTPPLELLAERESLYRLLPQTTPENINKNFEQYTLDPGTRYPNLNSHCVRPHQVKHLYITKELEHYPLERLGSVRRSVNLSRKESDIRPSKLLTWCQQQTEGYQHVNVTDLTTSWRSGLALCAIIHRFRPELINFDSLNEDDAVENNQLAFDVAEREFGIPPVTTGKEMASAQEPDKLSMVMYLSKFYELFRGTPLRPVDSWRKNYGENADLSLAKSSISNNYLNLTFPRKRTPRVDGQTGENDMNKRRRKGFTNLDEPSNFSSRSLGSNQECGSSKEGGNQNKVKSMANQLLAKFEESTRNPSLMKQEKKSPSGFHFHPSHLRTVHPQESMRKSFPLNLGGSDTCYFCKKRVYVMERLSAEGHFFHRECFRCSICATTLRLAAYTFDCDEGKFYCKPHFIHCKTNSKQRKRRAELKQQREEEATWQEQEAPRRDTPTESSCAVAAIGTLEGSPPGISTSFFRKVLGWPLRLPRDLCNWMQGLLQAAGLHIRDNAYNYCYMYELLSLGLPLLWAFSEVLAAMYRESEGSLESICNWVLRCFPVKLR

SEQ ID NO: 102123 - protein, 545 aa, Artificial Sequence
  derived and/or modified sequence
MRSSPDLNSHCVRPHQVKHLYITKELEHYPLERLGSVRRSVNLSRKESDIRPSKLLTWCQQQTEGYQHVNVTDLTTSWRSGLALCAIIHRFRPELINFDSLNEDDAVENNQLAFDVAEREFGIPPVTTGKEMASAQEPDKLSMVMYLSKFYELFRGTPLRPVDSWRKNYGENADLSLAKSSISNNYLNLTFPRKRTPRVDGQTGENDMNKRRRKGFTNLDEPSNFSSRSLGSNQECGSSKEGGNQNKVKSMANQLLAKFEESTRNPSLMKQEKKSPSGFHFHPSHLRTVHPQLTVGKVSSGIGAAAEVLVNLYMNDHRPKAQATSPDLESMRKSFPLNLGGSDTCYFCKKRVYVMERLSAEGHFFHRECFRCSICATTLRLAAYTFDCDEGKFYCKPHFIHCKTNSKQRKRRAELKQQREEEATWQEQEAPRRDTPTESSCAVAAIGTLEGSPPGISTSFFRKVLGWPLRLPRDLCNWMQGLLQAAGLHIRDNAYNYCYMYELLSLGLPLLWAFSEVLAAMYRESEGSLESICNWVLRCFPVKLR

SEQ ID NO: 102124 - DNA, 2931 bp, Artificial Sequence
  derived and/or modified sequence
atgggggaaaatgaagacgagaagcaggcccaggccgggcaggtgttcgagaactttgtccaggcatctacctgcaagggcactttacaggctttcaatatcctcacgcgccatctggatctagatccgctggatcacaggaacttctatagcaaattgaagtctaaagtgacaacttggaaggcaaaggccctttggtataaattggacaaacgcggctctcataaggagtataagaggggaaagagctgcactaacaccaagtgcttgatcgtgggcggcggaccgtgcgggctccggacagccatagaactcgcttacttgggcgccaaagtggtggtggtcgaaaagcgggattctttctctcggaacaacgtgttgcatctgtggccattcacaattcacgatctcagagggctgggtgccaaaaagttttacggcaaattctgcgctgggtcgatcgatcacattagcatccgacagcttcaactgattttgttcaaagtcgccctgatgttaggtgtggagatccacgtaaacgtcgagtttgtcaaagtcctggagccacctgaggatcaggagaatcagaagatcggctggcgggcagaattcctgccgaccgaccactctctgtccgagttcgagtttgacgttataattggggcagacgggcgacggaatactttggaaggtttcaggcggaaggagttccgagggaagctggctattgccataaccgcgaatttcatcaacaggaactccactgccgaagccaaagtagaggagatttctggtgtcgccttcatctttaatcagaagttcttccaggatctgaaggaagaaacagggattgatctagagaatattgtgtactacaaggactgtacacactacttcgtcatgactgcaaaaaaacagtctctcctcgacaagggggtgatcattaatgactatatcgacactgagatgttactgtgcgccgaaaatgtgaaccaggacaacctgctgagttatgctcgagaagctgccgactttgctaccaactaccaactgccctctttggacttcgccatgaaccattatggccaaccagacgtcgctatgtttgactttacctgcatgtacgcttcagagaacgccgctctggttagagaacgacaggcccaccagttgctcgttgccctcgtaggagattctctgctcgaacctttctggcccatgggaacgggatgcgccaggggtttccttgctgctttcgataccgcctggatggtgaaaagctggaatcagggaacaccccccctggaactgctggcggagcgggagagcttgtacaggctgcttccgcagacgaccccagaaaacataaataagaacttcgaacaatacactctggatcccggcacccggtaccccaacctgaactcccactgcgtccggccacatcaggtcaagcatctgtacatcacaaaagaactggaacactatcctcttgaacggctgggaagtgtcagacggtccgtgaatctcagcaggaaggagagtgatattcgaccatcaaagctactaacatggtgccaacagcagacggagggataccagcatgtgaacgtgacggacctgacaactagctggagaagtggcttagccctatgtgccattatccaccgattcaggccagagctcattaactttgattccctgaacgaagacgacgcggtcgagaataatcaattggccttcgacgtggctgaaagggagtttggaataccgcctgtgactactgggaaggaaatggccagcgcccaagaaccggacaaactgtcaatggtcatgtacctttccaagttctatgagctctttcgcggtaccccactccgtcccgttgattcttggcgcaagaattatggcgagaacgccgatctgtctctcgccaagtctagcataagcaacaactatcttaacctgacatttccgagaaagcgtacccctagagttgatggacaaaccggtgagaacgatatgaataagcgtcgccgcaaggggtttactaacttagacgaaccaagcaatttctccagccgctccctggggtctaaccaggaatgtggctccagtaaggaagggggaaaccagaataaggtgaagagcatggcaaaccagctgctggctaagttcgaagagtccaccaggaatccttctctgatgaaacaagagaagaagagtcctagtgggttccattttcatccaagccatctacgcaccgtccacccacaggaaagcatgagaaagtcatttcccttgaatctaggtggaagcgatacctgttacttttgcaagaagagggtttacgtaatggagcgtctgagcgctgaaggacactttttccacagagagtgcttccgctgttccatttgcgccaccacactgaggttggccgcttatacgtttgattgcgacgaaggaaaattctactgtaagccacactttatccactgtaagaccaattctaagcagcggaaaagacgagctgaactgaaacagcaacgggaggaggaggccacctggcaggaacaagaggcccctcggagagatacccctaccgagagttcctgcgccgtggctgcaattggaactctggagggttcaccccctggtatcagtaccagcttttttcgcaaagtgttaggctggccgctgcgactcccaagagacttgtgcaactggatgcagggactcctgcaggctgcaggcttgcatattcgggataatgcttataattattgctatatgtacgagctgctcagtcttgggctgcctctcctgtgggcgtttagcgaggtgctggctgctatgtaccgggaatcagagggctccctggaatccatctgcaactgggtgttgcgctgtttccctgtaaaacttaggtag

SEQ ID NO: 102125 - DNA, 1638 bp, Artificial Sequence
  derived and/or modified sequence
atgaggtccagccccgacctgaatagccactgtgtccggccgcaccaagtcaagcacctgtatatcacgaaagagctcgagcactatcctctcgagaggctgggatctgttaggcgttctgtcaacctgagtagaaaagaatctgacatccggccgtctaaactcctgacttggtgtcagcagcaaaccgaaggctaccaacacgtgaatgttaccgacttaacgacatcctggcgctccggactggccctatgcgcaattatccaccgcttccggcccgagcttatcaacttcgactctttaaatgaggacgacgcagtcgaaaataaccagctggcattcgatgtggctgaacgggagtttggcatccctcccgtgacgacaggaaaagaaatggcatcggctcaggaaccggacaagctcagcatggtcatgtacctgtccaagttttatgagctgtttcgggggacacctcttagaccagtcgactcgtggagaaaaaattacggagaaaacgccgatctgtcccttgctaaaagcagcatcagtaataactacctgaatctcacctttccacgcaaacgtacccctagggtggacggccagaccggagagaatgacatgaacaaaagaagacggaaaggctttacaaacctcgacgagccttccaactttagttccagaagtctcggatcaaaccaagagtgtgggagtagtaaagagggtggcaatcagaataaggttaagtctatggccaatcagctcttagccaagttcgaagaatctactcgcaatccatccctgatgaagcaggaaaagaaaagcccatccgggtttcacttccaccccagccacctgaggactgttcacccacagcttacggtaggaaaagtaagctccggcatcggcgcagcagcagaagtgctcgttaatctctatatgaatgaccaccgcccaaaggcccaagccacctctcctgatctggaatcaatgcggaagtctttcccactcaaccttggtggctcagatacatgttacttttgcaagaagcgagtctacgtcatggagcgtttgtccgcggagggtcacttcttccaccgcgagtgcttcaggtgttcaatttgtgccactaccttgcgtttggccgcatacactttcgattgcgacgagggcaagttctactgtaaaccccacttcatccactgtaagaccaatagcaagcagaggaagaggagggccgaacttaaacagcagagggaagaggaagccacctggcaggaacaggaggccccacgtcgtgatacacctactgagtcatcgtgcgcggtcgccgccataggcactctcgaagggagcccacctgggatttctaccagcttcttccgcaaggttctgggctggcctttacggttgccgcgggacctctgcaattggatgcagggtcttctgcaggctgccggcctgcatatccgagacaacgcctataactattgctatatgtatgaacttctttcactcggtctaccactgctctgggctttctcagaagtcctcgccgcaatgtaccgagaatctgaaggatcgcttgaaagcatttgcaattgggtcttgcgatgttttcctgtgaagctgcggtag

SEQ ID NO: 102126 - DNA, 2931 bp, Artificial Sequence
  derived and/or modified sequence
atgggagaaaatgaagatgagaagcaggcccaggccggccaggtgtttgaaaattttgtgcaggccagcacctgcaagggcaccctgcaggccttcaacatcctgaccaggcacctggacctggaccccctggaccacaggaacttctacagcaagctgaagagcaaggtgaccacctggaaggccaaggccctgtggtacaagctggacaagaggggcagccacaaggagtacaagaggggcaagagctgcaccaacaccaagtgcctgattgtgggcggcggcccctgtggcctgaggacagccatcgagctggcctacctgggcgccaaggtggtggtggtggagaagagggacagcttcagcagaaataatgtgctgcacctgtggcccttcaccatccatgacctgcggggcctgggcgccaagaagttctacggcaagttctgtgccggcagcattgaccacatcagcatccggcagctgcagctgatcctcttcaaggtggccctgatgctgggcgtggagatccacgtgaatgtggagtttgtgaaggtgctggagcccccagaggaccaggagaaccagaagattggctggagggctgagttcctgcccacagaccacagcctgtctgaatttgaatttgatgtgatcatcggggctgatggaagaagaaacaccctggagggcttccggaggaaggagttccggggcaagctggccatcgccatcacagccaacttcatcaacagaaacagcacagctgaggccaaggtggaggagatcagcggcgtggccttcatcttcaaccagaagttcttccaggacctgaaggaggagaccggcatcgacctggagaacatcgtgtactacaaggactgcacccactactttgtgatgacagccaagaagcagagcctgctggacaagggcgtcatcatcaatgactacatcgacacagagatgctgctgtgtgccgagaatgtgaaccaggacaacctgctgtcctatgcccgggaggccgctgactttgccaccaactaccagctgcccagcctggactttgccatgaaccactacggccagccagatgtggccatgtttgacttcacctgcatgtatgcctctgaaaatgctgccctggtgcgggagcggcaggcccaccagctgctggtggccctggtgggggacagcctgctggagcccttctggcccatgggcaccggctgtgcccggggcttcctggccgcctttgacacagcctggatggtgaagtcctggaaccagggcaccccacccctggagctgctggccgagcgggagagcctgtaccgcctgctgccccagaccaccccagagaacatcaacaagaactttgagcagtacaccctggaccccggcacccgctaccccaacctgaacagccactgtgtgcggccccaccaggtgaagcacctgtacatcaccaaggagctggagcactaccccctggagcggctgggctctgtgagaagatctgtgaacctgagcaggaaggagagtgacatccggcccagcaagctgctgacctggtgccagcagcagacagagggctaccagcacgtgaatgtgacagacctgaccacctcctggaggagcggcctggccctgtgtgccatcatccaccgcttccggcctgagctgatcaactttgacagcctgaatgaagatgatgctgtggagaacaaccagctggcctttgatgtggccgagcgggagtttggcatcccccctgtgaccaccgggaaggagatggccagcgcccaggagccagacaagctgtccatggtgatgtacctgagcaagttctatgagctgttccggggcacccccctgcggcctgtggacagctggaggaagaactacggggagaatgctgacctgagcctggccaagagcagcatcagcaacaactacctgaacctgaccttccccaggaagaggaccccccgggtggatggccagacaggagaaaatgacatgaacaagagaagaaggaagggcttcaccaacctggatgagcccagcaacttcagcagccgcagcctgggcagcaaccaggagtgtggcagcagcaaggagggcggcaaccagaacaaggtgaagtccatggccaaccagctgctggccaagtttgaggagagcaccaggaaccccagcctgatgaagcaggagaagaagagccccagcggcttccacttccaccccagccacctgaggacagtgcacccccaggagagcatgaggaagagcttccccctgaacctgggcggcagtgacacctgctacttctgcaagaagagggtgtatgtgatggagcggctgtctgctgagggccacttcttccaccgggagtgcttccgctgcagcatctgtgccaccaccctgcggctggccgcctacacctttgactgtgatgagggcaagttctactgcaagccccacttcatccactgcaagaccaacagcaagcagaggaagagaagagctgagctgaagcagcagcgggaggaggaggccacctggcaggagcaggaggccccccggcgggacacccccacagagagcagctgtgctgtggccgccatcggcaccctggagggcagccccccaggcatcagcaccagcttcttcaggaaggtgctgggctggcccctgcggctgccccgggacctgtgcaactggatgcagggcctgctgcaggccgccggcctgcacatccgggacaatgcctacaactactgctacatgtatgagctgctgagcctgggcctgcccctgctgtgggccttcagcgaggtgctggccgccatgtaccgggagagcgagggcagcctggagagcatctgcaactgggtgctgcgctgcttccctgtgaagctgaggtag

SEQ ID NO: 102127 - DNA, 1638 bp, Artificial Sequence
  derived and/or modified sequence
atgaggagcagcccagacctgaacagccactgtgtgcggccccaccaggtgaagcacctgtacatcaccaaggagctggagcactaccccctggagcggctgggctctgtgcggcgctctgtgaacctgagcaggaaggagagtgacatccggcccagcaagctgctgacctggtgccagcagcagacagagggctaccagcacgtgaatgtgacagacctgaccacctcctggaggagcggcctggccctgtgtgccatcatccaccgcttccggcctgagctgatcaactttgacagcctgaatgaagatgatgctgtggagaacaaccagctggcctttgatgtggccgagcgggagtttggcatcccccctgtgaccaccgggaaggagatggccagcgcccaggagccagacaagctgtccatggtgatgtacctgagcaagttctatgagctgttccggggcacccccctgcggcctgtggacagctggaggaagaactatggagaaaatgctgacctgagcctggccaagagcagcatcagcaacaactacctgaacctgaccttccccaggaagaggaccccccgggtggatggccagacaggagaaaatgacatgaacaagagaagaaggaagggcttcaccaacctggatgagcccagcaacttcagcagccgcagcctgggcagcaaccaggagtgtggcagcagcaaggagggcggcaaccagaacaaggtgaagtccatggccaaccagctgctggccaagtttgaggagagcaccaggaaccccagcctgatgaagcaggagaagaagagccccagcggcttccacttccaccccagccacctgaggacagtgcacccccagctgactgtgggcaaggtgagcagcggcatcggggctgctgctgaggtgctggtgaacctgtacatgaatgaccaccggcccaaggcccaggccaccagcccagacctggagagcatgaggaagagcttccccctgaacctgggcggcagtgacacctgctacttctgcaagaagagggtgtatgtgatggagcggctgtctgctgagggccacttcttccaccgggagtgcttccgctgcagcatctgtgccaccaccctgcggctggccgcctacacctttgactgtgatgagggcaagttctactgcaagccccacttcatccactgcaagaccaacagcaagcagaggaagagaagagctgagctgaagcagcagcgggaggaggaggccacctggcaggagcaggaggccccccggcgggacacccccacagagagcagctgtgctgtggccgccatcggcaccctggagggcagccccccaggcatcagcaccagcttcttcaggaaggtgctgggctggcccctgcggctgccccgggacctgtgcaactggatgcagggcctgctgcaggccgccggcctgcacatccgggacaatgcctacaactactgctacatgtatgagctgctgagcctgggcctgcccctgctgtgggccttcagcgaggtgctggccgccatgtaccgggagagcgagggcagcctggagagcatctgcaactgggtgctgcgctgcttccctgtgaagctgaggtag

SEQ ID NO: 102128 - DNA, 2931 bp, Artificial Sequence
  derived and/or modified sequence
atgggggaaaacgaggatgagaagcaggcccaggcggggcaggtttttgagaactttgtccaggcatccacgtgcaaaggtaccctccaggccttcaacattctcacacgacacctggacctagaccctctggaccacagaaacttttattccaagctcaagtccaaggtgaccacctggaaagccaaagccctgtggtacaaattggataagcgtggttcccacaaagagtataagcgagggaagtcgtgcacgaacaccaagtgtctcatagttgggggaggaccctgtggcttgcgcactgccattgaacttgcctacctgggagccaaagtggtcgtggtggagaagagggactccttctcccggaacaacgtgctacacctctggcctttcaccatccatgaccttcgtggcctgggagccaagaagttctatgggaagttctgtgctggctccatcgaccatatcagtattcgccaactacagctcatcctattcaaggtggccctgatgctgggagttgaaatccatgtgaatgtggagttcgtgaaggttctagagcctcctgaagatcaagaaaatcaaaaaattggctggcgggcagaatttctccctacagaccattctctgtcggagtttgagtttgacgtcatcattggtgccgatggccgcaggaacaccctggaagggttcagaagaaaagaattccgtgggaagctggcgattgccatcaccgccaacttcataaacagaaacagcacagcggaagccaaggtggaagagattagtggtgtggctttcatcttcaatcagaaattttttcaggaccttaaagaagaaacaggcatagatcttgagaacattgtttactacaaggactgcacccactattttgtaatgacagccaagaagcagagcctgctcgacaaaggtgtcatcattaacgactacatcgacacagagatgctgctgtgtgcggagaacgtgaaccaagacaacctgctatcctatgcccgggaagctgcagactttgccaccaactaccagctgccatccttagactttgccatgaaccactatgggcagcctgatgtggccatgtttgactttacctgcatgtatgcctcagagaacgcggccctggtgcgggagcggcaggcgcaccagctgctcgtggcccttgtgggtgacagcttgcttgagccattttggcccatgggtacaggctgtgcccgtggcttcctggcagcctttgacacggcatggatggtgaagagctggaaccagggcacccctcccctggagctgctggctgaaagggaaagtctctaccggctgttacctcagacaaccccggagaacatcaacaagaactttgagcagtacacgttggacccagggacacggtacccaaacctcaactcacactgtgtcaggccccatcaggtgaagcatttgtatatcactaaggagctggagcactaccctctcgagagactgggctcggtgaggagatctgtcaacctctccaggaaggagtcagatatccggcccagcaagctcctgacctggtgccagcagcagacagagggctaccagcatgtcaacgtcaccgacctgaccacatcctggcgcagtgggttggccctgtgtgccatcatccaccgcttccggcctgagctcatcaactttgactctttgaatgaagatgatgctgtggagaacaaccagctcgcatttgatgtggccgagcgagagtttgggatccctccagtgaccacgggcaaagagatggcatctgcccaggagcctgacaagctcagcatggtcatgtacctctccaagttctacgagctcttccggggcaccccactgaggcccgtggattcttggcgcaaaaactatggagaaaatgctgacctcagcttggccaaatcatccatttctaataactatctcaacctcacatttccaaggaagaggactccacgggtggatggtcaaaccggagagaatgacatgaacaaacggagacggaagggcttcaccaacctggacgagccttcaaacttttccagccgtagcttgggctccaatcaagagtgtgggagcagtaaggaaggtggaaatcagaacaaagtcaagtccatggcgaatcagctgctggccaagtttgaggagagcactcggaacccctcactcatgaagcaggaaaagaagtcaccttcagggttccattttcatcccagccatttgagaacagtgcatcctcaggaatctatgcgaaagtcatttccccttaacctgggaggcagcgacacgtgttacttctgtaagaaacgtgtgtacgtgatggaacggctgagcgccgagggccacttcttccaccgggagtgtttccgctgcagcatctgtgccaccaccttgcgcctggccgcctacacctttgactgcgatgaaggcaaattttactgcaagcctcacttcattcactgtaaaaccaatagcaaacaacggaagagacgggcagagttgaagcaacaaagagaggaggaggcaacatggcaagagcaggaagcccctcggagagacactcccaccgaaagttcttgcgcagtggccgccattggcaccctggaaggcagccccccaggtatctccacctccttctttaggaaggtgctgggctggcccctcaggctgccgagggacctgtgtaactggatgcagggactcctgcaagctgctggcctccatatcagggacaatgcttacaactactgctacatgtacgagctcctgagcctggggctgccactcctctgggcgttctctgaggtcctggcagccatgtacagggaatctgagggctccctcgagagcatctgcaactgggtgctcaggtgcttcccagtcaagctccgctga

SEQ ID NO: 102129 - DNA, 1822 bp, Artificial Sequence
  derived and/or modified sequence
aggtccggccctccccagtgtaggaggcaggtaaatgatcacactgtgacaaatgctcaaacggggatgtgcttgcaaaggctagagacagcacgggaggaaggagcagtccattctgctgagagtgtgagtaccgagaaagcatggcactgggcttgaaggatgaggagttcgccagacctcaactcacactgtgtcaggccccatcaggtgaagcatttgtatatcactaaggagctggagcactaccctctcgagagactgggctcggtgaggagatctgtcaacctctccaggaaggagtcagatatccggcccagcaagctcctgacctggtgccagcagcagacagagggctaccagcatgtcaacgtcaccgacctgaccacatcctggcgcagtgggttggccctgtgtgccatcatccaccgcttccggcctgagctcatcaactttgactctttgaatgaagatgatgctgtggagaacaaccagctcgcatttgatgtggccgagcgagagtttgggatccctccagtgaccacgggcaaagagatggcatctgcccaggagcctgacaagctcagcatggtcatgtacctctccaagttctacgagctcttccggggcaccccactgaggcccgtggattcttggcgcaaaaactatggagaaaatgctgacctcagcttggccaaatcatccatttctaataactatctcaacctcacatttccaaggaagaggactccacgggtggatggtcaaaccggagagaatgacatgaacaaacggagacggaagggcttcaccaacctggacgagccttcaaacttttccagccgtagcttgggctccaatcaagagtgtgggagcagtaaggaaggtggaaatcagaacaaagtcaagtccatggcgaatcagctgctggccaagtttgaggagagcactcggaacccctcactcatgaagcaggaaaagaagtcaccttcagggttccattttcatcccagccatttgagaacagtgcatcctcagctgacggtagggaaagtgtccagcggaataggggctgcagctgaagtcctggtcaatctgtacatgaatgatcacagacctaaggcccaggccacctctccagacctggaatctatgcgaaagtcatttccccttaacctgggaggcagcgacacgtgttacttctgtaagaaacgtgtgtacgtgatggaacggctgagcgccgagggccacttcttccaccgggagtgtttccgctgcagcatctgtgccaccaccttgcgcctggccgcctacacctttgactgcgatgaaggcaaattttactgcaagcctcacttcattcactgtaaaaccaatagcaaacaacggaagagacgggcagagttgaagcaacaaagagaggaggaggcaacatggcaagagcaggaagcccctcggagagacactcccaccgaaagttcttgcgcagtggccgccattggcaccctggaaggcagccccccaggtatctccacctccttctttaggaaggtgctgggctggcccctcaggctgccgagggacctgtgtaactggatgcagggactcctgcaagctgctggcctccatatcagggacaatgcttacaactactgctacatgtacgagctcctgagcctggggctgccactcctctgggcgttctctgaggtcctggcagccatgtacagggaatctgagggctccctcgagagcatctgcaactgggtgctcaggtgcttcccagtcaagctccgctgacatggctggctgccccaaagtg

SEQ ID NO: 102130 - DNA, 2931 bp, Artificial Sequence
  derived and/or modified sequence
atgggcgagaacgaggacgagaagcaggcccaggccggccaggtgttcgagaacttcgtccaggccagcacctgcaagggtacccttcaggcgtttaacattcttacgcgtcacctggatttggaccccctggaccatagaaacttctatagcaagctcaagagtaaggtgacaacgtggaaggccaaggcattgtggtataaactcgataaacgagggtcccataaggagtacaaacggggtaaatcatgcactaacacaaagtgcttgatcgtggggggtggcccgtgcggcctccggaccgctattgagctggcgtacctcggcgcaaaggttgtcgtcgtcgaaaaaagagatagttttagccgcaacaacgtgctgcatctgtggccattcactatacacgacctccggggactcggagcgaaaaagttctacggaaagttctgcgccggttccattgatcatatcagtatccggcaattacagctcatcctgttcaaagtcgccctcatgttgggcgtggagatccatgtgaatgtggagttcgtgaaagtgctggagccccccgaagaccaggagaaccaaaagataggatggcgcgccgaattcctgccaactgaccattccttgtcagaattcgagtttgatgtgattattggcgcagacggaagaagaaataccctagagggctttcgtcggaaagaattccggggcaagctcgccatcgctataaccgccaacttcattaacagaaactccactgcagaggctaaagtggaggagatcagcggtgtggcgtttattttcaaccagaaattttttcaggacttgaaggaggaaaccgggatcgacttggagaacatcgtgtactacaaagattgtactcattatttcgtcatgaccgctaagaagcagtcgcttttggacaagggagtgatcattaacgattacatcgataccgagatgcttctctgcgccgagaacgtgaaccaagacaatttattaagttatgcacgggaagcagccgatttcgctactaattatcagttgccttccctcgatttcgcgatgaatcactatgggcagcctgatgtggctatgtttgattttacctgtatgtacgcctctgagaacgccgcactggtgcgcgagcggcaggcccatcagcttttggtcgctttagtgggggactctttactcgagcctttttggcctatgggcactggctgcgcccgggggttcctggctgcttttgatacagcctggatggtgaagagctggaatcaaggaacccccccccttgagcttctggcggagagggaatctctgtaccgcctgttgccgcaaacgaccccagagaacatcaacaaaaacttcgaacaatatacactcgatcctggaactcgttacccaaacctgaattcccattgtgttcgcccgcaccaggtaaagcacttatacatcaccaaagagctggagcattacccccttgaaaggttggggtccgtacgacggagcgttaacctgtctagaaaggaaagcgatatacggccatccaagttgcttacctggtgccagcagcagacagaagggtaccaacacgtgaacgtgaccgacctgaccacatcctggcgctcaggactcgctctgtgcgccattatccataggtttaggcctgaattgattaactttgactcattgaacgaagacgatgccgtggagaacaaccagctggctttcgatgtagccgaaagagagtttggcatccccccagtcaccacaggcaaagagatggccagcgcacaggaacccgacaaattaagtatggtgatgtatttgtccaaattctacgaactgtttagggggacacccctcagacccgtggacagctggaggaagaattacggcgaaaatgccgaccttagcctggccaagtcctctatttctaataactacctcaatttaacctttccacgaaaacggactccacgagtcgacggacagactggagaaaacgacatgaataaacggaggaggaagggcttcaccaacttggatgagccatctaatttcagttccagatcattaggatctaatcaggagtgtggcagcagtaaggagggaggtaaccaaaataaggtgaaatcaatggctaaccagcttctggctaagtttgaggagagtactcggaatccatccctaatgaagcaggaaaaaaaaagcccatcaggcttccattttcatccctcacacctgagaacagttcacccccaggaaagcatgcgcaaaagttttcccctcaacctgggcggatctgacacatgctatttttgcaagaaaagagtctacgtgatggagaggctgtctgccgagggtcactttttccaccgggaatgcttcaggtgcagcatctgtgccaccaccttgagactggcggcttacacattcgattgcgacgagggcaagttttattgtaaaccacattttatccactgtaaaacaaattccaagcagagaaagagaagagcggagctcaaacagcagcgcgaagaggaggccacttggcaggaacaggaagcccctcgacgggataccccgacggaatccagctgcgccgttgctgcgattggaaccctcgagggatcccctcctggaatctccacatcgttctttaggaaagtgctaggctggcccttgcgattgccccgcgatctttgcaattggatgcagggtctcctccaggcagccggattgcatattagggacaacgcgtataattactgctatatgtacgaattgctctctctcggacttcctcttctgtgggcattttccgaagtattggcagcgatgtacagagaatccgaagggtccctagaaagcatttgtaactgggtactgagatgttttcctgtaaaactgcgctag

SEQ ID NO: 102131 - DNA, 1638 bp, Artificial Sequence
  derived and/or modified sequence
atgcggagcagccccgacctgaacagccactgcgtgcggccccaccaggtgaaacatctgtacattacgaaagagctggagcactatccactggaaaggctcggatcagtgaggcgctccgtaaatctttcccgaaaggagtctgatatccgtccaagtaagctgctgacttggtgtcagcagcaaactgagggttatcaacatgtgaacgtcaccgacctcacgacaagttggcggtcgggcctggctctctgcgccatcattcatcgctttcgacctgaactaataaatttcgactctctgaacgaagatgatgcggtagagaataaccagctggcattcgatgttgccgagcgagaattcgggattcccccagttaccaccgggaaggagatggcatccgcccaggagcccgacaagctctccatggtaatgtatctgagtaaattctatgaactgtttagaggtaccccacttagacctgtggattcctggagaaagaactatggagaaaacgccgatctgtcactagctaagtcctccataagcaataactacctgaacctgacatttcctcgcaaacgtactccaagagtcgatggccagaccggggagaatgacatgaacaagagacggcgtaagggctttacaaacttagatgaaccctctaactttagtagccgaagcttaggcagtaaccaagagtgcggcagcagtaaggaaggggggaaccagaataaagtgaagtccatggcgaaccaactgctagccaagttcgaagagtctacccgcaatccaagcttgatgaagcaagagaaaaaatctccctccggctttcactttcacccatcccatttgcgcaccgtgcatcctcaactgacagtaggcaaggtgagctcagggattggggcagctgccgaggttctggttaatctgtacatgaatgaccaccgtcccaaggcccaggcaacaagccccgacctggagtctatgaggaagagtttccctctgaatctagggggcagcgatacctgctacttctgcaagaaacgcgtctatgtgatggagcgcctctccgccgaagggcactttttccacagggagtgcttccgctgctctatatgcgccacgaccctgagactggcggcctatactttcgattgtgacgagggaaaattctactgtaagcctcactttattcactgtaaaaccaatagcaaacagagaaaacggcgcgcggagctgaaacagcagcgagaagaagaagccacttggcaggaacaggaggccccacgacgggatacaccaacagaatcctcttgcgctgttgccgcaataggaacactggagggatcccctccaggtatctctactagctttttccggaaagtactgggttggccactcagacttcctagggatttatgtaactggatgcagggactcttacaagcagcaggcctccacatcagggataatgcttacaactattgttatatgtacgagctcctgagcctcggactacctctgctgtgggcctttagcgaggtcctggccgctatgtaccgagaatcagaggggagcctggagagcatctgtaattgggtgctgaggtgcttccccgtcaagcttagatag

SEQ ID NO: 102132 - DNA, 2931 bp, Artificial Sequence
  derived and/or modified sequence
atgggcgagaatgaagacgagaagcaggctcaggctggccaggtttttgaaaatttcgtgcaggccagtacttgcaagggaacccttcaagcctttaatatactcacacggcacttagatttggatcccctcgaccatagaaatttctactccaagctgaagagtaaggtaacaacgtggaaagccaaggccctgtggtacaagctggataaaagaggatcgcacaaagagtataaacggggaaaatcttgtacaaacacaaagtgcctcatcgtgggaggcggaccctgtggccttagaacagccatcgaactcgcctacctcggcgcaaaagtcgtggtggtcgagaagagggacagtttctcacgcaacaacgtcctccatctctggccattcacaatccacgatctgaggggcttaggagcaaaaaaattttacgggaagttttgtgccggatctatcgatcacatatctatccgccagctccaactcatcctgtttaaggtcgcattaatgctgggggtggaaattcacgttaacgtcgaatttgtcaaggtactggaacccccagaggaccaagagaatcagaaaatcggctggagagccgaattcttgccgaccgaccacagcttgagcgaattcgagttcgacgtgattatcggcgctgacggaagacggaacaccttagaaggcttcaggcgcaaagaatttagggggaaactggccatagcaatcactgccaacttcatcaatcggaacagcacagccgaagccaaagttgaagaaatatcgggagtagcgtttatttttaaccagaagtttttccaggacttgaaagaggaaactggtatcgacctggaaaacattgtgtactacaaagattgcactcattattttgtgatgacagccaagaagcagtcactcctcgataaaggcgttattataaatgattacattgacactgagatgctactctgcgcggagaatgtcaaccaggacaacctactgtcttacgcccgagaggctgccgatttcgctacaaactatcagttgccttctctggactttgctatgaatcactacggacaacctgacgtcgctatgtttgacttcacctgtatgtacgcctctgagaacgcagctctcgtgcgggaaagacaggcccaccaacttttggtcgctctggtaggggattcgttgctcgagccattttggccaatggggacgggctgcgcgaggggtttcctcgcggcattcgacacggcatggatggtgaagtcttggaaccagggcactccgccacttgagctgctggccgaaagggaatcactgtacaggcttttaccccagaccactcccgagaacattaacaaaaatttcgagcaatatactttagaccctggaactcggtacccaaatctcaattcccactgcgtgaggccacaccaggtgaaacacctgtatattaccaaggagctcgaacactatccactggagcgactgggttccgtgcgcagaagcgtcaatctcagccgcaaagagtcggacatcagaccgagtaagctgctcacatggtgtcagcaacaaacggaggggtaccaacacgtgaacgtcaccgatctgacaacctcctggaggtctgggctggccttgtgcgctatcatacatcgttttcgccctgagttaatcaactttgattcactcaacgaggatgatgcagtggagaataatcagctcgccttcgatgtagctgagcgggagttcgggattccgcctgtaacgaccggtaaagaaatggcctccgcccaggagccagataagttgagcatggtgatgtatctctctaagttctatgaactgttccgcggtacccctctgaggcctgtggatagttggaggaaaaattatggagaaaatgcagacttgagcctggcaaaaagctccatttccaacaactatctgaacctgacattccctcgtaaacgcaccccacgcgttgacggccaaacaggtgaaaatgatatgaataagcgtcggaggaaaggatttacaaacttagacgagccatccaattttagctccaggtccctcggcagtaaccaagagtgcggctctagcaaggaaggcggaaaccagaacaaagtaaaaagcatggccaaccagttgttagccaagtttgaagaaagcactcggaacccaagcctgatgaagcaggagaaaaaaagtccctcagggttccactttcatccctctcacctgcggaccgtgcaccctcaagaatctatgcgcaagagctttccacttaatttggggggtagcgatacatgttacttctgtaaaaaacgggtttacgtaatggaacgcctgtctgccgaaggccatttttttcacagggaatgctttcggtgcagcatctgtgccacaacactcaggctggcagcatacacgttcgactgtgacgaaggtaaattttactgtaagcctcatttcatacactgtaagaccaacagcaaacaacgcaaaaggcgggcagagcttaagcagcaacgtgaggaggaagccacatggcaagagcaggaagcgccaaggagagatacaccaacggagtccagctgtgccgttgccgcaatcgggacccttgaaggaagccccccaggaatctccacctcctttttcaggaaagtacttggctggcctctgaggctccctcgggacctgtgtaattggatgcagggcctgttacaggccgctggtctgcatattagggataatgcctacaactattgctacatgtacgagctgctctcgctggggctgcctctgctttgggctttctccgaagtgttggcagccatgtatcgggaatctgaagggtccctagagtcaatctgcaactgggtgctccggtgctttcccgttaaattgaggtag

SEQ ID NO: 102133 - DNA, 1638 bp, Artificial Sequence
  derived and/or modified sequence
atgagatcctctcccgacctcaacagtcattgtgtgcgcccacaccaggtgaaacatctgtacatcacaaaggaacttgaacactacccccttgaacggctcggttccgtccgccgtagcgtgaacctgtcacgaaaagagtctgacattcggccttcaaagcttttaacatggtgccagcagcagaccgaggggtaccagcatgtcaacgtgacggatctcaccaccagctggcggtccggcctggccctctgtgcaattatccaccgcttccggcctgagttgattaatttcgatagcctcaatgaggatgatgctgtcgagaacaatcaactggccttcgacgtcgcggagcgcgaatttggcattcccccagtgactactgggaaggagatggcttcggctcaggaacccgacaaactgtccatggtcatgtacttatccaagttctacgagctgtttagagggacccccctgcgccctgtggactcttggagaaagaactacggagagaacgccgatctgtccctggctaaatcaagtattagtaacaattatctgaatctgacctttcctaggaagagaactccgcgtgtggatgggcaaaccggagagaatgacatgaataaacggagacggaaaggctttaccaacctcgatgagccctccaacttcagctcacgctccctggggagtaaccaggagtgcggctctagcaaagaaggcggaaatcaaaacaaagtcaagtctatggccaaccagctgctggccaagttcgaagaatccacacgtaatccatctctcatgaagcaagagaaaaaatcaccctctggattccatttccacccctcacaccttaggactgtccatccgcagctcacagttggcaaggtttcttccggtatcggcgcagctgcagaggtcctcgtcaacctctatatgaacgaccacaggcctaaagcccaggccacctctcccgacctcgagagcatgcgtaaaagcttcccactaaacttaggagggtccgatacctgctatttttgcaaaaagagagtgtacgtaatggaaagactgtcagctgaggggcatttcttccacagggagtgttttaggtgttcgatatgcgctactacactcaggttggccgcatacacgtttgattgcgatgaagggaaattctactgtaaaccacactttatccattgtaagacaaattccaagcagcgtaagagacgagccgagcttaagcagcagcgcgaggaagaagctacttggcaagaacaggaggccccacgacgcgatacccctaccgagagcagctgcgcagtggccgcaatcggcaccctggaggggtctccccctggcattagcacaagtttctttcgcaaggtgctcgggtggcctcttagactccccagggatctgtgtaactggatgcaaggactcctacaagccgcaggccttcatatccgagacaacgcctacaattattgttacatgtatgagctgctttccctggggctgccactgttatgggctttttcagaagtcttagctgcgatgtatcgcgaaagcgagggctcccttgagagtatatgcaactgggtcctgagatgtttccctgttaagctgcgatag

SEQ ID NO: 102134 - DNA, 2931 bp, Artificial Sequence
  derived and/or modified sequence
atgggcgagaacgaggacgagaagcaggcccaggccggccaggtgttcgagaacttcgtgcaggccagcacctgcaagggcaccctgcaggccttcaacatcctgaccagacacctggacctggaccccctggaccacagaaacttctacagcaagctgaagagcaaggtgaccacctggaaggccaaggccctgtggtacaagctggacaagagaggcagccacaaggagtacaagagaggcaagagctgcaccaacaccaagtgcctgatcgtgggcggcggcccctgcggcctgagaaccgccatcgagctggcctacctgggcgccaaggtggtggtggtggagaagagagacagcttcagcagaaacaacgtgctgcacctgtggcccttcaccatccacgacctgagaggcctgggcgccaagaagttctacggcaagttctgcgccggcagcatcgaccacatcagcatcagacagctgcagctgatcctgttcaaggtggccctgatgctgggcgtggagatccacgtgaacgtggagttcgtgaaggtgctggagccccccgaggaccaggagaaccagaagatcggctggagagccgagttcctgcccaccgaccacagcctgagcgagttcgagttcgacgtgatcatcggcgccgacggcagaagaaacaccctggagggcttcagaagaaaggagttcagaggcaagctggccatcgccatcaccgccaacttcatcaacagaaacagcaccgccgaggccaaggtggaggagatcagcggcgtggccttcatcttcaaccagaagttcttccaggacctgaaggaggagaccggcatcgacctggagaacatcgtgtactacaaggactgcacccactacttcgtgatgaccgccaagaagcagagcctgctggacaagggcgtgatcatcaacgactacatcgacaccgagatgctgctgtgcgccgagaacgtgaaccaggacaacctgctgagctacgccagagaggccgccgacttcgccaccaactaccagctgcccagcctggacttcgccatgaaccactacggccagcccgacgtggccatgttcgacttcacctgcatgtacgccagcgagaacgccgccctggtgagagagagacaggcccaccagctgctggtggccctggtgggcgacagcctgctggagcccttctggcccatgggcaccggctgcgccagaggcttcctggccgccttcgacaccgcctggatggtgaagagctggaaccagggcaccccccccctggagctgctggccgagagagagagcctgtacagactgctgccccagaccacccccgagaacatcaacaagaacttcgagcagtacaccctggaccccggcaccagataccccaacctgaacagccactgcgtgagaccccaccaggtgaagcacctgtacatcaccaaggagctggagcactaccccctggagagactgggcagcgtgagaagaagcgtgaacctgagcagaaaggagagcgacatcagacccagcaagctgctgacctggtgccagcagcagaccgagggctaccagcacgtgaacgtgaccgacctgaccaccagctggagaagcggcctggccctgtgcgccatcatccacagattcagacccgagctgatcaacttcgacagcctgaacgaggacgacgccgtggagaacaaccagctggccttcgacgtggccgagagagagttcggcatcccccccgtgaccaccggcaaggagatggccagcgcccaggagcccgacaagctgagcatggtgatgtacctgagcaagttctacgagctgttcagaggcacccccctgagacccgtggacagctggagaaagaactacggcgagaacgccgacctgagcctggccaagagcagcatcagcaacaactacctgaacctgaccttccccagaaagagaacccccagagtggacggccagaccggcgagaacgacatgaacaagagaagaagaaagggcttcaccaacctggacgagcccagcaacttcagcagcagaagcctgggcagcaaccaggagtgcggcagcagcaaggagggcggcaaccagaacaaggtgaagagcatggccaaccagctgctggccaagttcgaggagagcaccagaaaccccagcctgatgaagcaggagaagaagagccccagcggcttccacttccaccccagccacctgagaaccgtgcacccccaggagagcatgagaaagagcttccccctgaacctgggcggcagcgacacctgctacttctgcaagaagagagtgtacgtgatggagagactgagcgccgagggccacttcttccacagagagtgcttcagatgcagcatctgcgccaccaccctgagactggccgcctacaccttcgactgcgacgagggcaagttctactgcaagccccacttcatccactgcaagaccaacagcaagcagagaaagagaagagccgagctgaagcagcagagagaggaggaggccacctggcaggagcaggaggcccccagaagagacacccccaccgagagcagctgcgccgtggccgccatcggcaccctggagggcagcccccccggcatcagcaccagcttcttcagaaaggtgctgggctggcccctgagactgcccagagacctgtgcaactggatgcagggcctgctgcaggccgccggcctgcacatcagagacaacgcctacaactactgctacatgtacgagctgctgagcctgggcctgcccctgctgtgggccttcagcgaggtgctggccgccatgtacagagagagcgagggcagcctggagagcatctgcaactgggtgctgagatgcttccccgtgaagctgagatag

SEQ ID NO: 102135 - DNA, 1638 bp, Artificial Sequence
  derived and/or modified sequence
atgagaagcagccccgacctgaacagccactgcgtgagaccccaccaggtgaagcacctgtacatcaccaaggagctggagcactaccccctggagagactgggcagcgtgagaagaagcgtgaacctgagcagaaaggagagcgacatcagacccagcaagctgctgacctggtgccagcagcagaccgagggctaccagcacgtgaacgtgaccgacctgaccaccagctggagaagcggcctggccctgtgcgccatcatccacagattcagacccgagctgatcaacttcgacagcctgaacgaggacgacgccgtggagaacaaccagctggccttcgacgtggccgagagagagttcggcatcccccccgtgaccaccggcaaggagatggccagcgcccaggagcccgacaagctgagcatggtgatgtacctgagcaagttctacgagctgttcagaggcacccccctgagacccgtggacagctggagaaagaactacggcgagaacgccgacctgagcctggccaagagcagcatcagcaacaactacctgaacctgaccttccccagaaagagaacccccagagtggacggccagaccggcgagaacgacatgaacaagagaagaagaaagggcttcaccaacctggacgagcccagcaacttcagcagcagaagcctgggcagcaaccaggagtgcggcagcagcaaggagggcggcaaccagaacaaggtgaagagcatggccaaccagctgctggccaagttcgaggagagcaccagaaaccccagcctgatgaagcaggagaagaagagccccagcggcttccacttccaccccagccacctgagaaccgtgcacccccagctgaccgtgggcaaggtgagcagcggcatcggcgccgccgccgaggtgctggtgaacctgtacatgaacgaccacagacccaaggcccaggccaccagccccgacctggagagcatgagaaagagcttccccctgaacctgggcggcagcgacacctgctacttctgcaagaagagagtgtacgtgatggagagactgagcgccgagggccacttcttccacagagagtgcttcagatgcagcatctgcgccaccaccctgagactggccgcctacaccttcgactgcgacgagggcaagttctactgcaagccccacttcatccactgcaagaccaacagcaagcagagaaagagaagagccgagctgaagcagcagagagaggaggaggccacctggcaggagcaggaggcccccagaagagacacccccaccgagagcagctgcgccgtggccgccatcggcaccctggagggcagcccccccggcatcagcaccagcttcttcagaaaggtgctgggctggcccctgagactgcccagagacctgtgcaactggatgcagggcctgctgcaggccgccggcctgcacatcagagacaacgcctacaactactgctacatgtacgagctgctgagcctgggcctgcccctgctgtgggccttcagcgaggtgctggccgccatgtacagagagagcgagggcagcctggagagcatctgcaactgggtgctgagatgcttccccgtgaagctgagatag

SEQ ID NO: 102136 - DNA, 363 bp, Artificial Sequence
  derived and/or modified sequence
atgggggagaatgaggacgagaaacaagcccaagctggacaggtcttcgagaattttgttcaggcgtccacctgcaaaggcaccctgcaggcctttaatatattgacaaggcatttagatctggaccccctagaccaccgtaatttctactccaagctgaagagtaaggtcacaacgtggaaggcaaaagctctgtggtacaagctcgacaagagaggctctcataaagagtacaagcgggggaagtcctgcaccaacactaaatgtctcatcgtgggaggaggaccttgcggcctcaggacagccatcgagctggcctacctgggcgcaaaagtggtcgtggttgaaaaacgtgatagttag

SEQ ID NO: 102137 - DNA, 405 bp, Artificial Sequence
  derived and/or modified sequence
atgggagagaatgaggatgaaaagcaggcccaggccgggcaggttttcgagaacttcgtccaagctagcacatgcaaagggacactacaggcattcaatatcctcaccaggcacctggacttggatccccttgaccataggaatttctactcaaaactcaagtctaaagttactacctggaaggcaaaggctttgtggtacaagctggacaagagagggagtcacaaagagtataaacgtggaaagtcgtgtaccaataccaagtgccttattgtgggcgggggcccctgtggactgcgcaccgctatagagctggcttacctcggtgctaaagttgtcgtcgtggaaaagcgcgattcgttcagtcgtaataatgtgctgcacctttggccttttaccatttag

SEQ ID NO: 102138 - DNA, 267 bp, Artificial Sequence
  derived and/or modified sequence
atgggcgagaatgaggacgagaagcaggcacaggcggggcaagtttttgaaaattttgtgcaggctagtacctgcaaagggacactgcaagcatttaatatcctgactcggcatctggacctagaccccctggatcatcgcaacttctactctaaactgaagagtaaggtgaccacatggaaggccaaggcgctctggtacaagcttgacaaacgcggatcacacaaagaatacaagagaggaaagtcctgcaccaatacaaagtag

SEQ ID NO: 102139 - DNA, 297 bp, Artificial Sequence
  derived and/or modified sequence
atgggcgaaaacgaagatgaaaagcaggcacaggccggccaggtgtttgaaaacttcgtacaagctagcacatgcaaggggactctgcaggcttttaacatcttgacaaggcaccttgatctcgatccacttgaccatcggaacttttactcaaagttgaagtccaaggtgacgacctggaaagctaaggctctctggtacaagttggacaaacgaggctcacataaggaatataaaagaggtaagtcatgtaccaacaccaaatgcctcattgtcggtggagggccctgcggatag

SEQ ID NO: 102140 - DNA, 267 bp, Artificial Sequence
  derived and/or modified sequence
atgggcgagaacgaagacgagaagcaagcacaagcaggccaggtgtttgagaattttgtccaggcttcgacgtgtaaagggaccctccaagctttcaacattttgacaaggcacctagatttggacccactggaccatcgcaatttctattctaaactcaaatctaaagtaacaacgtggaaagcaaaagctctatggtacaaattggacaaacgaggctcccacaaggagtataagcgagggaaatcttgcacaaataccaaatag

SEQ ID NO: 102141 - DNA, 309 bp, Artificial Sequence
  derived and/or modified sequence
atgggtgaaaacgaggatgagaaacaagcccaagctggccaggtcttcgagaatttcgtccaagccagcacatgcaaagggaccctgcaggccttcaatatactcacccggcatcttgatctggacccacttgatcaccggaatttctacagcaagttgaagtccaaggtcacgacctggaaggccaaagctctatggtataagctggataagaggggatcccataaggagtacaagcgggggaaatcatgtaccaatacaaagtgcctgatcgtgggcggagggccatgcggcctgcgcacagcatag

SEQ ID NO: 102142 - DNA, 363 bp, Artificial Sequence
  derived and/or modified sequence
atgggagaaaatgaagatgagaagcaggcccaggccggccaggtgtttgaaaattttgtgcaggccagcacctgcaagggcaccctgcaggccttcaacatcctgaccaggcacctggacctggaccccctggaccacaggaacttctacagcaagctgaagagcaaggtgaccacctggaaggccaaggccctgtggtacaagctggacaagaggggcagccacaaggagtacaagaggggcaagagctgcaccaacaccaagtgcctgattgtgggcggcggcccctgtggcctgaggacagccatcgagctggcctacctgggcgccaaggtggtggtggtggagaagagggacagctag

SEQ ID NO: 102143 - DNA, 405 bp, Artificial Sequence
  derived and/or modified sequence
atgggagaaaatgaagatgagaagcaggcccaggccggccaggtgtttgaaaattttgtgcaggccagcacctgcaagggcaccctgcaggccttcaacatcctgaccaggcacctggacctggaccccctggaccacaggaacttctacagcaagctgaagagcaaggtgaccacctggaaggccaaggccctgtggtacaagctggacaagaggggcagccacaaggagtacaagaggggcaagagctgcaccaacaccaagtgcctgattgtgggcggcggcccctgtggcctgaggacagccatcgagctggcctacctgggcgccaaggtggtggtggtggagaagagggacagcttcagcagaaataatgtgctgcacctgtggcccttcaccatctag

SEQ ID NO: 102144 - DNA, 267 bp, Artificial Sequence
  derived and/or modified sequence
atgggagaaaatgaagatgagaagcaggcccaggccggccaggtgtttgaaaattttgtgcaggccagcacctgcaagggcaccctgcaggccttcaacatcctgaccaggcacctggacctggaccccctggaccacaggaacttctacagcaagctgaagagcaaggtgaccacctggaaggccaaggccctgtggtacaagctggacaagaggggcagccacaaggagtacaagaggggcaagagctgcaccaacaccaagtag

SEQ ID NO: 102145 - DNA, 297 bp, Artificial Sequence
  derived and/or modified sequence
atgggagaaaatgaagatgagaagcaggcccaggccggccaggtgtttgaaaattttgtgcaggccagcacctgcaagggcaccctgcaggccttcaacatcctgaccaggcacctggacctggaccccctggaccacaggaacttctacagcaagctgaagagcaaggtgaccacctggaaggccaaggccctgtggtacaagctggacaagaggggcagccacaaggagtacaagaggggcaagagctgcaccaacaccaagtgcctgattgtgggcggcggcccctgtggctag

SEQ ID NO: 102146 - DNA, 309 bp, Artificial Sequence
  derived and/or modified sequence
atgggagaaaatgaagatgagaagcaggcccaggccggccaggtgtttgaaaattttgtgcaggccagcacctgcaagggcaccctgcaggccttcaacatcctgaccaggcacctggacctggaccccctggaccacaggaacttctacagcaagctgaagagcaaggtgaccacctggaaggccaaggccctgtggtacaagctggacaagaggggcagccacaaggagtacaagaggggcaagagctgcaccaacaccaagtgcctgattgtgggcggcggcccctgtggcctgaggacagcctag

SEQ ID NO: 102147 - DNA, 573 bp, Artificial Sequence
  derived and/or modified sequence
ggtagatggtgtgcttccagctgataccaggagcagaagttttgagaagagactgtttgtcatgtggatagtggaaagccctgctctctggtaacgaatgaagaaaggctttaaagctgggtgtctacggagaggtgtgacgtttctccagatacttcatgctgttcacctgtgtcctcgccgcaccactgccgcacacgactcctgaaccatgggggaaaacgaggatgagaagcaggcccaggcggggcaggtttttgagaactttgtccaggcatccacgtgcaaaggtaccctccaggccttcaacattctcacacgacacctggacctagaccctctggaccacagaaacttttattccaagctcaagtccaaggtgaccacctggaaagccaaagccctgtggtacaaattggataagcgtggttcccacaaagagtataagcgagggaagtcgtgcacgaacaccaagtgtctcatagttgggggaggaccctgtggcttgcgcactgccattgaacttgcctacctgggagccaaagtggtcgtggtggagaagagggactcctt

SEQ ID NO: 102148 - DNA, 566 bp, Artificial Sequence
  derived and/or modified sequence
agatggtgtgcttccagctgataccaggagcagaagttttgagaagagactgtttgtcatgtggatagtggaaagccctgctctctggtgtgacgtttctccagatacttcatgctgttcacctgtgtcctcgccgcaccactgccgcacacgactcctgaaccatgggggaaaacgaggatgagaagcaggcccaggcggggcaggtttttgagaactttgtccaggcatccacgtgcaaaggtaccctccaggccttcaacattctcacacgacacctggacctagaccctctggaccacagaaacttttattccaagctcaagtccaaggtgaccacctggaaagccaaagccctgtggtacaaattggataagcgtggttcccacaaagagtataagcgagggaagtcgtgcacgaacaccaagtgtctcatagttgggggaggaccctgtggcttgcgcactgccattgaacttgcctacctgggagccaaagtggtcgtggtggagaagagggactccttctcccggaacaacgtgctacacctctggcctttcaccatc

SEQ ID NO: 102149 - DNA, 546 bp, Artificial Sequence
  derived and/or modified sequence
aatgaaggtccggccctccccagtgtaggaggcaggtaaatgatcacactgtgacaaatgctcaaacggggatgtgcttgcaaaggctagagacagcacgggaggaaggagcagtccattctgctgagagtgtagctcagttccaagaacacttattgatgcttacaccgggccaagccctgtgatgggccctgggttccagaggtgtgacgtttctccagatacttcatgctgttcacctgtgtcctcgccgcaccactgccgcacacgactcctgaaccatgggggaaaacgaggatgagaagcaggcccaggcggggcaggtttttgagaactttgtccaggcatccacgtgcaaaggtaccctccaggccttcaacattctcacacgacacctggacctagaccctctggaccacagaaacttttattccaagctcaagtccaaggtgaccacctggaaagccaaagccctgtggtacaaattggataagcgtggttcccacaaagagtataagcgagggaagtcgtgcacgaacaccaagg

SEQ ID NO: 102150 - DNA, 589 bp, Artificial Sequence
  derived and/or modified sequence
accaagactaatgaaggtccggccctccccagtgtaggaggcaggtaaatgatcacactgtgacaaatgctcaaacggggatgtgcttgcaaaggctagagacagcacgggaggaaggagcagtccattctgctgagagtgtgagtaccgagaaagcatggcactgggcttgaaggatgaggagttcgccagacacagaggatgaggagagcagcacgtgtgacgtttctccagatacttcatgctgttcacctgtgtcctcgccgcaccactgccgcacacgactcctgaaccatgggggaaaacgaggatgagaagcaggcccaggcggggcaggtttttgagaactttgtccaggcatccacgtgcaaaggtaccctccaggccttcaacattctcacacgacacctggacctagaccctctggaccacagaaacttttattccaagctcaagtccaaggtgaccacctggaaagccaaagccctgtggtacaaattggataagcgtggttcccacaaagagtataagcgagggaagtcgtgcacgaacaccaagtgtctcatagttgggggaggaccctgtggct

SEQ ID NO: 102151 - DNA, 516 bp, Artificial Sequence
  derived and/or modified sequence
aatgatgctgattctctcctctgcacagcctcacaatcacctgaatatccccttcaagtgcatcctgccctgggtttcctgtgtgcacattgagtttccttctctagttgaagagagagtttgcagaggctggcaaacctggagctggactgaatggcctggacaggtggagcaggtgtgacgtttctccagatacttcatgctgttcacctgtgtcctcgccgcaccactgccgcacacgactcctgaaccatgggggaaaacgaggatgagaagcaggcccaggcggggcaggtttttgagaactttgtccaggcatccacgtgcaaaggtaccctccaggccttcaacattctcacacgacacctggacctagaccctctggaccacagaaacttttattccaagctcaagtccaaggtgaccacctggaaagccaaagccctgtggtacaaattggataagcgtggttcccacaaagagtataagcgagggaagtcgtgcacgaacaccaag

SEQ ID NO: 102152 - DNA, 593 bp, Artificial Sequence
  derived and/or modified sequence
ataggggaagagattacctgcaatgccacatcgacaggccaaaaggcacaattctgtatctgttataaatatttatgtttagtattgaacactaaatagtgtggttaatatttgaatgtcttaaagaaattgcatttttacttctcagcacccatcccccaccctaacctcatcgtccaaagctgacctctgcctccccctactttcacaggtgtgacgtttctccagatacttcatgctgttcacctgtgtcctcgccgcaccactgccgcacacgactcctgaaccatgggggaaaacgaggatgagaagcaggcccaggcggggcaggtttttgagaactttgtccaggcatccacgtgcaaaggtaccctccaggccttcaacattctcacacgacacctggacctagaccctctggaccacagaaacttttattccaagctcaagtccaaggtgaccacctggaaagccaaagccctgtggtacaaattggataagcgtggttcccacaaagagtataagcgagggaagtcgtgcacgaacaccaagtgtctcatagttgggggaggaccctgtggcttgcgcactgc

SEQ ID NO: 102153 - DNA, 363 bp, Artificial Sequence
  derived and/or modified sequence
atgggcgagaacgaggacgagaagcaggcccaggccggccaggtgttcgaaaactttgtgcaggcaagtacatgcaaaggcaccctccaagcctttaacattctcaccagacacttggatctggatcctctagatcatcgcaacttctacagcaaactaaagagcaaagttacaacatggaaggctaaggctctgtggtataagctcgataaaaggggctcacacaaagagtacaagcgggggaaatcctgcactaacacaaaatgtctgatagtagggggaggaccctgtggccttcgcactgcaattgagctagcttacctcggagctaaagtagtcgttgttgaaaaaagggattcgtag

SEQ ID NO: 102154 - DNA, 405 bp, Artificial Sequence
  derived and/or modified sequence
atgggcgagaacgaggacgagaagcaggcccaggccggccaggtgttcgaaaacttcgttcaagcatccacttgcaaaggcacattgcaggcttttaacattcttacacggcacttagacctcgacccccttgatcatagaaacttttattccaagctcaaatccaaggtcactacatggaaagcaaaggcactgtggtataaactggataagagaggatcacataaagaatataaacgagggaagtcctgtaccaacaccaagtgcctcatagtcggcggcggtccttgcggtctccggactgcaattgaacttgcttacctaggcgcgaaggtcgttgtcgtcgagaagcgggattcttttagtcggaataacgtgttgcatctgtggccatttacaatatag

SEQ ID NO: 102155 - DNA, 267 bp, Artificial Sequence
  derived and/or modified sequence
atgggcgagaacgaggacgagaagcaggcccaggccggccaggtgtttgagaacttcgtgcaggctagcacctgtaagggtaccctgcaggcttttaatatcctgacccgacatctcgacttggatccactcgaccacagaaacttctactcaaagctgaagtctaaagtcacaacatggaaagctaaggcgctttggtacaaactggacaaacggggcagtcacaaggaatacaaaagaggaaaatcatgtaccaacacgaagtag

SEQ ID NO: 102156 - DNA, 297 bp, Artificial Sequence
  derived and/or modified sequence
atgggcgagaacgaggacgagaagcaggcccaggccggccaggtgtttgagaattttgtgcaggcaagtacctgtaaggggacgctccaagcattcaatattctcacacgccacttagatttagacccgctggaccatagaaacttctactcaaaattgaaaagcaaagtgacgacctggaaggcgaaggcgctctggtataagctggacaagcgtgggtcacataaagagtacaagaggggcaagagctgcactaataccaaatgtctaattgttggaggtggtccatgtggttag

SEQ ID NO: 102157 - DNA, 267 bp, Artificial Sequence
  derived and/or modified sequence
atgggcgagaacgaggacgagaagcaggcccaggccggccaggtgtttgagaatttcgttcaggcatccacttgtaaggggaccttacaggccttcaacatcctcacccgccacctggacctggatccgctggatcaccgcaatttttatagtaagctgaagtccaaggtcacaacctggaaggccaaggcactatggtataaactggacaagcggggctcacacaaggagtacaagaggggtaaatcctgcacaaatacaaaatag

SEQ ID NO: 102158 - DNA, 309 bp, Artificial Sequence
  derived and/or modified sequence
atgggcgagaacgaggacgagaagcaggcccaggccggccaggtgttcgaaaacttcgtgcaagctagcacatgcaaggggacgctgcaagccttcaacattctcacacgccatctggatctcgatcctctggatcatagaaatttttattctaaactgaagtcgaaagtgacaacctggaaggctaaagccctgtggtataagcttgacaaaaggggatctcacaaggaatacaaacgaggcaagtcctgtactaacactaaatgcctgatcgtgggcggaggtccatgcggccttcggaccgcatag

SEQ ID NO: 102159 - DNA, 363 bp, Artificial Sequence
  derived and/or modified sequence
atgggcgaaaacgaagacgagaaacaggcacaggccggacaagtgtttgagaacttcgtacaggcctccacttgtaagggcacactccaggcgtttaacatactaacgcgacatttagatctggatcctctggaccatcgcaatttctattccaagctcaaatccaaggtgactacttggaaagccaaggcgttgtggtacaaactggataagcgcggttcacacaaagagtacaaacgcggaaaatcgtgcacaaacactaagtgcctcatcgtcggcggaggtccctgcggattgagaaccgccatcgaactggcttacctgggggctaaagtggttgtggtggagaagcgagatagctag

SEQ ID NO: 102160 - DNA, 405 bp, Artificial Sequence
  derived and/or modified sequence
atgggagagaatgaagacgaaaagcaggcccaagcaggccaggtgttcgagaacttcgtccaggcaagcacatgtaagggcaccctgcaggcctttaatatcttgactagacacttggacctggaccccttggatcaccgaaatttctactccaagctcaaaagtaaagtgacaacatggaaagctaaggccttatggtataagctggataagagagggagtcacaaagagtataaacgtggcaagagctgtaccaacacgaagtgcttgatcgtgggcggaggcccatgcggactgcggactgccatcgaattggcttacctaggtgctaaggtggtggtggtggagaaaagagatagtttttcacggaacaatgttctgcatctgtggcccttcactatctag

SEQ ID NO: 102161 - DNA, 267 bp, Artificial Sequence
  derived and/or modified sequence
atgggcgaaaatgaggacgagaaacaagcccaggccggtcaagtgttcgagaattttgtccaggcctctacttgtaaggggacacttcaggcttttaacatcctgacccggcatctagacctggatccactggatcatcggaatttttatagcaagctgaaaagcaaagtcaccacctggaaggctaaagccttatggtacaaactggacaaacggggaagtcataaagaatataagagggggaaatcatgtaccaacaccaaatag

SEQ ID NO: 102162 - DNA, 297 bp, Artificial Sequence
  derived and/or modified sequence
atgggagagaacgaggatgagaaacaagcacaggcagggcaagtattcgagaatttcgtacaggcttctacatgcaaaggcacattgcaggcgtttaacatcttgactcgacatctggatttagatccactcgatcaccggaacttctactctaaacttaagagcaaagtaactacatggaaagctaaggccctgtggtacaaacttgacaagcgcggttcacacaaagaatacaaaagagggaagagttgtactaacactaaatgtttaattgtcggaggcggaccttgcggctag

SEQ ID NO: 102163 - DNA, 267 bp, Artificial Sequence
  derived and/or modified sequence
atgggagagaacgaagatgagaagcaggcgcaagcagggcaagtgttcgagaactttgtgcaagcatcaacatgcaagggcacacttcaggcattcaacattctcactcgacatctggacctggatcccttggatcatagaaatttctactcaaagctcaagagcaaagtcaccacatggaaagctaaggcactttggtacaagctggacaaaagaggcagccacaaagaatataagcgtgggaaaagctgcacaaacaccaaatag

SEQ ID NO: 102164 - DNA, 309 bp, Artificial Sequence
  derived and/or modified sequence
atgggcgaaaatgaagatgaaaaacaggctcaagcgggacaagtgttcgaaaattttgtccaggccagcacctgtaaggggaccttgcaggcattcaatattctgacccgacatttagacctcgatcctcttgatcaccgcaacttttattcaaaattgaagagcaaggtgaccacgtggaaggccaaagctctctggtacaaactagataaacgcggatcacacaaagagtataaacgaggcaagtcttgtacgaacacaaagtgcctcattgtgggaggaggcccttgcggtctccggactgcctag

SEQ ID NO: 102165 - DNA, 363 bp, Artificial Sequence
  derived and/or modified sequence
atgggcgagaacgaggacgagaagcaggcccaggccggccaggtgttcgagaacttcgtgcaggccagcacctgcaagggcaccctgcaggccttcaacatcctgaccagacacctggacctggaccccctggaccacagaaacttctacagcaagctgaagagcaaggtgaccacctggaaggccaaggccctgtggtacaagctggacaagagaggcagccacaaggagtacaagagaggcaagagctgcaccaacaccaagtgcctgatcgtgggcggcggcccctgcggcctgagaaccgccatcgagctggcctacctgggcgccaaggtggtggtggtggagaagagagacagctag

SEQ ID NO: 102166 - DNA, 405 bp, Artificial Sequence
  derived and/or modified sequence
atgggcgagaacgaggacgagaagcaggcccaggccggccaggtgttcgagaacttcgtgcaggccagcacctgcaagggcaccctgcaggccttcaacatcctgaccagacacctggacctggaccccctggaccacagaaacttctacagcaagctgaagagcaaggtgaccacctggaaggccaaggccctgtggtacaagctggacaagagaggcagccacaaggagtacaagagaggcaagagctgcaccaacaccaagtgcctgatcgtgggcggcggcccctgcggcctgagaaccgccatcgagctggcctacctgggcgccaaggtggtggtggtggagaagagagacagcttcagcagaaacaacgtgctgcacctgtggcccttcaccatctag

SEQ ID NO: 102167 - DNA, 267 bp, Artificial Sequence
  derived and/or modified sequence
atgggcgagaacgaggacgagaagcaggcccaggccggccaggtgttcgagaacttcgtgcaggccagcacctgcaagggcaccctgcaggccttcaacatcctgaccagacacctggacctggaccccctggaccacagaaacttctacagcaagctgaagagcaaggtgaccacctggaaggccaaggccctgtggtacaagctggacaagagaggcagccacaaggagtacaagagaggcaagagctgcaccaacaccaagtag

SEQ ID NO: 102168 - DNA, 297 bp, Artificial Sequence
  derived and/or modified sequence
atgggcgagaacgaggacgagaagcaggcccaggccggccaggtgttcgagaacttcgtgcaggccagcacctgcaagggcaccctgcaggccttcaacatcctgaccagacacctggacctggaccccctggaccacagaaacttctacagcaagctgaagagcaaggtgaccacctggaaggccaaggccctgtggtacaagctggacaagagaggcagccacaaggagtacaagagaggcaagagctgcaccaacaccaagtgcctgatcgtgggcggcggcccctgcggctag

SEQ ID NO: 102169 - DNA, 309 bp, Artificial Sequence
  derived and/or modified sequence
atgggcgagaacgaggacgagaagcaggcccaggccggccaggtgttcgagaacttcgtgcaggccagcacctgcaagggcaccctgcaggccttcaacatcctgaccagacacctggacctggaccccctggaccacagaaacttctacagcaagctgaagagcaaggtgaccacctggaaggccaaggccctgtggtacaagctggacaagagaggcagccacaaggagtacaagagaggcaagagctgcaccaacaccaagtgcctgatcgtgggcggcggcccctgcggcctgagaaccgcctag

SEQ ID NO: 102170 - protein, 111 aa, Artificial Sequence
  derived and/or modified sequence
MANIHQENEEMEQPMQNGEEDRPLGGGEGHQPAGNRRGQARRLAPNFRWAIPNRQINDGMGGDGDDMEIFMEEMREIRRKLRELQLRNCLRILMGELSNHHDHHDEFCLMP

SEQ ID NO: 102171 - protein, 101 aa, Artificial Sequence
  derived and/or modified sequence
MEQPMQNGEEDRPLGGGEGHQPAGNRRGQARRLAPNFRWAIPNRQINDGMGGDGDDMEIFMEEMREIRRKLRELQLRNCLRILMGELSNHHDHHDEFCLMP

SEQ ID NO: 102172 - DNA, 884 bp, Artificial Sequence
  derived and/or modified sequence
accccatcccccactcctataccggtcctccattttggtgcctgcaaagctctgggaaagaatcccgggaaacgaaaaatggtgggtttgggggaagggaggtaaggggagaaagctggagggaggggctttaattggaggccccgtagaggacgcgcggaacttctaaggtgggaaaaaacgaaattaaaaaatcctttgatatcagggctctgaatcctgctggtcagagcaccaagcattcagtctctctccttgcctttgtcttacttgtgttcaaagaaaaacaaccagaaaaaaaaaatctcatcatggcaaatattcaccaggaaaacgaagagatggagcagcctatgcagaatggagaggaagaccgccctttgggaggaggtgaaggccaccagcctgcaggaaatcgacggggacaggctcgccgacttgcccctaattttcgatgggccatacccaataggcagatcaatgatgggatgggtggagatggagatgatatggaaatattcatggaggagatgagagaaatcagaagaaaacttagggagctgcagttgaggaattgtctgcgtatccttatgggggagctctctaatcaccatgaccatcatgatgaattttgccttatgccttgactcctgccatttatcatgagattaatactgtgattcccgctgttttctttttccttgcattttcctaatatgcctttactgatccgtttgctgtgaaccctatgttatttccatgtgtcaagtgggtcttgtgttgccagcttctatttgaagattgcctttgcactcagtgtaagtttctgtcagcagtagtttcacccatttgcatggaaaaatttaaagctaataaagcaattt

SEQ ID NO: 102173 - DNA, 921 bp, Artificial Sequence
  derived and/or modified sequence
ggctgtgcgctctggggcacctcatgcagacgggagtagggaggctgttttttgcgcgtgcatatggcggtggcgggtggggggaagggggagatcctgctgcactggccgcccaagttggggggcgagctcggtggtgacgcgcggccctcacgtgacccagagctgcagagcgacgcagccttcggtgcagtcgtcactcgcgtctggctaccagctccccgctgccctgagctcggcgggctggcattcggcccggggaaaagcggagcaggtctgcgaggctaagtgtctccgcggcgcacctcgcggcgagaatccggaggagaaggagactgcaaggataggcccaggaaaacgaagagatggagcagcctatgcagaatggagaggaagaccgccctttgggaggaggtgaaggccaccagcctgcaggaaatcgacggggacaggctcgccgacttgcccctaattttcgatgggccatacccaataggcagatcaatgatgggatgggtggagatggagatgatatggaaatattcatggaggagatgagagaaatcagaagaaaacttagggagctgcagttgaggaattgtctgcgtatccttatgggggagctctctaatcaccatgaccatcatgatgaattttgccttatgccttgactcctgccatttatcatgagattaatactgtgattcccgctgttttctttttccttgcattttcctaatatgcctttactgatccgtttgctgtgaaccctatgttatttccatgtgtcaagtgggtcttgtgttgccagcttctatttgaagattgcctttgcactcagtgtaagtttctgtcagcagtagtttcacccatttgcatggaaaaatttaaagctaataaagcaatttaaaaagcaatcta

SEQ ID NO: 102174 - DNA, 805 bp, Artificial Sequence
  derived and/or modified sequence
cggtggcgggtggggggaagggggagatcctgctgcactggccgcccaagttggggggcgagctcggtggtgacgcgcggccctcacgtgacccagagctgcagagcgacgcagccttcggtgcagtcgtcactcgcgtctggctaccagctccccgctgccctgagctcggcgggctggcattcggcccggggaaaagcggagcagaaaaacaaccagaaaaaaaaaatctcatcatggcaaatattcaccaggaaaacgaagagatggagcagcctatgcagaatggagaggaagaccgccctttgggaggaggtgaaggccaccagcctgcaggaaatcgacggggacaggctcgccgacttgcccctaattttcgatgggccatacccaataggcagatcaatgatgggatgggtggagatggagatgatatggaaatattcatggaggagatgagagaaatcagaagaaaacttagggagctgcagttgaggaattgtctgcgtatccttatgggggagctctctaatcaccatgaccatcatgatgaattttgccttatgccttgactcctgccatttatcatgagattaatactgtgattcccgctgttttctttttccttgcattttcctaatatgcctttactgatccgtttgctgtgaaccctatgttatttccatgtgtcaagtgggtcttgtgttgccagcttctatttgaagattgcctttgcactcagtgtaagtttctgtcagcagtagtttcacccatttgcatggaaaaatttaaagctaataaagca

SEQ ID NO: 102175 - DNA, 913 bp, Artificial Sequence
  derived and/or modified sequence
gcgtgcatatggcggtggcgggtggggggaagggggagatcctgctgcactggccgcccaagttggggggcgagctcggtggtgacgcgcggccctcacgtgacccagagctgcagagcgacgcagccttcggtgcagtcgtcactcgcgtctggctaccagctccccgctgccctgagctcggcgggctggcattcggcccggggaaaagcggagcaggtctgcgaggctaagtgtctccgcggcgcacctcgcggcgagaatccggaggagaaggagactgcaaggataggcccagaaaaacaaccagaaaaaaaaaatctcatcatggcaaatattcaccaggaaaacgaagagatggagcagcctatgcagaatggagaggaagaccgccctttgggaggaggtgaaggccaccagcctgcaggaaatcgacggggacaggctcgccgacttgcccctaattttcgatgggccatacccaataggcagatcaatgatgggatgggtggagatggagatgatatggaaatattcatggaggagatgagagaaatcagaagaaaacttagggagctgcagttgaggaattgtctgcgtatccttatgggggagctctctaatcaccatgaccatcatgatgaattttgccttatgccttgactcctgccatttatcatgagattaatactgtgattcccgctgttttctttttccttgcattttcctaatatgcctttactgatccgtttgctgtgaaccctatgttatttccatgtgtcaagtgggtcttgtgttgccagcttctatttgaagattgcctttgcactcagtgtaagtttctgtcagcagtagtttcacccatttgcatggaaaaatttaaagctaataaagcaatttaaaaagcaatcta

SEQ ID NO: 102176 - protein, 609 aa, Artificial Sequence
  derived and/or modified sequence
MELGCWTQLGLTFLQLLLISSLPREYTVINEACPGAEWNIMCRECCEYDQIECVCPGKREVVGYTIPCCRNEENECDSCLIHPGCTIFENCKSCRNGSWGGTLDDFYVKGFYCAECRAGWYGGDCMPCSSSPCFHDGTCVLDKAGSYKCACLAGYTGQRCENLLEERNCSDPGGPVNGYQKITGGPGLINGRHAKIGTVVSFFCNNSYVLSGNEKRTCQQNGEWSGKQPICIKACREPKISDLVRRRVLPMQVQSRETPLHQLYSAAFSKQKLQSAPTKKPALPFGDLPMGYQHLHTQLQYECISPFYRRLGSSRRTCLRTGKWSGRAPSCIPICGKIENITAPKTQGLRWPWQAAIYRRTSGVHDGSLHKGAWFLVCSGALVNERTVVVAAHCVTDLGKVTMIKTADLKVVLGKFYRDDDRDEKTIQSLQISAIILHPNYDPILLDADIAILKLLDKARISTRVQPICLAASRDLSTSFQESHITVAGWNVLADVRSPGFKNDTLRSGVVSVVDSLLCEEQHEDHGIPVSVTDNMFCASWEPTAPSDICTAETGGIAAVSFPGRASPEPRWHLMGLVSWSYDKTCSHRLSTAFTKVLPFKDWIERNMK

SEQ ID NO: 102177 - DNA, 1830 bp, Artificial Sequence
  derived and/or modified sequence
atggaactcggctgctggacacagttaggccttacattcctgcagttgctgctgatatcaagcctcccgagggagtacactgtcatcaatgaggcatgccccggtgccgaatggaacatcatgtgcagggagtgttgtgagtacgaccagatcgagtgtgtgtgcccaggtaagagggaggtagtgggatataccataccttgttgcaggaatgaggaaaatgagtgcgactcttgtttgatacatccaggctgtactatttttgaaaactgcaaaagttgtcgaaacgggtcctgggggggaacattggatgacttctatgtcaaaggcttttattgcgcagaatgtagagccggttggtacgggggagactgtatgccatgcagttcgagtccttgcttccacgacgggacctgcgtgctggacaaggcaggaagttataagtgcgcctgtcttgccggatatacaggccagaggtgcgagaatctccttgaggagaggaactgtagcgatccaggcggtccagtcaacggataccaaaaaatcacagggggtccaggcctgatcaatggacgccatgctaagattgggacagtggtgtcattcttctgtaacaacagctatgtgctaagtggcaatgaaaagaggacgtgccaacagaacggtgagtggtcaggaaagcagccaatctgtatcaaagcgtgccgggaaccaaaaatctctgacctggtgcggcgacgcgtcctgcccatgcaagtacaatctagggagactccattgcaccagctctattctgctgccttttcaaaacaaaagctgcagtctgcaccaaccaagaaacccgctctccccttcggagacttaccaatgggataccagcacttgcacacccagctgcagtatgaatgcattagtccattttaccgcagattggggtcctcccgaaggacctgtctccgtactggcaaatggtctggcagggccccttcatgcatcccaatttgcggcaaaatagagaacattaccgctcccaaaacacaagggctgcgatggccttggcaggccgcaatttatcgacggactagcggggtgcacgatgggagcttacataaaggggcatggttcctagtgtgttccggagcactggtaaacgaacgaacggtggtggtggcagcgcactgtgttaccgacttgggcaaggttacaatgattaagaccgcagacttgaaagtggtgctaggaaaattttatcgtgacgacgatcgcgacgagaaaactatccaaagcctgcaaatctctgctatcatcctccaccccaattacgatcccatactcctcgacgcagacatcgctattctgaagttgttggataaggccaggatttcaaccagagtccaacccatctgcttggcagcctctagggatttatcaacttcgttccaggagtcccatatcacagttgccggttggaacgtgcttgctgatgtcagatctcctggtttcaaaaatgatacccttaggtctggcgttgtttctgttgtggacagtctgctgtgtgaagaacagcatgaagatcacggtatccctgtttcagtcacagacaatatgttttgcgcctcctgggaacctactgcccctagcgatatttgcacagcggagacaggaggtattgcagctgtctcgtttcctggcagagcgtctccggagcctcggtggcacctgatgggactcgtgtcctggtcctacgacaaaacctgtagtcacagactaagcacagccttcacaaaagtgcttcccttcaaggattggattgaacggaacatgaagtag

SEQ ID NO: 102178 - DNA, 1830 bp, Artificial Sequence
  derived and/or modified sequence
atggaactgggttgctggacccagctgggcctgacctttctccagctgttattgatttctagcttgccacgcgagtatactgttataaatgaggcatgccccggtgccgaatggaacattatgtgtagagaatgttgtgagtatgatcagattgagtgcgtgtgtcctgggaaacgcgaagtagtgggatatacaattccttgctgtcgaaacgaagaaaatgagtgcgacagctgcctaatccacccaggctgtactatttttgaaaactgcaaatcttgtcggaatgggtcctggggaggaaccctggatgacttttacgtgaagggattctattgcgcggagtgccgagccggctggtacggaggcgactgcatgccatgcagttcttcaccgtgtttccacgacggcacatgtgttctggataaagcaggatcttacaagtgcgcttgtctcgccggttataccggtcaaagatgcgagaacctcctcgaggagaggaactgttccgatcctgggggccccgtcaacggttaccagaaaatcaccggcggacccgggctgataaatggccgccatgctaagatagggaccgttgtgtcgttcttttgcaacaattcttacgtcttatccgggaatgagaaacgcacttgccaacagaacggtgagtggtcaggtaagcagccaatctgcatcaaggcatgccgcgagcccaagatcagtgatctggtgcgccgaagggtcctccctatgcaggtgcagtcaagggagacacccttgcatcaactgtacagtgctgcatttagcaagcagaagctgcagtccgcaccaactaagaaaccagcactgccctttggagatttacccatggggtaccagcacctgcacactcaactacaatacgaatgtatcagccccttctacagacgactaggcagcagccggcgcacatgcctgaggaccggcaagtggagcggtcgagcccccagctgtatcccaatatgtggcaaaatagaaaacatcacagcccctaaaacacaaggccttaggtggccatggcaggcggccatctaccgacgcacctcgggagtgcatgatgggtcactgcataagggtgcgtggtttcttgtttgttccggtgcattggtcaacgaacgcacagtcgtggtcgcagctcactgcgtgacagatttaggcaaggtcactatgattaagaccgccgatcttaaagttgtactcgggaagttctatcgcgatgatgatcgagatgaaaagacaatacaatccctccaaatcagcgccatcatcttacaccctaattacgatcccatcctgcttgatgccgacattgctatcctgaaactgctggataaggcaagaatctcaactcgcgttcagcccatttgcctggccgcctctagagacctctcgacatcttttcaagagagccacatcaccgtcgcagggtggaacgtgctggctgacgtacggagtccaggatttaaaaacgatacactgcgctctggtgttgtctctgtggttgacagcctcctgtgcgaggaacagcacgaggatcatggtatacccgtgagtgtgactgacaacatgttttgcgcctcatgggagccaaccgccccgagcgatatttgtactgccgagacagggggcatcgctgccgtaagttttcccggtcgggcctctcccgagccaaggtggcacttgatggggctagtttcatggagttatgataaaacctgttcccataggctgagcactgcttttaccaaagtactgccctttaaagattggatcgagaggaacatgaagtag

SEQ ID NO: 102179 - DNA, 1830 bp, Artificial Sequence
  derived and/or modified sequence
atggagttgggatgctggacacaattagggcttactttcttgcagcttttacttatatccagcctgcccagagagtacacagtgatcaacgaagcatgcccaggggcggagtggaacatcatgtgcagagaatgctgcgaatacgaccagatcgaatgcgtatgtccgggaaaacgcgaggtcgtggggtatacaatcccttgttgtcgtaacgaggagaacgaatgcgattcttgtctgatacaccctggctgtacaattttcgagaactgtaagagttgtcgtaatgggtcttggggcgggacattagacgatttttatgtaaagggattttattgcgcagagtgcagagcaggatggtatggaggtgattgtatgccatgttcttccagcccttgtttccatgacggtacatgcgtgttagataaagccggctcatataagtgtgcttgcctggcaggttataccggacagaggtgtgaaaaccttctggaggagagaaattgtagcgaccccgggggccccgtcaatggttaccagaaaatcacggggggaccgggcttaatcaacggcaggcacgccaagattggtaccgtggtaagtttcttctgcaacaactcctacgttttgtccggtaatgagaagcgcacctgccagcagaatggggaatggtccggcaaacaaccgatctgtattaaagcatgcagggagccaaaaatttcagacctggtcaggcgcagagtgcttcctatgcaggtccagtccagagaaactccattgcaccagttgtactcagccgcgttttccaagcagaagctccagagtgcacctaccaagaagccagccttgccttttggggatctgccaatgggatatcaacacttacatacacagctccagtacgaatgtattagtccattctacaggaggctcggaagctccaggcgtacatgcctgagaacaggaaaatggtccggtcgcgcccctagctgcatccctatctgtggtaagattgagaatatcactgcccccaaaactcagggactaagatggccgtggcaggccgccatctacagaaggacctctggagtgcatgacggttctttacacaaaggtgcatggtttctggtttgcagcggagcattggtaaatgagcgaactgtcgtagtggctgctcattgcgtgacggaccttggcaaagtcactatgattaagaccgccgatcttaaagttgtactcgggaagttctatcgcgatgatgatcgagatgaaaagacaatacaatccctccaaatcagcgccatcatcttacaccctaattacgatcccatcctgcttgatgccgacattgctatcctgaaactgctggataaggcaagaatctcaactcgcgttcagcccatttgcctggccgcctctagagacctctcgacatcttttcaagagagccacatcaccgtcgcagggtggaacgtgctggctgacgtacggagtccaggatttaaaaacgatacgcttcggagcggtgttgtgagtgtagttgacagccttttgtgtgaagagcagcatgaggaccatggaatccccgtttctgtcaccgataacatgttctgtgcttcttgggagcccactgctccttctgatatctgtacagccgagactggtggcatagcagcagtgagtttcccaggccgggcctccccagaacccagatggcatttaatgggtctggtgtcttggtcatacgacaaaacttgctcccacagactaagcactgcgtttaccaaagtgcttccattcaaggattggattgagcgcaacatgaaatag

SEQ ID NO: 102180 - DNA, 1830 bp, Artificial Sequence
  derived and/or modified sequence
atggagctgggctgctggacccagctgggcctgaccttcctgcagctgctgctgatcagcagcctgcccagagagtacaccgtgatcaacgaggcctgccccggcgccgagtggaacatcatgtgcagagagtgctgcgagtacgaccagatcgagtgcgtgtgccccggcaagagagaggtggtgggctacaccatcccctgctgcagaaacgaggagaacgagtgcgacagctgcctgatccaccccggctgcaccatcttcgagaactgcaagagctgcagaaacggcagctggggcggcaccctggacgacttctacgtgaagggcttctactgcgccgagtgcagagccggctggtacggcggcgactgcatgccctgcagcagcagcccctgcttccacgacggcacctgcgtgctggacaaggccggcagctacaagtgcgcctgcctggccggctacaccggccagagatgcgagaacctgctggaggagagaaactgcagcgaccccggcggccccgtgaacggctaccagaagatcaccggcggccccggcctgatcaacggcagacacgccaagatcggcaccgtggtgagcttcttctgcaacaacagctacgtgctgagcggcaacgagaagagaacctgccagcagaacggcgagtggagcggcaagcagcccatctgcatcaaggcctgcagagagcccaagatcagcgacctggtgagaagaagagtgctgcccatgcaggtgcagagcagagagacccccctgcaccagctgtacagcgccgccttcagcaagcagaagctgcagagcgcccccaccaagaagcccgccctgcccttcggcgacctgcccatgggctaccagcacctgcacacccagctgcagtacgagtgcatcagccccttctacagaagactgggcagcagcagaagaacctgcctgagaaccggcaagtggagcggcagagcccccagctgcatccccatctgcggcaagatcgagaacatcaccgcccccaagacccagggcctgagatggccctggcaggccgccatctacagaagaaccagcggcgtgcacgacggcagcctgcacaagggcgcctggttcctggtgtgcagcggcgccctggtgaacgagagaaccgtggtggtggccgcccactgcgtgaccgacctgggcaaggtgaccatgatcaagaccgccgacctgaaggtggtgctgggcaagttctacagagacgacgacagagacgagaagaccatccagagcctgcagatcagcgccatcatcctgcaccccaactacgaccccatcctgctggacgccgacatcgccatcctgaagctgctggacaaggccagaatcagcaccagagtgcagcccatctgcctggccgccagcagagacctgagcaccagcttccaggagagccacatcaccgtggccggctggaacgtgctggccgacgtgagaagccccggcttcaagaacgacaccctgagaagcggcgtggtgagcgtggtggacagcctgctgtgcgaggagcagcacgaggaccacggcatccccgtgagcgtgaccgacaacatgttctgcgccagctgggagcccaccgcccccagcgacatctgcaccgccgagaccggcggcatcgccgccgtgagcttccccggcagagccagccccgagcccagatggcacctgatgggcctggtgagctggagctacgacaagacctgcagccacagactgagcaccgccttcaccaaggtgctgcccttcaaggactggatcgagagaaacatgaagtag

SEQ ID NO: 102181 - DNA, 1830 bp, Artificial Sequence
  derived and/or modified sequence
atggagttgggctgctggacacagcttggtctcaccttcctccagctcctgctgatcagctcgctccctagagagtacacagtgataaacgaagcatgccccggggccgagtggaatatcatgtgccgggagtgttgcgaatatgaccaaatcgaatgtgtgtgtcccggaaaacgagaagttgtcggctacacgatcccatgctgccgaaatgaggaaaatgaatgcgacagttgtttgatccacccaggatgcaccatctttgagaattgtaaaagctgtcgtaacgggtcgtggggcggcaccttagacgatttttatgtaaaggggttttattgcgcagaatgccgcgctggatggtatggaggggattgtatgccctgctcttcatctccttgtttccatgacggtacctgtgtcctggacaaagccggcagctataagtgtgcctgcttagccggctacacaggccaacggtgcgagaatctgctggaggagcggaactgcagtgatcccggcggtccagtgaatggctaccaaaaaatcaccggaggtcccggactcattaacgggagacacgcaaaaattggcaccgttgtctcattcttctgtaacaatagttacgttctaagcggaaatgaaaagagaacctgtcagcaaaatggagagtggagcggaaagcagcccatatgtataaaagcgtgtcgcgagcctaaaatttcagacctggtacgacggcgcgttctgccaatgcaggtgcagtccagggagactccgctacaccagctttatagtgccgccttcagcaaacagaaacttcagagcgcccccaccaaaaagcccgccctgcccttcggggatttacctatgggataccaacacctccacacccagctgcaatatgaatgcatttctcccttctaccgcaggctcggctcaagccgcagaacctgcctaaggactggaaaatggagcggcagggctccttcatgcatccccatttgcgggaagatcgaaaatattacagcccctaaaacccagggtctccgatggccttggcaggctgctatctaccgcaggacaagtggcgtgcacgatgggagtctccacaaaggagcctggttccttgtgtgttccggcgcccttgtcaatgaaagaactgtcgtggtcgccgcccattgcgttaccgacctgggcaaggtaacaatgatcaagaccgccgacctgaaggtcgtgttagggaaattttacagagatgatgatcgcgacgagaagaccattcaatccctgcaaatttctgccattatactgcacccaaattatgaccccattctcctcgatgccgacatcgctatcctgaaattgctagacaaggccaggatcagtacaagggtacagccaatttgcctggcagcatcccgcgatctgtcaacctcgttccaggagtcacacatcacagtggccggttggaacgtgctagcagatgtgcgttcacccggcttcaagaacgataccctgcgtagcggagtggtgagcgtggttgacagcctgctctgtgaagagcaacacgaagatcacggtattcccgtatccgtgacagacaatatgttctgcgcctcttgggaacctactgcaccttctgacatctgtactgctgagacaggcggaattgctgcggtgagctttcccggccgcgcttctccggaaccgcggtggcatctgatggggttagtgagctggtcttatgataaaacatgcagccaccgcctcagtaccgcctttacaaaagtcctgcccttcaaggattggatcgagcgcaacatgaagtag

SEQ ID NO: 102182 - DNA, 1830 bp, Artificial Sequence
  derived and/or modified sequence
atggagctgggctgctggacccagctgggcctgaccttcctgcagctgctgctgatcagcagcctgccccgggagtacaccgtcatcaatgaggcctgccctggagctgagtggaacatcatgtgccgggagtgctgtgaatatgaccagattgaatgtgtgtgccctgggaagcgggaggtggtgggctacaccatcccctgctgcagaaatgaagaaaatgaatgtgacagctgcctgatccaccctggctgcaccatctttgagaactgcaagagctgcagaaatggctcctggggcggcaccctggatgacttctacgtgaagggcttctactgtgctgaatgtcgggccggctggtatggaggagactgcatgccctgcagcagcagcccctgcttccatgatggcacctgtgtgctggacaaggccggcagctacaagtgtgcctgcctggccggctacacaggccagagatgtgagaacctgctggaggagaggaactgcagcgaccccggcggccctgtgaatggctaccagaagatcactggaggccctggcctcatcaatggaagacatgccaagattggcaccgtggtgtccttcttctgcaacaacagctatgtgctgtctggaaatgagaagaggacctgccagcagaatggagagtggagcggcaagcagcccatctgcatcaaggcctgccgggagcccaagatcagtgacctggtgagaagaagagtgctgcccatgcaggtgcagagccgggagacccccctgcaccagctgtacagcgctgccttcagcaagcagaagctgcagagcgcccccaccaagaagccagccctgccctttggagacctgcccatgggctaccagcacctgcacacccagctgcagtatgagtgcatcagccccttctacagaaggctgggcagcagcaggaggacctgcctgaggacaggcaagtggagcggccgggcccccagctgcatccccatctgtgggaagattgagaacatcacagcccccaagacccagggcctgcgctggccctggcaggccgccatctacagaaggaccagcggcgtgcatgatggcagcctgcacaagggggcctggttcctggtgtgcagcggggccctggtgaatgaaagaacagtggtggtggccgcccactgtgtgacagacctgggcaaggtgaccatgatcaagacagctgacctgaaggtggtgctgggcaagttctacagagatgatgacagagatgagaagaccatccagagcctgcagatcagcgccatcatcctgcaccccaactatgaccccatcctgctggatgctgacatcgccatcctgaagctgctggacaaggcccgcatcagcaccagggtgcagcccatctgcctggccgccagccgggacctgagcaccagcttccaggagagccacatcaccgtggccggctggaatgtgctggctgatgtgcgcagccctggcttcaagaatgacaccctgcggtctggagtggtgtctgtggtggacagcctgctgtgtgaggagcagcacgaggaccacggcatccctgtgtctgtgacagacaacatgttctgtgcctcctgggagcccacagcccccagcgacatctgcacagctgagaccggcggcattgctgctgtgtccttccctggccgggccagccctgagccccgctggcacctgatgggcctggtgtcctggagctatgacaagacctgcagccaccggctgagcacagccttcaccaaggtgctgcccttcaaggactggattgaaagaaacatgaagtag

SEQ ID NO: 102183 - DNA, 2374 bp, Artificial Sequence
  derived and/or modified sequence
gcaccagccgcggcaaggatggagctgggttgctggacgcagttggggctcacttttcttcagctccttctcatctcgtccttgccaagagagtacacagtcattaatgaagcctgccctggagcagagtggaatatcatgtgtcgggagtgctgtgaatatgatcagattgagtgcgtctgccccggaaagagggaagtcgtgggttataccatcccttgctgcaggaatgaggagaatgagtgtgactcctgcctgatccacccaggttgtaccatctttgaaaactgcaagagctgccgaaatggctcatgggggggtaccttggatgacttctatgtgaaggggttctactgtgcagagtgccgagcaggctggtacggaggagactgcatgccatgctcctcatccccttgtttccatgacggcacgtgcgtccttgacaaggctggatcttacaagtgtgcctgcttggcaggctatactgggcagcgctgtgaaaatctccttgaagaaagaaactgctcagaccctgggggcccagtcaatgggtaccagaaaataacagggggccctgggcttatcaacggacgccatgctaaaattggcaccgtggtgtctttcttttgtaacaactcctatgttcttagtggcaatgagaaaagaacttgccagcagaatggagagtggtcagggaaacagcccatctgcataaaagcctgccgagaaccaaagatttcagacctggtgagaaggagagttcttccgatgcaggttcagtcaagggagacaccattacaccagctatactcagcggccttcagcaagcagaaactgcagagtgcccctaccaagaagccagcccttccctttggagatctgcccatgggataccaacatctgcatacccagctccagtatgagtgcatctcacccttctaccgccgcctgggcagcagcaggaggacatgtctgaggactgggaagtggagtgggcgggcaccatcctgcatccctatctgcgggaaaattgagaacatcactgctccaaagacccaagggttgcgctggccgtggcaggcagccatctacaggaggaccagcggggtgcatgacggcagcctacacaagggagcgtggttcctagtctgcagcggtgccctggtgaatgagcgcactgtggtggtggctgcccactgtgttactgacctggggaaggtcaccatgatcaagacagcagacctgaaagttgttttggggaaattctaccgggatgatgaccgggatgagaagaccatccagagcctacagatttctgctatcattctgcatcccaactatgaccccatcctgcttgatgctgacatcgccatcctgaagctcctagacaaggcccgtatcagcacccgagtccagcccatctgcctcgctgccagtcgggatctcagcacttccttccaggagtcccacatcactgtggctggctggaatgtcctggcagacgtgaggagccctggcttcaagaacgacacactgcgctctggggtggtcagtgtggtggactcgctgctgtgtgaggagcagcatgaggaccatggcatcccagtgagtgtcactgataacatgttctgtgccagctgggaacccactgccccttctgatatctgcactgcagagacaggaggcatcgcggctgtgtccttcccgggacgagcatctcctgagccacgctggcatctgatgggactggtcagctggagctatgataaaacatgcagccacaggctctccactgccttcaccaaggtgctgccttttaaagactggattgaaagaaatatgaaatgaaccatgctcatgcactccttgagaagtgtttctgtatatccgtctgtacgtgtgtcattgcgtgaagcagtgtgggcctgaagtgtgatttggcctgtgaacttgggctgtgccagggcttctgacttcagggacaaaactcagtgaagggtgagtagacctccattgctggtaggctgatgccgcgtccactactaggacagccaattggaagatgccagggcttgcaagaagtaagtttcttcaaagaagaccatatacaaaacctctccactccactgacctggtggtcttccccaactttcagttatacgaatgccatcagcttgaccagggaagatctgggcttcatgaggccccttttgaggctctcaagttctagagagctgcctgtgggacagcccagggcagcagagctgggatgtggtgcatgcctttgtgtacatggccacagtacagtctggtccttttccttccccatctcttgtacacattttaataaaataagggttggcttctgaactac

SEQ ID NO: 102184 - DNA, 1830 bp, Artificial Sequence
  derived and/or modified sequence
atggagctgggctgctggacccagctgggcctgaccttcctgcagctgctcttaatctcatctctccctcgggaatatacagttattaatgaggcatgccctggagctgaatggaacatcatgtgcagagagtgctgcgaatacgaccagattgaatgtgtgtgccctggaaagagagaagtggtaggatacaccatcccatgctgtcgtaacgaggaaaacgagtgtgattcatgcttaatccacccgggatgtactatatttgaaaattgtaaatcttgtagaaatgggtcgtggggaggaacccttgacgacttttatgtgaaaggcttctactgtgcagaatgtcgggccgggtggtacggaggggactgtatgccttgctcaagcagtccttgcttccacgacggcacttgtgtgctggataaagctggcagttataaatgcgcttgcctcgctgggtatacaggtcagaggtgtgagaatctactggaggaacggaactgctccgatcctgggggcccagtgaacggatatcagaagataaccggtggcccgggcctgattaatgggcgacacgcgaagatcggaactgtggtgtccttcttctgcaacaacagctatgtcctgagcgggaatgaaaagaggacctgtcagcagaatggagagtggtccgggaagcagccgatatgcatcaaagcttgcagagaaccaaaaatctccgatcttgtgcgtcggcgcgtgctgccgatgcaggttcaatccagagagacgcctctacatcagctctactcagctgcattctccaagcagaaattgcaatcagcccccaccaaaaagcccgctcttcccttcggcgacctgcctatgggctaccagcatctgcacacccagttgcagtacgaatgcatttcgccattttatcggcgcctggggagttccaggagaacctgtctccgcacaggcaagtggtccgggagggccccttcatgtatccccatttgcgggaaaattgagaatatcactgcacccaaaacacaaggtctccgctggccatggcaggctgccatttacaggcgcacaagtggcgttcacgatgggagtctacataagggcgcctggtttctcgtctgctctggcgccctggtgaacgaacggaccgtcgtcgtcgctgcacattgcgtgactgatctggggaaagtaaccatgattaaaaccgcagatctaaaggtagtgttgggtaaattctaccgagacgatgatcgagatgaaaagaccatccagtccttacagatcagcgccattatactccaccctaattacgatcccattttgttagacgccgacatcgccattctaaagctgctagataaggcccgaatcagtacacgcgtgcaacctatttgtctggccgccagccgggacctgagcacctctttccaagagtcacatataactgtggccggatggaacgtcctggctgatgtgcggagcccaggctttaagaacgatacccttagatcgggcgtggtaagtgtcgtggactctctcctgtgtgaagaacaacacgaggatcatggtataccagtgtcggtaacggacaatatgttctgcgcaagttgggaacccacagcccccagcgacatttgtacggcggaaaccggcgggattgccgctgtttcattccccggcagagcctctccagagccaaggtggcatctcatggggcttgtttcttggagttacgacaagacatgttcccacagactgtctaccgcttttactaaagttctgccctttaaagattggatcgaacgcaacatgaaatag

SEQ ID NO: 102185 - RNA, 1830 nt, Artificial Sequence
  derived and/or modified sequence
auggaacuggguugcuggacccagcugggccugaccuuucuccagcuguuauugauuucuagcuugccacgcgaguauacuguuauaaaugaggcaugccccggugccgaauggaacauuauguguagagaauguugugaguaugaucagauugagugcguguguccugggaaacgcgaaguagugggauauacaauuccuugcugucgaaacgaagaaaaugagugcgacagcugccuaauccacccaggcuguacuauuuuugaaaacugcaaaucuugucggaauggguccuggggaggaacccuggaugacuuuuacgugaagggauucuauugcgcggagugccgagccggcugguacggaggcgacugcaugccaugcaguucuucaccguguuuccacgacggcacauguguucuggauaaagcaggaucuuacaagugcgcuugucucgccgguuauaccggucaaagaugcgagaaccuccucgaggagaggaacuguuccgauccugggggccccgucaacgguuaccagaaaaucaccggcggacccgggcugauaaauggccgccaugcuaagauagggaccguugugucguucuuuugcaacaauucuuacgucuuauccgggaaugagaaacgcacuugccaacagaacggugaguggucagguaagcagccaaucugcaucaaggcaugccgcgagcccaagaucagugaucuggugcgccgaaggguccucccuaugcaggugcagucaagggagacacccuugcaucaacuguacagugcugcauuuagcaagcagaagcugcaguccgcaccaacuaagaaaccagcacugcccuuuggagauuuacccaugggguaccagcaccugcacacucaacuacaauacgaauguaucagccccuucuacagacgacuaggcagcagccggcgcacaugccugaggaccggcaaguggagcggucgagcccccagcuguaucccaauauguggcaaaauagaaaacaucacagccccuaaaacacaaggccuuagguggccauggcaggcggccaucuaccgacgcaccucgggagugcaugaugggucacugcauaagggugcgugguuucuuguuuguuccggugcauuggucaacgaacgcacagucguggucgcagcucacugcgugacagauuuaggcaaggucacuaugauuaagaccgccgaucuuaaaguuguacucgggaaguucuaucgcgaugaugaucgagaugaaaagacaauacaaucccuccaaaucagcgccaucaucuuacacccuaauuacgaucccauccugcuugaugccgacauugcuauccugaaacugcuggauaaggcaagaaucucaacucgcguucagcccauuugccuggccgccucuagagaccucucgacaucuuuucaagagagccacaucaccgucgcaggguggaacgugcuggcugacguacggaguccaggauuuaaaaacgauacacugcgcucugguguugucucugugguugacagccuccugugcgaggaacagcacgaggaucaugguauacccgugagugugacugacaacauguuuugcgccucaugggagccaaccgccccgagcgauauuuguacugccgagacagggggcaucgcugccguaaguuuucccggucgggccucucccgagccaagguggcacuugauggggcuaguuucauggaguuaugauaaaaccuguucccauaggcugagcacugcuuuuaccaaaguacugcccuuuaaagauuggaucgagaggaacaugaaguag

SEQ ID NO: 102186 - RNA, 1830 nt, Artificial Sequence
  derived and/or modified sequence
auggaguugggaugcuggacacaauuagggcuuacuuucuugcagcuuuuacuuauauccagccugcccagagaguacacagugaucaacgaagcaugcccaggggcggaguggaacaucaugugcagagaaugcugcgaauacgaccagaucgaaugcguauguccgggaaaacgcgaggucgugggguauacaaucccuuguugucguaacgaggagaacgaaugcgauucuugucugauacacccuggcuguacaauuuucgagaacuguaagaguugucguaaugggucuuggggcgggacauuagacgauuuuuauguaaagggauuuuauugcgcagagugcagagcaggaugguauggaggugauuguaugccauguucuuccagcccuuguuuccaugacgguacaugcguguuagauaaagccggcucauauaagugugcuugccuggcagguuauaccggacagaggugugaaaaccuucuggaggagagaaauuguagcgaccccgggggccccgucaaugguuaccagaaaaucacggggggaccgggcuuaaucaacggcaggcacgccaagauugguaccgugguaaguuucuucugcaacaacuccuacguuuuguccgguaaugagaagcgcaccugccagcagaauggggaaugguccggcaaacaaccgaucuguauuaaagcaugcagggagccaaaaauuucagaccuggucaggcgcagagugcuuccuaugcagguccaguccagagaaacuccauugcaccaguuguacucagccgcguuuuccaagcagaagcuccagagugcaccuaccaagaagccagccuugccuuuuggggaucugccaaugggauaucaacacuuacauacacagcuccaguacgaauguauuaguccauucuacaggaggcucggaagcuccaggcguacaugccugagaacaggaaaaugguccggucgcgccccuagcugcaucccuaucugugguaagauugagaauaucacugcccccaaaacucagggacuaagauggccguggcaggccgccaucuacagaaggaccucuggagugcaugacgguucuuuacacaaaggugcaugguuucugguuugcagcggagcauugguaaaugagcgaacugucguaguggcugcucauugcgugacggaccuuggcaaagucacuaugauuaagaccgccgaucuuaaaguuguacucgggaaguucuaucgcgaugaugaucgagaugaaaagacaauacaaucccuccaaaucagcgccaucaucuuacacccuaauuacgaucccauccugcuugaugccgacauugcuauccugaaacugcuggauaaggcaagaaucucaacucgcguucagcccauuugccuggccgccucuagagaccucucgacaucuuuucaagagagccacaucaccgucgcaggguggaacgugcuggcugacguacggaguccaggauuuaaaaacgauacgcuucggagcgguguugugaguguaguugacagccuuuugugugaagagcagcaugaggaccauggaauccccguuucugucaccgauaacauguucugugcuucuugggagcccacugcuccuucugauaucuguacagccgagacugguggcauagcagcagugaguuucccaggccgggccuccccagaacccagauggcauuuaaugggucuggugucuuggucauacgacaaaacuugcucccacagacuaagcacugcguuuaccaaagugcuuccauucaaggauuggauugagcgcaacaugaaauag

SEQ ID NO: 102187 - protein, 1226 aa, Artificial Sequence
  derived and/or modified sequence
MWGSDRLAGAGGGGAAVTVAFTNARDCFLHLPRRLVAQLHLLQNQAIEVVWSHQPAFLSWVEGRHFSDQGENVAEINRQVGQKLGLSNGGQVFLKPCSHVVSCQQVEVEPLSADDWEILELHAVSLEQHLLDQIRIVFPKAIFPVWVDQQTYIFIQIVALIPAASYGRLETDTKLLIQPKTRRAKENTFSKADAEYKKLHSYGRDQKGMMKELQTKQLQSNTVGITESNENESEIPVDSSSVASLWTMIGSIFSFQSEKKQETSWGLTEINAFKNMQSKVVPLDNIFRVCKSQPPSIYNASATSVFHKHCAIHVFPWDQEYFDVEPSFTVTYGKLVKLLSPKQQQSKTKQNVLSPEKEKQMSEPLDQKKIRSDHNEEDEKACVLQVVWNGLEELNNAIKYTKNVEVLHLGKVWIPDDLRKRLNIEMHAVVRITPVEVTPKIPRSLKLQPRENLPKDISEEDIKTVFYSWLQQSTTTMLPLVISEEEFIKLETKDGLKEFSLSIVHSWEKEKDKNIFLLSPNLLQKTTIQVLLDPMVKEENSEEIDFILPFLKLSSLGGVNSLGVSSLEHITHSLLGRPLSRQLMSLVAGLRNGALLLTGGKGSGKSTLAKAICKEAFDKLDAHVERVDCKALRALNDMIKEFISMGSLVALIATSQSQQSLHPLLVSAQGVHIFQCVQHIQPPNQEQRCEILCNVIKNKLDCDINKFTDLDLQHVAKETGGFVARDFTVLVDRAIHSRLSRQSISTREKLVLTTLDFQKALRGFLPASLRSVNLHKPRDLGWDKIGGLHEVRQILMDTIQLPAKYPELFANLPIRQRTGILLYGPPGTGKTLLAGVIARESRMNFISVKGPELLSKYIGASEQAVRDIFIRAQAAKPCILFFDEFESIAPRRGHDNTGVTDRVVNQLLTQLDGVEGLQGVYVLAATSRPDLIDPALLRPGRLDKCVYCPPPDQVSRLEILNVLSDSLPLADDVDLQHVASVTDSFTGADLKALLYNAQLEALHGMLLSSGLQDGSSSSDSDLSLSSMVFLNHSSGSDDSAGDGECGLDQSLVSLEMSEILPDESKFNMYRLYFGSSYESELGNGTSSDLSSQCLSAPSSMTQDLPGVPGKDQLFSQPPVLRTASQEGCQELTQEQRDQLRADISIIKGRYRSQSGEDESMNQPGPIKTRLAISQSHLMTALGHTRPSISEDDWKNFAELYESFQNPKRRKNQSGTMFRPGQKVTLA

SEQ ID NO: 102188 - protein, 632 aa, Artificial Sequence
  derived and/or modified sequence
MWGSDRLAGAGGGGAAVTVAFTNARDCFLHLPRRLVAQLHLLQNQAIEVVWSHQPAFLSWVEGRHFSDQGENVAEINRQVGQKLGLSNGGQVFLKPCSHVVSCQQVEVEPLSADDWEILELHAVSLEQHLLDQIRIVFPKAIFPVWVDQQTYIFIQIVALIPAASYGRLETDTKLLIQPKTRRAKENTFSKADAEYKKLHSYGRDQKGMMKELQTKQLQSNTVGITESNENESEIPVDSSSVASLWTMIGSIFSFQSEKKQETSWGLTEINAFKNMQSKVVPLDNIFRVCKSQPPSIYNASATSVFHKHCAIHVFPWDQEYFDVEPSFTVTYGKLVKLLSPKQQQSKTKQNVLSPEKEKQMSEPLDQKKIRSDHNEEDEKACVLQVVWNGLEELNNAIKYTKNVEVLHLGKVWIPDDLRKRLNIEMHAVVRITPVEVTPKIPRSLKLQPRENLPKDISEEDIKTVFYSWLQQSTTTMLPLVISEEEFIKLETKDGLKEFSLSIVHSWEKEKDKNIFLLSPNLLQKTTIQVLLDPMVKEENSEEIDFILPFLKLSSLGGVNSLGVSSLEHITHSLLGRPLSRQLMSLVAGLRNGALLLTGGKGSGKSTLAKAICKEAFDKLDAHVERVDCKAL

SEQ ID NO: 102189 - DNA, 3681 bp, Artificial Sequence
  derived and/or modified sequence
atgtgggggagtgaccgcctggctggagcggggggaggcggcgctgctgtaaccgttgcattcaccaatgcccgggattgttttttacatctgccacggcgcctcgtggcacagctgcatttgctccaaaaccaggctatagaagtggtttggagccatcagcccgcctttctatcttgggtagagggacgccatttcagcgaccaaggggagaatgtggccgaaattaatcggcaggtgggtcagaagctggggctctctaatggcgggcaagtattcctcaagccatgttcacatgtggtttcctgtcaacaggtcgaagtggagccactgtctgcagatgattgggaaattctggagctccacgccgtgtccttggagcagcacctgttagaccaaataagaatcgtgtttcctaaagccatctttccagtgtgggttgaccagcagacctatatcttcattcagatcgttgccctgattccggcagctagttatggtcgtctagaaaccgacaccaagctgctgatacagccgaagacacgtcgtgctaaggaaaatacgttcagtaaggcagacgctgagtataagaagctccattcatacggaagagatcagaaagggatgatgaaggaattacagactaaacagcttcagtccaacaccgtgggcattactgaatccaatgagaacgagtcggaaatccccgttgattcctctagcgtggcaagtctgtggactatgatagggtccatcttttcctttcagtcggagaagaagcaggaaacctcatggggtcttaccgagatcaatgcttttaagaacatgcaatcaaaggtagttccattggacaacattttcagggtgtgcaagtctcagccaccatctatctacaacgcatcagcgactagcgtctttcataaacactgcgcaattcacgtctttccatgggatcaagaatactttgatgtggagccatcgttcactgtgacttatgggaaactggttaagctcctgtctcctaagcagcagcaaagcaagaccaagcagaacgtgctttcccccgaaaaggagaagcagatgtcagaacccttagaccagaagaagataagaagcgatcacaacgaagaggatgaaaaggcctgcgtcttacaggttgtttggaacggtctagaagagttgaacaacgccataaaatacaccaaaaacgtggaagttcttcacctggggaaggtttggatacccgacgatctgagaaaaagactgaacatagaaatgcatgcagtcgtgcgaatcaccccagttgaagtcacacccaaaatccctaggtctctcaagctgcagccaagagagaacctgccaaaagacatctctgaggaagatattaaaacagtgttctactcctggctgcagcaatcgacaacaacaatgttacccttagtgattagcgaagaagaattcattaagttggagaccaaggacggactcaaggagtttagcttgagcatcgttcactcatgggagaaagaaaaggataaaaacatcttcttactgagccccaatctgttgcaaaaaaccacgatacaggtactgctggacccaatggttaaggaagagaatagcgaggagattgatttcatcctgcctttccttaagctcagcagcctgggaggagtgaactctttaggtgttagttcacttgagcatatcacacactcactgttgggacgccccctgagtaggcagttgatgagcctggtggccgggctgaggaacggtgctctactccttactggaggcaagggcagtggtaagtccactcttgccaaagccatatgcaaagaagccttcgacaaactggatgcacacgttgagcgcgtcgattgcaaggcactcagagctttgaatgatatgatcaaggagttcatcagcatgggctctctcgtggccttgatcgcgacttcccaatcacagcaaagcctacaccccttgctggtgtcagcacagggcgtgcacatctttcagtgtgtgcagcacattcagccacccaatcaggagcagaggtgtgaaattctgtgcaatgtgattaaaaacaaattggattgcgatatcaacaaatttaccgacctggacctgcagcacgtcgccaaggagacaggaggattcgtggctcgggactttactgtgctcgtggatcgcgctatccacagtaggctgagccgccagagcatcagcactcgagaaaaattggttcttactacactagatttccagaaagcgttgagaggcttccttccagcctctttgcggagcgtcaatcttcataagcctagggacctggggtgggacaaaatcggcggcctgcatgaagtccgccagatcttgatggacaccattcagctgcctgccaaatatccagagctgttcgccaacctcccaatcagacagagaacagggattctgctgtatggaccaccaggcacaggtaaaaccctgctggccggagttatagctcgggagtcacgaatgaatttcatctccgtgaagggaccagaactcctttcgaagtacattggggctagcgagcaagctgttagggacatctttatacgagctcaggctgccaagccctgtattctgttctttgacgagtttgaaagtattgcgccgaggcggggacacgataacaccggggtcactgacagagtggtcaatcaacttctgactcagttagatggtgtggagggcctacagggcgtatatgttctcgccgcaacatctaggcctgacctgatcgatcctgccctcctgcgcccgggtcgcctggacaagtgtgtctactgtcctccaccagaccaagtctcacgactcgagatcttgaacgtgctcagcgactccttgcccctggccgatgatgtcgatctgcagcacgtagcttctgttactgattcattcaccggcgctgacctcaaggcattactctataatgcacagctcgaggctctgcatggaatgttgctgtccagtggcctccaggacggtagcagtagctccgacagcgacctgtcgctgtccagcatggtgttcctgaaccacagctctggaagtgacgatagcgccggcgatggggagtgtggtctcgaccagtcacttgtctccctagagatgtctgaaattcttcctgatgaaagtaaattcaacatgtataggttgtacttcggctcttcctatgagtccgagctgggtaatggtacgagcagtgacctttctagccagtgcctgagcgccccctcttccatgacgcaggaccttccaggagtgcctggaaaggaccagttattttcccagcctcccgtgctccgtacagctagccaggagggttgccaagaactcactcaagaacagagggatcaactccgggcagacatttccatcatcaagggaaggtaccggagccaaagcggggaagatgagagcatgaatcaaccaggtcccatcaagacccgcctggcgatctcacagagccatctcatgaccgccctgggacatactcgaccatcaattagcgaggatgattggaagaatttcgctgaactgtacgaaagttttcagaatccaaagcgtagaaaaaatcaaagcggcactatgtttcgtccgggccagaaggtcacccttgcatag

SEQ ID NO: 102190 - DNA, 1899 bp, Artificial Sequence
  derived and/or modified sequence
atgtgggggagcgaccggttggccggcgctggcggaggcggagcggctgtcacagtcgccttcactaacgctcgcgattgcttccttcatttaccgaggcgccttgtggcacagctccatcttctgcagaatcaggccattgaggtggtgtggagccatcagcctgcattcctatcatgggtggagggtagacactttagcgaccagggggagaacgtggctgaaatcaaccgccaagtgggccagaagctgggactctccaacggtggacaggtgtttctgaaaccttgtagccatgttgtcagctgtcagcaagtggaagttgaaccactctcagccgacgactgggagattctcgagttgcacgctgtgtcactcgaacaacaccttttagaccagatcaggatcgtgtttcccaaggccattttcccagtgtgggtggaccagcagacctatatcttcattcagattgtggccctcattcccgccgcatcctatggccgattggagacggataccaagttgttgattcagcctaagacgcggcgcgctaaagaaaatactttcagtaaggccgatgctgaatacaaaaagctgcattcctacggccgcgaccaaaaaggcatgatgaaagagctgcagacaaagcagttacagtctaatacagtgggcattacagagagcaatgaaaacgagtctgagatcccagtggacagctcctccgttgcttctctgtggactatgatcggcagcatctttagctttcagtcagagaaaaaacaggagacctcctgggggctgaccgaaattaatgcttttaaaaatatgcagtccaaggtcgttcctctggacaatatctttagagtttgcaagagccagcctccaagcatatataacgcttcagccacaagtgtgttccataaacactgtgcaattcatgtgttcccttgggaccaggagtacttcgacgtggaaccttcatttacggtaacatacggaaagctggtcaaactcctgagtccaaagcaacaacagtctaaaactaagcagaacgttctcagtcctgaaaaggagaagcagatgagcgaacctctggatcagaagaagatccgtagcgatcataacgaagaagatgagaaggcatgcgtgttacaagtcgtatggaatggattagaagaactcaacaatgccatcaaatacaccaagaatgtggaagtcctgcatctggggaaagtttggattccagatgacctgaggaaacgcctgaatattgaaatgcatgcagtggtccggatcacgccagtggaggtaactccaaagattccgagaagtctgaagctgcaacccagggaaaatctccccaaggatataagcgaggaggatatcaagactgtcttttacagctggcttcaacagtcgactacgactatgcttccactggtgatttcagaggaggagttcattaagctagaaacaaaagacggtcttaaggagtttagcctgtcgattgtgcacagctgggagaaagagaaggacaagaacattttcctgctgtcccccaacttgctccagaaaaccacaattcaggtgctccttgatcccatggtgaaggaagaaaacagcgaggaaattgacttcattctcccgtttctcaagctcagtagcctaggtggggtgaatagtctgggagtgagtagcttagaacacattacgcattctttactcgggagaccacttagtagacaactgatgtctctcgtcgcgggcctcaggaacggagccctgctcctgacggggggaaagggcagcgggaaatccacgctggcgaaagctatctgtaaagaggcattcgataagctggacgcccacgttgaacgcgttgactgtaaagctctgtag

SEQ ID NO: 102191 - DNA, 3681 bp, Artificial Sequence
  derived and/or modified sequence
atgtggggcagtgaccggctggccggggccggcggcggcggcgctgctgtgacagtggccttcaccaatgcccgggactgcttcctgcacctgccccggcggctggtggcccagctgcacctgctgcagaaccaggccatcgaggtggtgtggagccaccagcctgccttcctgtcctgggtggagggccgccacttcagtgaccagggagaaaatgtggccgagatcaaccggcaggtgggccagaagctgggcctgagcaatggaggccaggtgttcctgaagccctgcagccacgtggtgtcctgccagcaggtggaggtggagcccctgtctgcagatgactgggagatcctggagctgcatgctgtgtccctggagcagcacctgctggaccagatccgcatcgtgttccccaaggccatcttccctgtgtgggtggaccagcagacctacatcttcatccagatcgtggccctgatcccagctgccagctatggccgcctggagacagacaccaagctgctgatccagcccaagacccggcgggccaaggagaacaccttcagcaaggcagatgctgagtacaagaagctgcacagctatggccgggaccagaagggcatgatgaaggagctgcagaccaagcagctgcagagcaacacagtgggcatcacagagagcaatgaaaatgaaagtgagatccctgtggacagcagctctgtggccagcctgtggaccatgattggcagcatcttctccttccagagcgagaagaagcaggagacctcctggggcctgacagagatcaatgccttcaagaacatgcagagcaaggtggtgcccctggacaacatcttccgggtgtgcaagagccagccccccagcatctacaatgccagcgccaccagcgtcttccacaagcactgtgccatccacgtgttcccctgggaccaggagtactttgatgtggagcccagcttcaccgtgacctacggcaagctggtgaagctgctgagccccaagcagcagcagagcaagaccaagcagaatgtgctgagccctgagaaggagaagcagatgtctgagcccctggaccagaagaagatccgcagtgaccacaatgaagaagatgagaaggcctgtgtgctgcaggtggtgtggaatggcctggaggagctgaacaatgccatcaagtacaccaagaatgtggaggtgctgcacctgggcaaggtgtggatcccagatgacctgaggaagaggctgaacatcgagatgcatgctgtggtgcgcatcacccctgtggaggtgacccccaagatccccaggagcctgaagctgcagccccgggagaacctgcccaaggacatcagcgaggaggacatcaagacagtgttctacagctggctgcagcagagcaccaccaccatgctgcccctggtgatcagcgaggaggagttcatcaagctggagaccaaggatggcctgaaggagttcagcctgagcatcgtgcacagctgggagaaggagaaggacaagaacatcttcctgctgagccccaacctgctgcagaagaccaccatccaggtgctgctggaccccatggtgaaggaggagaacagcgaggagattgacttcatcctgcccttcctgaagctgagcagcctgggcggcgtgaacagcctgggcgtgagcagcctggagcacatcacccacagcctgctgggccggcccctgagccggcagctgatgagcctggtggccggcctgagaaatggagccctgctgctgaccggcggcaaaggaagtggcaagagcaccctggccaaggccatctgcaaggaggcctttgacaagctggatgcccacgtggagcgggtggactgcaaggccctgcgggccctgaatgacatgatcaaggagttcatctccatgggcagcctggtggccctgattgccaccagccagagccagcagagcctgcaccccctgctggtgtctgcccagggcgtgcacatcttccagtgtgtgcagcacatccagccccccaaccaggagcagagatgtgagatcctgtgcaacgtcatcaagaacaagctggactgtgacatcaacaagttcacagacctggacctgcagcacgtggccaaggagactggaggctttgtggcccgggacttcaccgtgctggtggaccgggccatccacagccggctgagccggcagagcatcagcacccgggagaagctggtgctgaccaccctggacttccagaaggccctgcggggcttcctgcctgccagcctgcggtctgtgaacctgcacaagccccgggacctgggctgggacaagattggaggcctgcacgaggtgcggcagatcctgatggacaccatccagctgcctgccaagtacccagagctgtttgccaacctgcccatccggcagaggacaggcatcctgctgtatggccccccaggcaccgggaagaccctgctggccggcgtgattgcccgggagagcaggatgaacttcatctctgtgaagggccctgagctgctgagcaagtacatcggggccagcgagcaggccgtgcgggacatcttcatccgggcccaggccgccaagccctgcatcctcttctttgatgaatttgagagcatcgccccccggcggggccatgacaacacaggagtgacagacagagtggtgaaccagctgctgacccagctggatggagtggagggcctgcagggcgtgtatgtgctggccgccaccagcaggccagacctgattgatcctgccctgctgcggcccggccgcctggacaagtgtgtgtactgccccccaccagaccaggtgtcccggctggagatcctgaatgtgctgagtgacagcctgcccctggctgatgatgtggacctgcagcacgtggcctctgtgacagacagcttcaccggggctgacctgaaggccctgctgtacaatgcccagctggaggccctgcacggcatgctgctgagcagcggcctgcaggacggcagcagcagcagtgacagcgacctgagcctgagctccatggtgttcctgaaccacagcagcggcagtgatgattctgctggagatggagaatgtggcctggaccagagcctggtgtccctggagatgtctgagatcctgcctgatgagagcaagttcaacatgtaccgcctgtacttcggcagcagctatgaaagtgagctgggcaatggcaccagcagtgacctgagcagccagtgcctgagcgcccccagctccatgacccaggacctgcccggggtgcctgggaaggaccagctgttcagccagccccctgtgctgaggacagccagccaggagggctgccaggagctgacccaggagcagagggaccagctgcgggctgacatcagcatcatcaagggccgctaccgcagccagagcggggaggatgagagcatgaaccagcccggccccatcaagacccggctggccatcagccagagccacctgatgacagccctgggccacacccggcccagcatcagtgaagatgactggaagaactttgctgagctgtatgagagcttccagaaccccaagaggaggaagaaccagagcggcaccatgttccggcccggccagaaggtgaccctggcctag

SEQ ID NO: 102192 - DNA, 1899 bp, Artificial Sequence
  derived and/or modified sequence
atgtggggcagtgaccggctggccggggccggcggcggcggcgctgctgtgacagtggccttcaccaatgcccgggactgcttcctgcacctgccccggcggctggtggcccagctgcacctgctgcagaaccaggccatcgaggtggtgtggagccaccagcctgccttcctgtcctgggtggagggccgccacttcagtgaccagggagaaaatgtggccgagatcaaccggcaggtgggccagaagctgggcctgagcaatggaggccaggtgttcctgaagccctgcagccacgtggtgtcctgccagcaggtggaggtggagcccctgtctgcagatgactgggagatcctggagctgcatgctgtgtccctggagcagcacctgctggaccagatccgcatcgtgttccccaaggccatcttccctgtgtgggtggaccagcagacctacatcttcatccagatcgtggccctgatcccagctgccagctatggccgcctggagacagacaccaagctgctgatccagcccaagacccggcgggccaaggagaacaccttcagcaaggcagatgctgagtacaagaagctgcacagctatggccgggaccagaagggcatgatgaaggagctgcagaccaagcagctgcagagcaacacagtgggcatcacagagagcaatgaaaatgaaagtgagatccctgtggacagcagctctgtggccagcctgtggaccatgattggcagcatcttctccttccagagcgagaagaagcaggagacctcctggggcctgacagagatcaatgccttcaagaacatgcagagcaaggtggtgcccctggacaacatcttccgggtgtgcaagagccagccccccagcatctacaatgccagcgccaccagcgtcttccacaagcactgtgccatccacgtgttcccctgggaccaggagtactttgatgtggagcccagcttcaccgtgacctacggcaagctggtgaagctgctgagccccaagcagcagcagagcaagaccaagcagaatgtgctgagccctgagaaggagaagcagatgtctgagcccctggaccagaagaagatccgcagtgaccacaatgaagaagatgagaaggcctgtgtgctgcaggtggtgtggaatggcctggaggagctgaacaatgccatcaagtacaccaagaatgtggaggtgctgcacctgggcaaggtgtggatcccagatgacctgaggaagaggctgaacatcgagatgcatgctgtggtgcgcatcacccctgtggaggtgacccccaagatccccaggagcctgaagctgcagccccgggagaacctgcccaaggacatcagcgaggaggacatcaagacagtgttctacagctggctgcagcagagcaccaccaccatgctgcccctggtgatcagcgaggaggagttcatcaagctggagaccaaggatggcctgaaggagttcagcctgagcatcgtgcacagctgggagaaggagaaggacaagaacatcttcctgctgagccccaacctgctgcagaagaccaccatccaggtgctgctggaccccatggtgaaggaggagaacagcgaggagattgacttcatcctgcccttcctgaagctgagcagcctgggcggcgtgaacagcctgggcgtgagcagcctggagcacatcacccacagcctgctgggccggcccctgagccggcagctgatgagcctggtggccggcctgagaaatggagccctgctgctgaccggcggcaaaggaagtggcaagagcaccctggccaaggccatctgcaaggaggcctttgacaagctggatgcccacgtggagcgggtggactgcaaggccctgtag

SEQ ID NO: 102193 - DNA, 3681 bp, Artificial Sequence
  derived and/or modified sequence
atgtggggcagcgaccggctggccggcgccggcggcggcggcgccgcagtgacggtggcattcactaacgcccgggattgttttttacatctgccccggagactggtggcacagttgcatcttcttcaaaaccaggctatagaagtggtgtggtcacaccagccggccttcctgtcttgggtcgaagggagacatttcagtgatcagggggagaacgtcgccgagatcaatcggcaagtggggcagaaactaggattatccaatggagggcaggtgtttctaaagccatgcagccatgtagtgtcctgccagcaagttgaggtcgagcccctgtccgcagacgactgggaaatactggagcttcacgcagtgagcctcgagcaacatctgctggatcagatacgaattgtttttccaaaggccatcttccctgtctgggtagaccaacagacgtacatttttattcagatagtggctctaattcctgccgcttcatatgggaggctggaaactgacactaagctgctcatccagcctaagacgagacgggccaaggaaaacaccttcagcaaagctgacgcagagtataagaagttgcattcatacggacgcgatcagaaagggatgatgaaagagttgcagacaaagcagctacagagcaatacagtgggcatcaccgagtccaacgaaaacgaatcagaaattcccgtcgactctagttcagttgcttctttgtggactatgataggttccatattctcatttcaatcagagaagaagcaggagacatcctggggactgactgagatcaatgcctttaagaatatgcaaagcaaggtggttccactggataatattttcagagtgtgcaagagtcagccgcccagtatatataatgcatctgcaacttcagtcttccacaagcactgtgccattcatgtgtttccgtgggatcaggaatatttcgacgtcgagccatctttcactgtgacatatggcaagctggtcaagctgctgagtcccaagcagcagcagagtaagaccaaacagaacgttctgagcccagagaaggagaaacagatgagcgaacccctggaccagaaaaagatcaggagcgatcacaatgaggaggacgaaaaagcctgcgtcttgcaggtcgtctggaacggcctggaggaactgaataatgctataaaatacaccaagaacgtcgaggtgctgcacctcggcaaggtgtggataccggatgacctgagaaagcggctgaacatagaaatgcatgccgtggttagaatcacccccgttgaggttactccgaagattccaagatccctgaagctacagcctcgagagaacctcccaaaggacatcagcgaagaagacatcaagaccgtgttctacagttggttgcagcagtcaaccaccaccatgctcccactggttatttccgaggaagagttcattaagctggagacaaaggatggcctgaaagaattctccttgtctatcgtccattcatgggagaaggagaaggataaaaacatattcctgctaagtccaaatttgttgcagaagactaccattcaagtcctgttggatccaatggtaaaggaagaaaactcagaagaaatagatttcattttaccatttctgaagttgagttctctcggtggtgtgaatagtctaggagtctcatccctggaacatattactcacagcctcctggggaggcctctgagccgtcagctcatgtcacttgtcgcagggttaaggaacggggccttactgctcaccggcggaaaaggttcaggcaaaagcaccctcgctaaagccatctgtaaggaggccttcgacaagctcgatgcccacgtagagagagtcgactgtaaagcactgcgggctctcaacgatatgataaaggagttcataagcatgggatctctcgtggccctgattgcaacctctcaatctcagcagtctcttcacccactgctggtgtcagctcaaggagtccacatttttcagtgcgtgcaacatatccagccgcctaatcaggaacagcggtgtgaaatcctatgcaacgtcattaagaacaaattagattgcgacatcaataagtttacagacctagatcttcaacacgtggcgaaggaaactggggggttcgttgccagggactttaccgtgctggtcgatcgggcgatccacagtagactcagccgccagtcaatcagtaccagggaaaagctcgttttaacgacactcgatttccaaaaagcactccgcggcttcttaccagctagtcttcggagtgttaacttgcataagcccagagatttggggtgggacaagattggagggttacatgaggtgagacagattctgatggacacaatacagctgcccgcaaaatatccagagttattcgcaaatctgcccattaggcaacgaacagggattctgctttatggcccccctggcacaggtaaaacccttttggccggagtaatagcacgggagtcacgcatgaatttcatctccgtgaaagggcctgaacttctatcaaaatatattggggcatccgaacaggccgttcgcgatatctttatccgtgcccaggccgccaaaccttgcatccttttttttgatgagttcgaatctatagcaccacggagagggcacgacaatactggcgtcacagatagagtcgtaaaccagctccttacacagttagacggtgtggagggcctccaaggtgtttacgtcttggcagcaacttcccggcctgacttaatcgatcctgctctactgaggcccggaaggctggataaatgtgtatattgtcccccgccagatcaagtgagccggctggagatactgaatgtcctcagcgatagtttgcctctcgcagatgatgtcgatctgcagcatgtcgcttctgtgacagattcctttaccggggccgatttgaaggcactgctgtacaacgcgcaactggaagccctgcacgggatgctgttatcctctggactccaagatgggtcctccagctcggatagcgacttatcgctctcgagcatggtcttcttaaaccacagcagtggttctgacgactcagcaggagacggcgaatgtggactcgaccagagcctagtgtctctagagatgtccgaaatcttgcctgacgagtccaagtttaatatgtatcggctctatttcggcagctcctatgagtcggaattaggcaacggcactagctcagaccttagctcacagtgtctttcagcgccctcaagtatgactcaggaccttcctggagtgcccggaaaagatcagctcttttcgcaaccccccgtcctgcgcacagccagccaggagggctgccaagaactgacacaggaacagcgcgatcagctgcgggccgacatatccataatcaaaggtagataccgctcccaatccggcgaagatgaaagcatgaaccaaccaggaccaatcaagacaaggctggcaatttcacagtctcatcttatgaccgccttgggtcacacgcggccatcaataagcgaagatgactggaaaaacttcgccgagctttacgagagcttccaaaaccctaaacgacggaagaatcagtcgggcaccatgtttagaccaggacagaaagtgactcttgcgtag

SEQ ID NO: 102194 - DNA, 1899 bp, Artificial Sequence
  derived and/or modified sequence
atgtggggcagcgaccggctggccggcgccggcggcggcggcgccgccgtcacagttgccttcaccaacgcccgcgattgttttttgcaccttcccaggaggctggttgctcagcttcacctccttcagaaccaggctatagaagttgtgtggtcccaccaacctgcatttctttcatgggtcgagggccgccactttagtgaccaaggagagaatgttgccgagatcaatcgccaggttggacaaaaactggggctctcaaacggtggacaagtgtttctcaagccttgtagccatgtcgtgagctgtcagcaggtggaagtggagccactgtcggctgatgactgggagatcttagagttacacgccgtgagtctggagcaacatctgctggatcagatccgcatcgtctttcctaaggctatattccctgtttgggtcgaccagcaaacctacatcttcattcagatcgttgcgctgatacccgccgctagttacggtagactcgaaacggacaccaagctactaatccaacccaagacaaggagggccaaagagaatacgttttctaaagctgacgctgaatataagaaactccattcatacggtagagatcaaaaaggcatgatgaaggagctgcagacaaagcagttgcaatccaatacagtcggcataacagagtcaaacgagaacgagtcggagatcccggtcgacagttcttccgtggctagtctgtggaccatgatcggttcgatcttctcttttcagagcgaaaaaaagcaagaaaccagctgggggctgaccgagatcaacgctttcaagaatatgcagtctaaggtcgtccccctcgataatatattccgggtttgcaagtcacagcccccatccatttataacgctagcgctactagtgttttccacaaacattgtgctatccacgtgtttccttgggaccaggaatactttgatgtcgagcctagctttacagtcacttatgggaagctggtaaagctgttatcacctaaacaacaacaaagtaaaacaaaacagaacgtcctctctccagagaaagagaagcaaatgagcgaacctctcgatcagaaaaaaatcaggagcgaccacaacgaagaagacgaaaaggcctgcgttctgcaggtggtgtggaacgggcttgaggaactgaataatgccatcaagtatacgaaaaacgtagaggtcctgcatttagggaaagtctggatccccgacgacctcaggaaaaggctgaacatcgaaatgcacgctgtcgtccggatcacgccagtggaggtaacccctaagattccccgctctcttaaactgcagccgcgcgagaatttgccaaaggacatatctgaagaggatattaagactgttttttactcctggttgcagcaatcaacaaccacgatgctcccattagtgatttccgaggaggagttcatcaaattggagacaaaagatggactgaaagaattcagcctgtcgatcgtgcacagctgggaaaaggaaaaggacaaaaacatcttccttctctcgccaaatcttctccagaagaccactatccaggtgctgctggatcctatggtaaaagaagagaactccgaagagatagactttatcctgccctttctcaaattgagtagcttgggaggagttaactccctcggcgtctcctcactggagcatattacccactctctactaggtcggccattgagccggcaactgatgtccctggtcgccggactcaggaacggtgccttgcttctcacgggcggaaaaggaagcggaaaatccacacttgccaaggcgatttgtaaggaagcctttgataaactggatgcgcacgtcgagcgggtcgattgtaaggccctgtag

SEQ ID NO: 102195 - DNA, 3681 bp, Artificial Sequence
  derived and/or modified sequence
atgtggggcagcgatcgcctggcgggtgctgggggaggcggggcggcagtgactgtggccttcaccaacgctcgcgactgcttcctccacctgccgcggcgtctcgtggcccagctgcatctgctgcagaatcaagctatagaagtggtctggagtcaccagcctgcattcttgagctgggtggaaggcaggcattttagtgatcaaggtgaaaatgtggctgaaattaacagacaagttggtcaaaaacttggactctcaaatgggggacaggtatttctcaagccatgttcccatgtggtatcttgtcaacaagttgaggtggaacccctctcagcagatgattgggagatactggagctgcatgctgtttcccttgaacaacatcttctagatcaaattcgaatagtttttccaaaagccatttttcctgtttgggttgatcaacaaacgtacatatttatccaaattgttgcactaataccagctgcctcttatggaaggctggaaactgacaccaaactccttattcagccaaagacacgccgagccaaagagaatacattttcaaaagctgatgctgaatataaaaaacttcatagttatggaagagaccagaaaggaatgatgaaagaacttcaaaccaagcaacttcagtcaaatactgtgggaatcactgaatctaatgaaaacgagtcagagattccagttgactcatcatcagtagcaagtttatggactatgataggaagcattttttcctttcaatctgagaagaaacaagagacatcttggggtttaactgaaatcaatgcattcaaaaatatgcagtcaaaggttgttcctctagacaatattttcagagtatgcaaatctcaacctcctagtatatataacgcgtcagcaacctctgtttttcataaacactgtgccattcatgtatttccatgggaccaggaatattttgatgtagagcccagctttactgtgacatatggaaagctagttaagctactttctccaaagcaacagcaaagtaaaacaaaacaaaatgtgttatcacctgaaaaagagaagcagatgtcagagccactagatcaaaaaaaaattaggtcagatcataatgaagaagatgagaaggcctgtgtgctacaagtagtctggaatggacttgaagaattgaacaatgccatcaaatataccaaaaatgtagaagttctccatcttgggaaagtctggattccagatgacctgaggaagagactaaatatagaaatgcatgccgtagtcaggataactccagtggaagttacccctaaaattccaagatctctaaagttacaacctagagagaatttacctaaagacataagtgaagaagacataaaaactgtattttattcatggctacagcagtctactaccaccatgcttcctttggtaatatcagaggaagaatttattaagctggaaactaaagatggactgaaggaattttctctgagtatagttcattcttgggaaaaagaaaaagataaaaatatttttctgttgagtcccaatttgctgcagaagactacaatacaagtccttctagatcctatggtaaaagaagaaaacagtgaggaaattgactttattcttccttttttaaagctgagctctttgggaggagtgaattccttaggcgtatcctccttggagcacatcactcacagcctcctgggacgccctttgtctcggcagctgatgtctcttgttgcaggacttaggaatggagctcttttactcacaggaggaaagggaagtggaaaatcaactttagccaaagcaatctgtaaagaagcatttgacaaactggatgcccatgtggagagagttgactgtaaagctttacgagctttgaatgatatgataaaagagtttatctccatgggaagtttggttgcactgattgccacaagtcagtctcagcaatctctacatcctttacttgtttctgctcaaggagttcacatatttcagtgcgtccaacacattcagcctcctaatcaggaacaaagatgtgaaattctgtgtaatgtaataaaaaataaattggactgtgatataaacaagttcaccgatcttgacctgcagcatgtagctaaagaaactggcgggtttgtggctagagattttacagtacttgtggatcgagccatacattctcgactctctcgtcagagtatatccaccagagaaaaattagttttaacaacattggacttccaaaaggctctccgcggatttcttcctgcgtctttgcgaagtgtcaacctgcataaacctagagacctgggttgggacaagattggtgggttacatgaagttaggcagatactcatggatactatccagttacctgccaagtatccagaattatttgcaaacttgcccatacgacaaagaacaggaatactgttgtatggtccgcctggaacaggaaaaaccttactagctggggtaattgcacgagagagtagaatgaattttataagtgtcaaggggccagagttactcagcaaatacattggagcaagtgaacaagctgttcgggatatttttattagagcacaggctgcaaagccctgcattcttttctttgatgaatttgaatccattgctcctcggcggggtcatgataatacaggagttacagaccgagtagttaaccagttgctgactcagttggatggagtagaaggcttacagggtgtttatgtattggctgctactagtcgccctgacttgattgaccctgccctgcttaggcctggtcgactagataaatgtgtatactgtcctcctcctgatcaggtgtcacgtcttgaaattttaaatgtcctcagtgactctctacctctggcagatgatgttgaccttcagcatgtagcatcagtaactgactcctttactggagctgatctgaaagctttactttacaatgcccaattggaggccttacatggaatgctgctctcgagtggactccaggatggaagttccagctctgatagtgacctaagtctgtcttcaatggtctttcttaaccatagcagtggctctgacgattcagctggagatggagaatgtggcttagatcagtcccttgtttctttagagatgtccgagatccttccagatgaatcaaaattcaatatgtaccggctctactttggaagctcttatgaatcagaacttggaaatggaacctcttctgatttgagctcacaatgtctctctgcaccaagctccatgactcaggatttgcctggagttcctgggaaagaccagttgttttcacagcctccagtgttaaggacagcttcacaagagggttgccaagaacttacacaagaacaaagagatcaactgagggcagatatcagtattatcaaaggcagataccggagccaaagtggagaggacgaatccatgaaccaaccaggaccaatcaaaaccagactggctattagtcagtcacatttaatgactgcacttggtcacacaagaccatccattagtgaagatgactggaagaattttgctgagctatatgaaagctttcaaaatccaaagaggagaaaaaatcaaagtggaacaatgtttcgacctggacagaaagtaactttagcataa

SEQ ID NO: 102196 - DNA, 3681 bp, Artificial Sequence
  derived and/or modified sequence
atgtggggatccgacaggctggctggcgcaggtgggggtggcgcagcagtcaccgtagctttcaccaacgcacgcgattgttttttgcacctgcctaggcgactcgtggctcaactgcatctacttcagaatcaggccatcgaggtggtgtggtcccatcagccagcctttctgtcctgggttgaaggcagacactttagcgaccaaggggaaaacgtggccgagataaatcggcaagtcggtcagaagctgggattgagtaacggcggacaagtctttttaaagccctgcagccatgtggtgagctgtcagcaggtcgaggtggagccgctgtctgctgacgactgggagattctggaactacatgccgtgtctctcgaacagcacttactggaccagatccggatcgtgttcccaaaggctatctttccagtttgggttgatcagcagacctacatatttatacagatagtagcgttgatccctgccgctagctacggacgcttagagaccgacaccaagctcttgatccagccaaaaacccgccgagcgaaggagaatactttctccaaagccgatgcagaatacaaaaaactccactcatatggtagggaccaaaaggggatgatgaaggagctccagaccaaacagcttcaatctaatactgtgggcatcaccgagtccaatgaaaatgaaagtgaaataccagtggacagtagctccgttgcttcactctggactatgatcggcagcatattctcgttccagtccgaaaaaaaacaagagacctcttggggcctgaccgaaataaatgcgttcaagaacatgcaaagcaaggtggtgcctcttgacaacatctttagggtgtgcaagtcccagccaccttcgatttacaacgcctctgccacctctgtgttccacaaacattgcgccatccatgtgtttccatgggatcaggagtactttgacgtggaaccttcttttaccgtaacttacggaaagttagttaagctgttatctcctaagcagcaacagagtaagactaagcaaaacgtgctctcgcccgagaaggagaagcaaatgtcagagcccttggaccagaaaaaaatcaggtccgaccataacgaggaggacgagaaagcatgcgtcctccaggttgtgtggaacggcctggaagagctcaacaatgcaatcaagtacaccaagaacgtggaagtactccacctcgggaaggtttggatcccagacgatttaagaaagagactcaacattgagatgcacgcagtggtgcgaatcacccctgttgaggtcacgccaaagatccctagatcacttaaacttcaaccaagagagaacctgcctaaggatatctctgaggaagatattaaaacggtcttctactcctggctgcagcaaagcaccaccactatgctgcccctggtgataagcgaggaggaatttatcaaactggagactaaggatgggctgaaggaatttagcctttccattgtgcattcatgggagaaggagaaagacaaaaatatcttccttctcagtccgaatttattgcagaagaccactatccaggtgctcctggacccaatggtgaaggaggagaattccgaggagatcgactttatcctcccatttttaaagttgtccagtttaggaggcgtaaattcactgggggtgtcgtcactcgaacacataacccattccttactgggcaggcctttatcacgacagctaatgagtctcgttgcgggattaaggaatggcgcactgctcctcacagggggaaagggaagcggcaagtctactttggccaaggcaatctgcaaagaggcctttgacaaattagacgcccacgtagagcgtgtagattgtaaggccctgcgtgcccttaacgacatgatcaaggaatttatctcgatgggctccctcgtagccctgatcgccacctcccagagccaacagtcactccacccacttttagtctccgcccaaggtgtccacatatttcagtgcgtccaacatatccagcctcccaatcaagagcagcggtgcgaaatcctttgtaatgtgattaaaaacaagctcgattgcgatattaacaagttcaccgacctggatctccagcacgtggcgaaagagaccggaggtttcgtcgctcgtgattttacagtgctggttgacagagctatccacagcaggctgtccagacagagtatatctaccagagaaaagctggttctgactacccttgatttccaaaaggcactgagggggttcctgcctgcctccctgcgctccgtgaacctgcataaacctcgagacctgggctgggataaaattgggggtctccacgaagtaaggcaaatattgatggacactatacaactgcctgccaaatacccagagttgttcgccaacctccctatcagacagcgcacaggtattctactgtacggcccacccggtactgggaaaaccttactggcaggagtcattgcccgtgaatcccgcatgaattttatctccgtgaaaggcccagaattgctcagtaagtacatcggcgcatccgagcaggctgtgcgggacatcttcatccgcgcacaggccgctaaaccctgcatcctgttcttcgatgagtttgaatccattgcccctcggaggggccatgataacacgggcgtcaccgatcgagttgtgaaccaactgctgacccagctggacggtgtggagggtcttcagggagtgtacgtgctcgctgcaacttcacgcccagacctgatcgatccagcccttctgaggccgggtagactggataaatgtgtgtactgtcctccacccgatcaggtgtcaagactggaaattctcaatgtcctcagtgattccctgcccctcgctgacgatgttgacctccaacacgtcgccagtgtgactgactccttcactggagccgatctgaaggcactgctgtacaatgctcagctggaagcgttacacgggatgctgctgtcgtcaggtctgcaggatggatccagttcatcagatagtgatctgtccttgtcttccatggtattcctgaaccatagtagtgggtctgacgatagcgcaggagacggggagtgcggattggaccagtccctcgtgtcgctcgagatgagtgaaatactgccagatgaaagtaagtttaatatgtatcgcctgtactttgggtcctcttacgaatctgaactgggaaacggtacgtcctcagacctgtcttcacagtgccttagcgctccctctagcatgacccaggatcttcccggagttcccggaaaggatcaactgttttcccaaccccctgtgttgcgtactgcgtcccaggagggctgtcaggagttgactcaagaacaacgcgaccagcttcgagccgatattagcattattaagggcaggtacagatcccagtcaggcgaggatgagtctatgaaccagccaggacctatcaagacacgtcttgcaatctctcagagccacctcatgaccgccctcggtcacacccggccatctatcagtgaagacgactggaagaatttcgcagagctgtatgagtccttccagaatccaaagaggaggaagaatcagagcggcacaatgttcagaccaggacaaaaggtgaccctcgcatag

SEQ ID NO: 102197 - DNA, 1899 bp, Artificial Sequence
  derived and/or modified sequence
atgtggggatcggaccggctggctggcgctggagggggaggcgcagcagtcactgtggccttcactaatgctcgcgattgcttccttcatcttcctaggcgcctggttgcacagctgcacctcttgcagaaccaggctatcgaggtagtctggtctcatcaaccagcattcctgtcatgggtggagggtcgccacttcagcgaccagggagaaaatgtggccgaaatcaatcggcaggtcgggcagaagttgggactcagtaatggcggtcaggtgttcctcaaaccctgtagccacgtggtctcgtgccagcaggtggaggttgagcccctgtccgccgacgactgggaaattctggaactccatgccgtgtcactcgaacagcatctcctagaccagatccggattgtgttccccaaggccatattcccagtctgggtggatcaacagacttatatcttcatccagattgtcgccctcattccagctgcgtcatacggaaggctggagaccgacaccaagctgctcattcagccaaagactaggcgggcaaaggaaaacacgttttcgaaggctgacgctgaatataaaaagctgcactcctatgggcgtgatcagaagggtatgatgaaagaactgcagaccaagcagctgcagtccaacacagtgggaattaccgaaagtaatgagaatgagtcagaaatcccagtggacagctcgtcagttgcaagcttgtggactatgatcggaagcatcttctctttccaaagcgagaaaaagcaggagaccagctggggactcactgaaatcaacgcatttaagaacatgcaatctaaggtggtgcctttagacaacatctttcgcgtctgcaagtcccaaccccctagtatctataacgcgtcggcaacaagcgtgttccataagcactgcgccattcacgttttcccttgggatcaggagtattttgacgtggagcccagcttcactgtcacgtacgggaagctggtcaagcttctcagtccaaagcaacagcagtcaaagaccaagcagaatgtgctgtcacctgaaaaggagaaacaaatgtcggagcccttggatcagaaaaagatcaggagcgaccataatgaggaggatgagaaggcctgtgttctgcaggtggtatggaacggcctggaagagctgaataacgcaattaaatataccaaaaacgtggaagtcttacatctgggaaaggtgtggatccccgacgacttgaggaagagactcaatatagagatgcacgctgtagtgcgaattacccccgtcgaagttacaccaaagatacctcgtagcctgaaactccagcctcgggaaaacctgccaaaggacatctccgaggaggacattaagacagtcttttattcttggctgcagcagagtaccaccacaatgctccctctagtcatttccgaggaggagttcattaagctcgaaacaaaagacgggcttaaggagttcagcttgagtattgttcacagctgggaaaaggaaaaggacaaaaacattttcctactgagtcctaatctgctccagaaaacgaccattcaggtactgctggatcccatggtcaaagaagaaaacagcgaggagattgacttcattcttccattcctcaaactgtcctcccttggtggggttaactccctgggggtgagcagcctggaacatatcacacactccctgctgggtaggcctctgtcaaggcagctcatgtctctggtggcgggactccgcaatggcgctcttttgctcacagggggaaaggggtccggcaagagtactctggcaaaggccatctgtaaggaagctttcgataaattggatgcccatgtcgagcgtgtggactgcaaggccctttag

SEQ ID NO: 102198 - DNA, 3681 bp, Artificial Sequence
  derived and/or modified sequence
atgtggggcagcgacagactggccggcgccggcggcggcggcgccgccgtgaccgtggccttcaccaacgccagagactgcttcctgcacctgcccagaagactggtggcccagctgcacctgctgcagaaccaggccatcgaggtggtgtggagccaccagcccgccttcctgagctgggtggagggcagacacttcagcgaccagggcgagaacgtggccgagatcaacagacaggtgggccagaagctgggcctgagcaacggcggccaggtgttcctgaagccctgcagccacgtggtgagctgccagcaggtggaggtggagcccctgagcgccgacgactgggagatcctggagctgcacgccgtgagcctggagcagcacctgctggaccagatcagaatcgtgttccccaaggccatcttccccgtgtgggtggaccagcagacctacatcttcatccagatcgtggccctgatccccgccgccagctacggcagactggagaccgacaccaagctgctgatccagcccaagaccagaagagccaaggagaacaccttcagcaaggccgacgccgagtacaagaagctgcacagctacggcagagaccagaagggcatgatgaaggagctgcagaccaagcagctgcagagcaacaccgtgggcatcaccgagagcaacgagaacgagagcgagatccccgtggacagcagcagcgtggccagcctgtggaccatgatcggcagcatcttcagcttccagagcgagaagaagcaggagaccagctggggcctgaccgagatcaacgccttcaagaacatgcagagcaaggtggtgcccctggacaacatcttcagagtgtgcaagagccagccccccagcatctacaacgccagcgccaccagcgtgttccacaagcactgcgccatccacgtgttcccctgggaccaggagtacttcgacgtggagcccagcttcaccgtgacctacggcaagctggtgaagctgctgagccccaagcagcagcagagcaagaccaagcagaacgtgctgagccccgagaaggagaagcagatgagcgagcccctggaccagaagaagatcagaagcgaccacaacgaggaggacgagaaggcctgcgtgctgcaggtggtgtggaacggcctggaggagctgaacaacgccatcaagtacaccaagaacgtggaggtgctgcacctgggcaaggtgtggatccccgacgacctgagaaagagactgaacatcgagatgcacgccgtggtgagaatcacccccgtggaggtgacccccaagatccccagaagcctgaagctgcagcccagagagaacctgcccaaggacatcagcgaggaggacatcaagaccgtgttctacagctggctgcagcagagcaccaccaccatgctgcccctggtgatcagcgaggaggagttcatcaagctggagaccaaggacggcctgaaggagttcagcctgagcatcgtgcacagctgggagaaggagaaggacaagaacatcttcctgctgagccccaacctgctgcagaagaccaccatccaggtgctgctggaccccatggtgaaggaggagaacagcgaggagatcgacttcatcctgcccttcctgaagctgagcagcctgggcggcgtgaacagcctgggcgtgagcagcctggagcacatcacccacagcctgctgggcagacccctgagcagacagctgatgagcctggtggccggcctgagaaacggcgccctgctgctgaccggcggcaagggcagcggcaagagcaccctggccaaggccatctgcaaggaggccttcgacaagctggacgcccacgtggagagagtggactgcaaggccctgagagccctgaacgacatgatcaaggagttcatcagcatgggcagcctggtggccctgatcgccaccagccagagccagcagagcctgcaccccctgctggtgagcgcccagggcgtgcacatcttccagtgcgtgcagcacatccagccccccaaccaggagcagagatgcgagatcctgtgcaacgtgatcaagaacaagctggactgcgacatcaacaagttcaccgacctggacctgcagcacgtggccaaggagaccggcggcttcgtggccagagacttcaccgtgctggtggacagagccatccacagcagactgagcagacagagcatcagcaccagagagaagctggtgctgaccaccctggacttccagaaggccctgagaggcttcctgcccgccagcctgagaagcgtgaacctgcacaagcccagagacctgggctgggacaagatcggcggcctgcacgaggtgagacagatcctgatggacaccatccagctgcccgccaagtaccccgagctgttcgccaacctgcccatcagacagagaaccggcatcctgctgtacggcccccccggcaccggcaagaccctgctggccggcgtgatcgccagagagagcagaatgaacttcatcagcgtgaagggccccgagctgctgagcaagtacatcggcgccagcgagcaggccgtgagagacatcttcatcagagcccaggccgccaagccctgcatcctgttcttcgacgagttcgagagcatcgcccccagaagaggccacgacaacaccggcgtgaccgacagagtggtgaaccagctgctgacccagctggacggcgtggagggcctgcagggcgtgtacgtgctggccgccaccagcagacccgacctgatcgaccccgccctgctgagacccggcagactggacaagtgcgtgtactgccccccccccgaccaggtgagcagactggagatcctgaacgtgctgagcgacagcctgcccctggccgacgacgtggacctgcagcacgtggccagcgtgaccgacagcttcaccggcgccgacctgaaggccctgctgtacaacgcccagctggaggccctgcacggcatgctgctgagcagcggcctgcaggacggcagcagcagcagcgacagcgacctgagcctgagcagcatggtgttcctgaaccacagcagcggcagcgacgacagcgccggcgacggcgagtgcggcctggaccagagcctggtgagcctggagatgagcgagatcctgcccgacgagagcaagttcaacatgtacagactgtacttcggcagcagctacgagagcgagctgggcaacggcaccagcagcgacctgagcagccagtgcctgagcgcccccagcagcatgacccaggacctgcccggcgtgcccggcaaggaccagctgttcagccagccccccgtgctgagaaccgccagccaggagggctgccaggagctgacccaggagcagagagaccagctgagagccgacatcagcatcatcaagggcagatacagaagccagagcggcgaggacgagagcatgaaccagcccggccccatcaagaccagactggccatcagccagagccacctgatgaccgccctgggccacaccagacccagcatcagcgaggacgactggaagaacttcgccgagctgtacgagagcttccagaaccccaagagaagaaagaaccagagcggcaccatgttcagacccggccagaaggtgaccctggcctag

SEQ ID NO: 102199 - DNA, 1899 bp, Artificial Sequence
  derived and/or modified sequence
atgtggggcagcgacagactggccggcgccggcggcggcggcgccgccgtgaccgtggccttcaccaacgccagagactgcttcctgcacctgcccagaagactggtggcccagctgcacctgctgcagaaccaggccatcgaggtggtgtggagccaccagcccgccttcctgagctgggtggagggcagacacttcagcgaccagggcgagaacgtggccgagatcaacagacaggtgggccagaagctgggcctgagcaacggcggccaggtgttcctgaagccctgcagccacgtggtgagctgccagcaggtggaggtggagcccctgagcgccgacgactgggagatcctggagctgcacgccgtgagcctggagcagcacctgctggaccagatcagaatcgtgttccccaaggccatcttccccgtgtgggtggaccagcagacctacatcttcatccagatcgtggccctgatccccgccgccagctacggcagactggagaccgacaccaagctgctgatccagcccaagaccagaagagccaaggagaacaccttcagcaaggccgacgccgagtacaagaagctgcacagctacggcagagaccagaagggcatgatgaaggagctgcagaccaagcagctgcagagcaacaccgtgggcatcaccgagagcaacgagaacgagagcgagatccccgtggacagcagcagcgtggccagcctgtggaccatgatcggcagcatcttcagcttccagagcgagaagaagcaggagaccagctggggcctgaccgagatcaacgccttcaagaacatgcagagcaaggtggtgcccctggacaacatcttcagagtgtgcaagagccagccccccagcatctacaacgccagcgccaccagcgtgttccacaagcactgcgccatccacgtgttcccctgggaccaggagtacttcgacgtggagcccagcttcaccgtgacctacggcaagctggtgaagctgctgagccccaagcagcagcagagcaagaccaagcagaacgtgctgagccccgagaaggagaagcagatgagcgagcccctggaccagaagaagatcagaagcgaccacaacgaggaggacgagaaggcctgcgtgctgcaggtggtgtggaacggcctggaggagctgaacaacgccatcaagtacaccaagaacgtggaggtgctgcacctgggcaaggtgtggatccccgacgacctgagaaagagactgaacatcgagatgcacgccgtggtgagaatcacccccgtggaggtgacccccaagatccccagaagcctgaagctgcagcccagagagaacctgcccaaggacatcagcgaggaggacatcaagaccgtgttctacagctggctgcagcagagcaccaccaccatgctgcccctggtgatcagcgaggaggagttcatcaagctggagaccaaggacggcctgaaggagttcagcctgagcatcgtgcacagctgggagaaggagaaggacaagaacatcttcctgctgagccccaacctgctgcagaagaccaccatccaggtgctgctggaccccatggtgaaggaggagaacagcgaggagatcgacttcatcctgcccttcctgaagctgagcagcctgggcggcgtgaacagcctgggcgtgagcagcctggagcacatcacccacagcctgctgggcagacccctgagcagacagctgatgagcctggtggccggcctgagaaacggcgccctgctgctgaccggcggcaagggcagcggcaagagcaccctggccaaggccatctgcaaggaggccttcgacaagctggacgcccacgtggagagagtggactgcaaggccctgtag

SEQ ID NO: 102200 - protein, 160 aa, Artificial Sequence
  derived and/or modified sequence
MSLVAGLRNGALLLTGGKGSGKSTLAKAICKEAFDKLDAHVERVDCKALRGKRLENIQKTLEVAFSEAVWMQPSVVLLDDLDLIAGLPAVPEHEHSPDAVQSQRLAHALNDMIKEFISMGSLVALIATSQSQQSLHPLLVSAQGVHIFQCVQHIQPPNQN

SEQ ID NO: 102201 - protein, 227 aa, Artificial Sequence
  derived and/or modified sequence
MVSDLVIILNYDRAVEAFAKGGNLTLGGNLTVAVGPLGRNLEGNVALRSSAAVFTYCKSRGLFAGVSLEGSCLIERKETNRKFYCQDIRAYDILFGDTPRPAQAEDLYEILDSFTEKYENEGQRINARKAAREQRKSSAKELPPKPLSRPQQSSAPVQLNSGSQSNLNQPIEVTALYSFEGQQPGDLNFQAGDRITVISKTDSHFDWWEGKLRGQTGIFPANYVTMN

SEQ ID NO: 102202 - DNA, 684 bp, Artificial Sequence
  derived and/or modified sequence
atggtgagcgacctggtgatcatcctgaactacgacagagccgtggaggccttcgccaagggcggcaacctgaccctgggcggcaacctgaccgtggccgtgggccccctgggcagaaacctggagggcaacgtggccctgagaagcagcgccgccgtgttcacctactgcaagagcagaggcctgttcgccggcgtgagcctggagggcagctgcctgatcgagagaaaggagaccaacagaaagttctactgccaggacatcagagcctacgacatcctgttcggcgacacccccagacccgcccaggccgaggacctgtacgagatcctggacagcttcaccgagaagtacgagaacgagggccagagaatcaacgccagaaaggccgccagagagcagagaaagagcagcgccaaggagctgccccccaagcccctgagcagaccccagcagagcagcgcccccgtgcagctgaacagcggcagccagagcaacctgaaccagcccatcgaggtgaccgccctgtacagcttcgagggccagcagcccggcgacctgaacttccaggccggcgacagaatcaccgtgatcagcaagaccgacagccacttcgactggtgggagggcaagctgagaggccagaccggcatcttccccgccaactacgtgaccatgaactag

SEQ ID NO: 102203 - DNA, 684 bp, Artificial Sequence
  derived and/or modified sequence
atggtgtccgacctggtgatcatccttaactacgatcgcgccgtggaagcgttcgcgaaaggaggtaacctgaccctggggggtaacctgacggtggcagtggggcctcttggacgcaacctggagggcaacgtggcgctgcggtcatctgccgcggtgttcacttactgcaagtctaggggcctgtttgccggtgtgtctttggaagggagttgcttgattgaacggaaggaaacgaaccgcaagttctactgccaggacattcgcgcctacgacatattgttcggtgataccccaagacccgctcaggccgaggatctgtacgaaatcctggactccttcaccgagaagtatgagaacgagggacagcgaattaacgctcgcaaagccgctagggagcagcggaaatcttccgcaaaggagctgccacctaaaccgctgtcgagacctcagcagtcttccgcccctgttcagctgaactccgggtctcagtccaacctcaatcagccaatagaagtgacagccctgtacagttttgaaggccagcagccaggcgacctcaactttcaggcaggagaccggattactgttataagtaagacagactcacactttgactggtgggaaggaaaactgaggggtcagaccggtatcttcccggccaattatgtcactatgaattag

SEQ ID NO: 102204 - DNA, 684 bp, Artificial Sequence
  derived and/or modified sequence
atggtctccgatctggtcatcattctgaactacgacagggccgtagaggctttcgccaaaggcggcaatttgactttaggagggaatctcaccgttgcggtcggaccactcgggagaaacctcgaaggcaatgtggcactgagaagctccgccgccgtttttacgtactgcaagagccgaggtctgttcgcaggagtcagccttgaaggctcatgtctgattgaacgcaaggaaaccaaccgcaagttttactgccaggacatcagagcctacgatattttgtttggagatactcctagacccgctcaggctgaggatctatacgagatattagattctttcacggaaaaatacgaaaatgaagggcagagaattaacgcaagaaaggcggcgagggagcaaaggaaatcatcggctaaagaattaccccccaaacctctgtctcgcccgcagcagtcctccgcccctgtgcaactgaattcaggctcccagtccaatctgaaccagcccattgaagtgactgccctgtactccttcgagggtcagcaaccaggcgacctcaactttcaggcaggtgacagaatcacagttatcagtaagactgactcgcatttcgattggtgggagggcaaactgagaggccaaacaggaatattccccgctaactacgtgacaatgaactag

SEQ ID NO: 102205 - DNA, 684 bp, Artificial Sequence
  derived and/or modified sequence
atggtgtctgacctggtgatcatcctgaactatgacagagctgtggaggcctttgccaagggcggcaacctgaccctgggcggcaacctgactgtggccgtgggccccctgggcaggaacctggagggcaatgtggccctgcggagcagcgctgctgtgttcacctactgcaagagccggggcctgtttgctggggtgtccctggagggcagctgcctgattgaaaggaaggagaccaacaggaagttctactgccaggacatccgggcctatgacatcctgtttggagacacccccaggcctgcccaggccgaggacctgtatgagatcctggacagcttcacagagaagtatgaaaatgaaggccagaggatcaatgccaggaaggccgcccgggagcagaggaagagcagcgccaaggagctgccccccaagcccctgagccggccccagcagagcagcgcccctgtgcagctgaacagcggcagccagagcaacctgaaccagcccatcgaggtgacagccctgtacagctttgagggccagcagcccggggacctgaacttccaggccggggaccgcatcaccgtcatcagcaagacagacagccactttgactggtgggagggcaagctgcggggccagacaggcatcttccctgccaactacgtgaccatgaactag

SEQ ID NO: 102206 - DNA, 684 bp, Artificial Sequence
  derived and/or modified sequence
atggtgagcgacctggtgatcatcctgaactacgaccgggccgtggaggcttttgcaaaaggtgggaatttgactttaggcggaaatctaacggtggcggtcggaccactaggacgcaatctggagggtaacgtggcgctccgatcatcagcagccgtctttacgtactgcaaatctagaggcctctttgccggcgtgtccctcgaaggatcatgcctgatcgaaaggaaggagaccaatcggaaattttattgccaggatatccgtgcatacgacattctgtttggggacacaccccgacctgcccaggcagaggacctgtacgagatcctggactctttcacagagaagtatgaaaacgaaggtcagagaataaacgcaagaaaggccgcccgtgagcagcggaaaagtagcgccaaggagttacctcccaagcctctgtccagaccccagcagtctagtgctcccgtgcagctcaattccgggtcccagtcaaacctgaaccagccaattgaggtcacagccttgtattcttttgagggccagcagcccggtgacctcaacttccaggccggagaccggattaccgttatatcaaagactgacagccactttgattggtgggaaggaaagctgagggggcagacaggtatatttcctgccaactatgttaccatgaattag

SEQ ID NO: 102207 - DNA, 684 bp, Artificial Sequence
  derived and/or modified sequence
atggtgagcgacctggtgatcatcctgaactacgaccgggccgtggaggccttcgcaaagggtgggaatcttaccttgggcggcaacttaactgtcgcggtgggtccgctaggtagaaacttggagggaaacgtagcactgcgcagttccgctgcagtctttacatattgtaaatcacgagggttgtttgccggggtgagcttggagggtagttgtctcattgaacgaaaagagaccaacagaaaattttactgtcaggatatccgcgcctatgacatactgttcggggacacgcctagaccggcccaggctgaagacctgtatgagatcttagatagttttactgagaaatacgagaacgagggccagagaatcaacgctaggaaggccgcacgagaacagaggaaatcatctgccaaggaactgccccccaagccactgtccaggccgcagcagagcagtgcaccagtgcagttgaactctggctcgcaatctaatttgaatcaacctatcgaagttacagctctttattcttttgaaggacagcaaccgggcgaccttaactttcaggccggagatcgaattactgtgatttcaaagactgattcccatttcgattggtgggaaggtaaactgaggggacagactggcatctttcctgctaactatgtgactatgaattag

SEQ ID NO: 102208 - DNA, 684 bp, Artificial Sequence
  derived and/or modified sequence
atggtctctgatcttgttattattcttaactatgaccgagcggttgaagccttcgccaagggtggaaatctaaccttgggcggaaatttgaccgtggcagtaggacccctcgggcgaaacctcgaaggcaatgtggcgttgcgatcttccgccgcagtttttacatactgcaagtccagagggttgttcgccggagtgtccctagagggttcgtgcctgattgagcgaaaagagacaaacagaaagttctattgccaggacatacgagcctatgatattttgttcggcgatacccctaggcctgcacaggctgaagatctgtacgaaatcctcgacagctttacagagaagtatgaaaacgaagggcagagaattaacgcgaggaaagcagctcgcgagcagcgcaagtcttcggctaaagagctgcctcctaagccactgtcaagacctcagcagtcgagtgcccctgttcaactcaacagcggcagccagagcaacctgaatcagcctatcgaggttacggcactctatagtttcgagggtcagcaacctggcgacctgaatttccaggccggagataggatcacggtgatctccaaaactgattctcactttgactggtgggaaggcaagttacgcggtcaaactggtatatttcccgctaattatgttacaatgaactag

SEQ ID NO: 102209 - DNA, 684 bp, Artificial Sequence
  derived and/or modified sequence
atggtgtccgatctggtgatcattcttaactacgatcgggcagtcgaggcatttgccaaaggtggtaacctgacccttggcggaaatctgaccgtggcggtgggccctttgggacggaacttggagggtaacgtcgccctccggtcatcagcagctgtgtttacatactgtaagtctagggggctctttgccggtgtgtccctcgaagggtcctgtttaatcgaaagaaaagagactaacagaaagttctattgtcaggatataagagcctatgacatcctgttcggcgacacacccagaccggcacaggctgaggatctatacgagattctcgattcgttcacagaaaaatatgagaatgaagggcagcgcatcaatgccagaaaagcggcacgcgagcagcgtaaatcaagcgcaaaagagcttccccctaagcctctgagcaggcctcagcagtcatcagcacctgtgcagctcaactctggcagccagagtaacctgaatcagcccatagaggttaccgctctgtacagtttcgaaggccagcagcctggggatctaaatttccaggcaggagatcggataaccgtaatcagcaagaccgactctcacttcgactggtgggaaggaaagctccgcggacagactggaatctttcccgctaactatgtgacaatgaactag

SEQ ID NO: 102210 - DNA, 3540 bp, Artificial Sequence
  derived and/or modified sequence
aagaggcttcattagtaatgacctgtgtcttcatcagtatgatagaatgggacatcagcactctgatcaggtcatgctctatatgccttatggtacagcagaggaaaaatgggtgagccatcatttgatgctgaggatgggatttgaggcttatgtctaaatttttatttgcatattctttttgttctgacagagaaattcactgcatgtaactatgaccacgcatgattttatcagaagttgattagaatctgtaacattttctgtagttcagctgacacactgaagatgtcctcactgtgaccagccttgtcaacagctggatcacagtgacataagctgtgtctaggatgagtcttgcggtctgcagccgtgtgaggctgcatctgattcccaagtccaatggctctcttcccgtgtttacagatcaggccatgacctttccctacagcaggatgtttgcaagattaactctcaactgaggaatttgcttatttgctctaatactgcttggttgagagagttcaaagtagaaagtcttctgaggggataagattcatgtattatttacagtgcttcagttgcatgtatcagaaaatctagtctaaattgctttaacagaaaaagatgttgctggtccatttgacgaagaagtccagagcggcttgtgacttcagtctggctttgcagagcccaggtgctctctccaccttctgccaggttcccctatgaaggctttgctctcagactctccccttgtggagacaaaaatcccacagcaagtggaaacagaagtgccttggaaaaagttattctggcagctcctatacaagtcccccatcagatgctggtattggaccagctttggttataaagccctgctgtggcaccaaaaggaatgtcgtcctgatacagcagcctcgggtcacccaatccactccagatactatggctgcagcatcaatgtaagcagacaagttgtgctgcctctgaaataaagtagatgaaatattcagcagcagaaagaacaagtttccactccagtgaactaattcaaatgtatccagcatctagatatatgtataaatgtaattaaaacatattgagcatctagagcatctctcccaagataattaccacctgatagtaatggctataaaagctaaaagtggaatcagtctacatgtttcgcaataggaatcaattgaagcatacatcaaaatgcagacagtagtattgatggagtttcgttcttgctgcccaagctggagtgcaatggcgccatctcggctcactgcaacctccaccttccaggttcaagtgattctcctgcctcaggctcctgagtagctgggattacaggcgcacgtcaccacatctggctaattttttgtatttttagtagaaatggggtttcaccatgttagccaggctggtcttgaactcctgacctcaggtgatccccccacctcggcctcccaaattgctgggattacaggtgtgagccaccgtgtccggccataaaacatttttttacaaaaggcttacaaaggaatatttatagcagttttatttgtaatagccaaaagctggaaacaacccaattgtctatcaacagtgactggaaggacaaattgtgctatgtccacacattagaataccagttggcagtcaaaaaggaagagctgatctgtgcagcaatttgagtctcagtaatttcatgtgaataaccctataccttccaatttgaaatcagaagcaaaaaaggctgccaaaatattaagagaattcacagaaataacttccagaaatggacctgataagatcattcctgctcacgtaattgcgaaggctaaaggccttgcaattctgtctgtgatcaaagccgggttcctggtgactgccagaggaggcagcgggattgtagtggcgcgccttccagatggaaaatggtctgcaccctcagccattgggatagctggccttggtggaggatttgaaataggaattgagagactgacgagacacccatgaatgcttccttttctgtaaaatgggacaatgacaggacctgtaaccacacagggttttcctttcaagcacatagatggcacacacgtaatcgagtgccactccagctttcttaggttgccatctgcatgacacatctttctccatccttttactgtcaatctaatggtatcagacttggtgataattctgaattatgaccgtgctgtagaagcttttgcaaaaggcggaaatctgaccctcggagggaacttgactgtggcggttgggcccttgggaaggaacttggaaggaaacgtggccctgagaagctccgctgccgtcttcacgtactgcaagtcaaggggactctttgcaggcgtgtctttagaagggagctgtttgattgaaaggaaagaaactaatagaaaattttattgtcaagatatccgagcttatgacattttatttggagatacaccgcggcctgctcaagccgaagatctttatgaaattcttgattcctttactgaaaagtatgaaaatgaaggacaacgaatcaatgcaagaaaagcagcaagggagcagaggaagtcttctgctaaagaattacctccaaagccattgtcaagaccacagcagtcatctgcaccagtccagctgaactctggctctcaaagcaatttgaatcaacccatagaagtgacagcgctgtattcatttgaaggacagcagcctggggatttgaattttcaagctggagacagaatcacagttatatcaaaaacagattcacattttgattggtgggaaggaaaacttcgaggtcaaactggcatttttccagccaactacgtaaccatgaattaaagcgtatactattttcttctttgagaattacaaaaaaattatttctacactgacaggatttactagttaagcaatgtttaatataaattttaaaaaacttctgttctacaaaatttccattccgtatgtaaaagattttgtttttctatataaaaagagctgactgacatatctttaaatactttgtactaactttatcacacttactgtgtcatagaatatcatacagtttatacgctcatagttctcttgtgaacacttcaaacatcgctaagcatttgatctggccatgtatatggtagctgtgttttaatttgagaatcttgagggtagagccacaaatttcaattcttacatttccatttgcaaagtgactagagaaaaagaaatcagcttaaatgaggtattaagtaatgtttagagtcgtaggtattaactagaatataaatccttagaaattgtctttataccttcaaaaattatactatgcatttatcatagaaatgtgattacaaagaagtctgactaccatgtctttaaacatatggcatctctcaacttttcttccttatggggctacatttgttcatttccagcagtagcataaacttacggtgacatggtagacttgtctctaaataaaatttttaaatgtttact

SEQ ID NO: 102211 - DNA, 1279 bp, Artificial Sequence
  derived and/or modified sequence
agtgcgcctgcggaggcggtcctatgacgtgaataaccctataccttccaatttgaaatcagaagcaaaaaaggctgccaaaatattaagagaattcacagaaataacttccagaaatggacctgataagatcattcctgctcacgtaattgcgaaggctaaaggccttgcaattctgtctgtgatcaaagccgggttcctggtgactgccagaggaggcagcgggattgtagtggcgcgccttccagatggaaaatggtctgcaccctcagccattgggatagctggccttggtggaggatttgaaataggaattgagacacatttacagctacatattccctctgagcattgccctggctgccttccataagtgtggagtgccactccagctttcttaggttgccatctgcatgacacatctttctccatccttttactgtcaatctaatggtatcagacttggtgataattctgaattatgaccgtgctgtagaagcttttgcaaaaggcggaaatctgaccctcggagggaacttgactgtggcggttgggcccttgggaaggaacttggaaggaaacgtggccctgagaagctccgctgccgtcttcacgtactgcaagtcaaggggactctttgcaggcgtgtctttagaagggagctgtttgattgaaaggaaagaaactaatagaaaattttattgtcaagatatccgagcttatgacattttatttggagatacaccgcggcctgctcaagccgaagatctttatgaaattcttgattcctttactgaaaagtatgaaaatgaaggacaacgaatcaatgcaagaaaagcagcaagggagcagaggaagtcttctgctaaagaattacctccaaagccattgtcaagaccacagcagtcatctgcaccagtccagctgaactctggctctcaaagcaatttgaatcaacccatagaagtgacagcgctgtattcatttgaaggacagcagcctggggatttgaattttcaagctggagacagaatcacagttatatcaaaaacagattcacattttgattggtgggaaggaaaacttcgaggtcaaactggcatttttccagccaactacgtaaccatgaattaaagcgtatactattttcttctttgagaattacaaaaaaattatttctacactgacaggatttactagttaagcaatgtttaatataaattttaaaaaacttctgttctacaaaatttccattccgtatgtaaaagattttgttttt

SEQ ID NO: 102212 - DNA, 267 bp, Artificial Sequence
  derived and/or modified sequence
atggccagctgcaccaacagaggcggcctgcccgagaagcacagcagcagcaaggtgagcagccacgcccagatgatccagaaggccgtggacttcctggacctgctgatcggccacctgagcaagttcagccccgtgctgatcgtgttccagttcagccccctgggcttcctggtgagacagagcagcgccgacaacgtgcagttcctgagcttcgcccccagcctgatcctgcccagcggcaccggcaactggctggtgtggtag

SEQ ID NO: 102213 - protein, 246 aa, Artificial Sequence
  derived and/or modified sequence
MVSDLVIILNYDRAVEAFAKGGNLTLGGNLTVAVGPLGRNLEGNVALRSSAAVFTYCKSRGLFAGVSLEGSCLIERKETNRKFYCQDIRAYDILFGDTPRPAQAEDLYEILDSFTEKYENEGQRINARKAAREQRKSSAKELPPKPLSRPQQSSAPVQLNSGSQSNRNEYKLYPGLSSYHERVGNLNQPIEVTALYSFEGQQPGDLNFQAGDRITVISKTDSHFDWWEGKLRGQTGIFPANYVTMN

SEQ ID NO: 102214 - DNA, 741 bp, Artificial Sequence
  derived and/or modified sequence
atggtgagcgacctggtgatcatcctgaactacgacagagccgtggaggccttcgccaagggcggcaacctgaccctgggcggcaacctgaccgtggccgtgggccccctgggcagaaacctggagggcaacgtggccctgagaagcagcgccgccgtgttcacctactgcaagagcagaggcctgttcgccggcgtgagcctggagggcagctgcctgatcgagagaaaggagaccaacagaaagttctactgccaggacatcagagcctacgacatcctgttcggcgacacccccagacccgcccaggccgaggacctgtacgagatcctggacagcttcaccgagaagtacgagaacgagggccagagaatcaacgccagaaaggccgccagagagcagagaaagagcagcgccaaggagctgccccccaagcccctgagcagaccccagcagagcagcgcccccgtgcagctgaacagcggcagccagagcaacagaaacgagtacaagctgtaccccggcctgagcagctaccacgagagagtgggcaacctgaaccagcccatcgaggtgaccgccctgtacagcttcgagggccagcagcccggcgacctgaacttccaggccggcgacagaatcaccgtgatcagcaagaccgacagccacttcgactggtgggagggcaagctgagaggccagaccggcatcttccccgccaactacgtgaccatgaactag

SEQ ID NO: 102215 - DNA, 741 bp, Artificial Sequence
  derived and/or modified sequence
atggtttccgaccttgtgataatcctgaattacgatagggcagttgaggctttcgcaaaaggaggcaatctgaccctcggtgggaatctgacagtcgccgtgggcccactgggccggaatctggaaggcaacgtggcactgcgaagcagtgcagctgtgtttacctactgcaaaagccgaggtctttttgccggggtgtccctggagggatcatgtctgatcgaacgcaaagagaccaatcggaaattctattgccaggatattagggcctacgatatcctctttggcgacacgccgcgccctgcacaagctgaagacctttatgagattctcgattcttttaccgagaaatacgagaatgaggggcagcgcatcaacgcacggaaggccgctcgcgagcagaggaagagcagcgccaaggaactgcccccaaagccactctcccgccctcaacagtcctccgccccggtacagctgaatagcggatctcagagcaaccgtaatgaatataagctataccctgggttatcgtcataccatgagagagtgggtaacctcaaccaaccaattgaagtaaccgctttatatagcttcgaggggcaacagccgggtgacttgaatttccaagcaggcgacagaataaccgtcatctcaaaaactgattcccactttgactggtgggaaggcaagcttagaggtcagacaggaattttcccggccaactacgtgacaatgaactag

SEQ ID NO: 102216 - DNA, 741 bp, Artificial Sequence
  derived and/or modified sequence
atggtgtctgacctggtgatcatcctgaactatgacagagctgtggaggcctttgccaagggcggcaacctgaccctgggcggcaacctgactgtggccgtgggccccctgggcaggaacctggagggcaatgtggccctgcggagcagcgctgctgtgttcacctactgcaagagccggggcctgtttgctggggtgtccctggagggcagctgcctgattgaaaggaaggagaccaacaggaagttctactgccaggacatccgggcctatgacatcctgtttggagacacccccaggcctgcccaggccgaggacctgtatgagatcctggacagcttcacagagaagtatgaaaatgaaggccagaggatcaatgccaggaaggccgcccgggagcagaggaagagcagcgccaaggagctgccccccaagcccctgagccggccccagcagagcagcgcccctgtgcagctgaacagcggcagccagagcaacagaaatgagtacaagctgtacccaggcctgagcagctaccacgagcgggtgggcaacctgaaccagcccatcgaggtgacagccctgtacagctttgagggccagcagcccggggacctgaacttccaggccggggaccgcatcaccgtcatcagcaagacagacagccactttgactggtgggagggcaagctgcggggccagacaggcatcttccctgccaactacgtgaccatgaactag

SEQ ID NO: 102217 - DNA, 741 bp, Artificial Sequence
  derived and/or modified sequence
atggtgagcgacctggtgatcatcctgaactacgaccgggccgtggaagccttcgccaaaggtggtaatcttactctaggcggtaacctaacagtggcagtcggccctctgggccgtaacctggaaggcaatgtggctctaaggagtagtgccgccgtcttcacttactgcaaaagccgaggtctgttcgcgggcgtgtccttagagggctcgtgtctcatcgagaggaaagagactaataggaaattctattgtcaggacatcagggcctatgatattctgtttggcgatacgccccgccccgcacaagctgaggacctgtatgaaattctggattcctttactgagaaatacgagaacgaggggcagcggataaatgctcgaaaagcagctcgggaacagcgtaagtcctccgccaaagagctgcccccaaaacccctaagcaggccccagcagagtagtgcccccgtgcagctcaattcaggatcccagtcaaatcggaacgagtacaagctttaccccggattgtcctcatatcatgagcgcgttgggaatttaaaccagcccattgaagtaaccgccctgtattctttcgaggggcagcagccaggggacctgaattttcaggcgggagatcgcattactgtaataagcaaaacagattcgcacttcgactggtgggaaggcaagctccggggtcagacaggaatcttccctgccaactacgtgacaatgaattag

SEQ ID NO: 102218 - DNA, 741 bp, Artificial Sequence
  derived and/or modified sequence
atggtgagcgacctggttattatcttgaactatgacagggccgtggaagcgttcgcaaaggggggaaacttaacgctgggaggcaacctgactgtggcggttggtcctcttgggcgaaacctggagggcaatgttgccctccgcagctccgctgccgtgttcacctactgcaagtcccgcggtctgtttgctggcgtgtccctggaaggaagttgcttgattgagaggaaggaaactaaccgaaaattctattgtcaagatatccgggcatatgacattctattcggggatacaccaagaccagcccaggcagaggatctctacgagatcttggacagtttcaccgagaagtacgaaaacgaaggccagcgcattaatgcccgaaaggctgctcgcgagcagaggaagagtagtgccaaggaactacccccaaagcccctttcacgccctcagcagtcttccgcaccggttcaactaaacagcgggagtcagtcgaaccgtaatgaatataagctttatccaggtctgagctcataccacgaacgggtgggcaatctgaatcagccaatcgaggtgaccgcactgtatagcttcgaaggacagcagcccggagacctgaatttccaggccggagaccgtattactgtgataagcaaaactgatagtcattttgactggtgggagggtaaacttcgtgggcagactgggatctttcccgcaaactatgtgaccatgaattag

SEQ ID NO: 102219 - DNA, 1414 bp, Artificial Sequence
  derived and/or modified sequence
atggtatcagacttggtgataattctgaattatgaccgtgctgtagaagcttttgcaaaaggcggaaatctgaccctcggagggaacttgactgtggcggttgggcccttgggaaggaacttggaaggaaacgtggccctgagaagctccgctgccgtcttcacgtactgcaagtcaaggggactctttgcaggcgtgtctttagaagggagctgtttgattgaaaggaaagaaactaatagaaaattttattgtcaagatatccgagcttatgacattttatttggagatacaccgcggcctgctcaagccgaagatctttatgaaattcttgattcctttactgaaaagtatgaaaatgaaggacaacgaatcaatgcaagaaaagcagcaagggagcagaggaagtcttctgctaaagaattacctccaaagccattgtcaagaccacagcagtcatctgcaccagtccagctgaactctggctctcaaagtaacagaaatgaatataagctctatcctggactttccagctatcatgagagagttggcaatttgaatcaacccatagaagtgacagcgctgtattcatttgaaggacagcagcctggggatttgaattttcaagctggagacagaatcacagttatatcaaaaacagattcacattttgattggtgggaaggaaaacttcgaggtcaaactggcatttttccagccaactacgtaaccatgaattaaagcgtatactattttcttctttgagaattacaaaaaaattatttctacactgacaggatttactagttaagcaatgtttaatataaattttaaaaaacttctgttctacaaaatttccattccgtatgtaaaagattttgtttttctatataaaaagagctgactgacatatctttaaatactttgtactaactttatcacacttactgtgtcatagaatatcatacagtttatacgctcatagttctcttgtgaacacttcaaacatcgctaagcatttgatctggccatgtatatggtagctgtgttttaatttgagaatcttgagggtagagccacaaatttcaattcttacatttccatttgcaaagtgactagagaaaaagaaatcagcttaaatgaggtattaagtaatgtttagagtcgtaggtattaactagaatataaatccttagaaattgtctttataccttcaaaaattatactatgcatttatcatagaaatgtgattacaaagaagtctgactaccatgtctttaaacatatggcatctctcaacttttcttccttatggggctacatttgttcatttccagcagtagcataaacttacggtgacatggtagacttgtctctaaataaaatttttaaatgtttactaagttaatatttc

SEQ ID NO: 102220 - protein, 532 aa, Artificial Sequence
  derived and/or modified sequence
MAKRVAIVGAGVSGLASIKCCLEEGLEPTCFERSDDLGGLWRFTEHVEEGRASLYKSVVSNSCKEMSCYSDFPFPEDYPNYVPNSQFLEYLKMYANHFDLLKHIQFKTKVCSVTKCSDSAVSGQWEVVTMHEEKQESAIFDAVMVCTGFLTNPYLPLDSFPGINAFKGQYFHSRQYKHPDIFKDKRVLVIGMGNSGTDIAVEASHLAEKVFLSTTGGGWVISRIFDSGYPWDMVFMTRFQNMLRNSLPTPIVTWLMERKINNWLNHANYGLIPEDRTQLKEFVLNDELPGRIITGKVFIRPSIKEVKENSVIFNNTSKEEPIDIIVFATGYTFAFPFLDESVVKVEDGQASLYKYIFPAHLQKPTLAIIGLIKPLGSMIPTGETQARWAVRVLKGVNKLPPPSVMIEEINARKENKPSWFGLCYCKALQSDYITYIDELLTYINAKPNLFSMLLTDPHLALTVFFGPCSPYQFRLTGPGKWEGARNAIMTQWDRTFKVIKARVVQESPSPFESFLKVFSFLALLVAIFLIFL

SEQ ID NO: 102221 - DNA, 2160 bp, Artificial Sequence
  derived and/or modified sequence
cgctacagaagattcaaactgagcaaatcgcctaatcttccaaattctttttcctggcttgttagagcagccaagggtggggtggagcttgtgaataaaaagcctgcttcatcttcctcatgcaggagaacatggccaagcgagttgccattgtgggagctggggtcagcggcctggcctccatcaagtgctgtctggaagaaggactggagcccacctgctttgagaggagcgatgaccttggggggctgtggagattcaccgaacatgttgaagaaggcagagccagtctctacaagtctgtggtttccaacagctgcaaggagatgtcttgttactcagactttccattcccagaagattatccaaactatgtgccaaattctcaattcctggaatatctcaaaatgtatgcaaaccactttgaccttctgaaacacattcaattcaagaccaaagtctgcagtgtaacaaaatgctcagattctgctgtctctggccaatgggaggtggtcactatgcatgaagagaagcaagagtcagccatctttgatgctgtcatggtctgcactggctttcttactaatccttatttgccactggattcctttccaggtattaatgcctttaaaggccagtactttcatagccggcaatataagcatccagatatatttaaggacaagagagtccttgtgattggaatgggaaattctggcacagacattgctgtggaggccagccacctggcggaaaaggtgttcctcagcaccaccggagggggatgggtgatcagccgaatctttgactcgggctacccatgggacatggtgttcatgacacgctttcagaacatgttgagaaattccctcccaaccccaattgtgacttggttgatggagcgaaagataaacaactggctcaatcatgcaaattacggcttaataccagaagacaggactcagctgaaagagtttgtgctaaatgatgagctcccaggacgcatcatcactgggaaagtgttcatcaggccaagcataaaagaggtaaaggaaaactctgtcatatttaacaatacttcaaaggaagagcctattgacatcattgtctttgccactggatacacatttgctttccccttccttgatgagtctgtagtgaaagttgaagatggccaggcctcactgtacaagtatatcttccctgcacatctgcaaaagccaaccctggccattattggcctcatcaaacccttgggctccatgatacctacaggagaaacacaagctcggtgggctgttcgagtcctgaaaggtgtaaataagttaccaccaccaagtgtcatgatagaggaaattaatgcaaggaaagaaaacaagcccagttggtttggcttgtgctactgcaaggctttacaatcagattatatcacatacatagatgaactcctgacctatatcaatgcaaaacccaacctgttctctatgctcctaacggatccacatctggctctgaccgtcttctttggcccatgctcaccataccagttccgcttgactggcccaggaaaatgggaaggagccagaaatgccatcatgacccagtgggaccgaacattcaaggtcatcaaagctcgagttgtacaagagtctccatctccctttgaaagttttcttaaagtctttagctttctggctttgcttgtggctatttttctgattttcctataagtaaaagatctcctaaatggaagatgcacagagtagatttacaatgctccaattcctctcttacagcaatattgccttcacagttataaactgtattcaaatagtaaaggccaccctctcgcttccctggctggccccagggctaccactggtattcctgagcctctcccagctccacttctaatgctagagaatgataactaagacttctgtgcatttgaaggttgttggaaagttacaggttcattttagaaagaaagctgttcttgacagcactctgagccatcatacctctttcccatataaactattttcacagatctcaactaaaaccccttacttcacaaatgattgtgttgtgctgaaatggtgctcttatagtactggcttattaaaagtaaaaaataaacctaaaaattgattgttttaa

SEQ ID NO: 102222 - DNA, 2155 bp, Artificial Sequence
  derived and/or modified sequence
aggtttatccactgtgctggggactcccaagccagcactggctcatactgattcattttgatctctgctaataccagagtcctgcgtggcagagccattggcaccagaaattacaagagaacatggccaagcgagttgccattgtgggagctggggtcagcggcctggcctccatcaagtgctgtctggaagaaggactggagcccacctgctttgagaggagcgatgaccttggggggctgtggagattcaccgaacatgttgaagaaggcagagccagtctctacaagtctgtggtttccaacagctgcaaggagatgtcttgttactcagactttccattcccagaagattatccaaactatgtgccaaattctcaattcctggaatatctcaaaatgtatgcaaaccactttgaccttctgaaacacattcaattcaagaccaaagtctgcagtgtaacaaaatgctcagattctgctgtctctggccaatgggaggtggtcactatgcatgaagagaagcaagagtcagccatctttgatgctgtcatggtctgcactggctttcttactaatccttatttgccactggattcctttccaggtattaatgcctttaaaggccagtactttcatagccggcaatataagcatccagatatatttaaggacaagagagtccttgtgattggaatgggaaattctggcacagacattgctgtggaggccagccacctggcggaaaaggtgttcctcagcaccaccggagggggatgggtgatcagccgaatctttgactcgggctacccatgggacatggtgttcatgacacgctttcagaacatgttgagaaattccctcccaaccccaattgtgacttggttgatggagcgaaagataaacaactggctcaatcatgcaaattacggcttaataccagaagacaggactcagctgaaagagtttgtgctaaatgatgagctcccaggacgcatcatcactgggaaagtgttcatcaggccaagcataaaagaggtaaaggaaaactctgtcatatttaacaatacttcaaaggaagagcctattgacatcattgtctttgccactggatacacatttgctttccccttccttgatgagtctgtagtgaaagttgaagatggccaggcctcactgtacaagtatatcttccctgcacatctgcaaaagccaaccctggccattattggcctcatcaaacccttgggctccatgatacctacaggagaaacacaagctcggtgggctgttcgagtcctgaaaggtgtaaataagttaccaccaccaagtgtcatgatagaggaaattaatgcaaggaaagaaaacaagcccagttggtttggcttgtgctactgcaaggctttacaatcagattatatcacatacatagatgaactcctgacctatatcaatgcaaaacccaacctgttctctatgctcctaacggatccacatctggctctgaccgtcttctttggcccatgctcaccataccagttccgcttgactggcccaggaaaatgggaaggagccagaaatgccatcatgacccagtgggaccgaacattcaaggtcatcaaagctcgagttgtacaagagtctccatctccctttgaaagttttcttaaagtctttagctttctggctttgcttgtggctatttttctgattttcctataagtaaaagatctcctaaatggaagatgcacagagtagatttacaatgctccaattcctctcttacagcaatattgccttcacagttataaactgtattcaaatagtaaaggccaccctctcgcttccctggctggccccagggctaccactggtattcctgagcctctcccagctccacttctaatgctagagaatgataactaagacttctgtgcatttgaaggttgttggaaagttacaggttcattttagaaagaaagctgttcttgacagcactctgagccatcatacctctttcccatataaactattttcacagatctcaactaaaaccccttacttcacaaatgattgtgttgtgctgaaatggtgctcttatagtactggcttattaaaagtaaaaaataaacctaaaaattgattgttttaagtga

SEQ ID NO: 102223 - DNA, 757 bp, Artificial Sequence
  derived and/or modified sequence
aggtttatccactgtgctggggactcccaagccagcactggctcatactgattcattttgatctctgctaataccagagtcctgcgtggcagagccattggcaccagaaattacaagtacgtaaagagaacatggccaagcgagttgccattgtgggagctggggtcagcggcctggcctccatcaagtgctgtctggaagaaggactggagcccacctgctttgagaggagcgatgaccttggggggctgtggagattcaccgaacatgttgaagaaggcagagccagtctctacaagtctgtggtttccaacagctgcaaggagatgtcttgttactcagactttccattcccagaagattatccaaactatgtgccaaattctcaattcctggaatatctcaaaatgtatgcaaaccactttgaccttctgaaacacattcaattcaagaccaaagtctgcagtgtaacaaaatgctcagattctgctgtctctggccaatgggaggtggtcactatgcatgaagagaagcaagagtcagccatctttgatgctgtcatggtctgcactggctttcttactaatccttatttgccactggattcctttccaggtattaatgcctttaaaggccagtactttcatagccggcaatataagcatccagatatatttaaggacaagagagtccttgtgattggaatgggaaattctggcacagacattgctgtggaggccagccacctggcggaaaa

SEQ ID NO: 102224 - DNA, 1599 bp, Artificial Sequence
  derived and/or modified sequence
atggccaaacgcgtcgccattgtgggagcaggggtctcaggactggcatcgattaagtgttgccttgaagaggggcttgagcccacatgcttcgagcggtccgacgacttgggtggactttggcgattcactgaacacgtggaagaagggagggccagtctgtataaatctgtcgtatctaactcatgcaaggaaatgtcctgttattcagattttccattccccgaggattatcctaattatgtcccaaactcacagtttttggaatatttgaagatgtatgcaaaccactttgacctgctgaaacatatacaattcaaaacaaaggtttgtagtgttaccaagtgcagtgactcagcagtgagcggacagtgggaagtggtcaccatgcacgaggaaaaacaggagtctgccatttttgatgctgtgatggtctgcacaggcttcttgacaaacccatatctgcccctggattccttcccaggtatcaacgcattcaagggtcagtattttcactcaagacagtataagcaccctgatattttcaaggacaagagggtgctcgtgatcggcatgggcaattcaggcacagatatcgccgtggaggcgagtcatctcgccgaaaaagtgttcctatctactacagggggaggctgggttatttcacgtatatttgatagcggttatccctgggatatggtatttatgaccagatttcaaaacatgctacgcaatagcctgcctaccccaatagtgacctggctgatggagagaaaaataaacaattggctgaatcatgccaactacggcctgattcccgaggacagaacacaactgaaagaatttgtcttgaacgacgagttgcctggccggattatcactgggaaagtcttcattagaccttccatcaaagaagtaaaggaaaactctgtgatcttcaataatacaagcaaagaagagcccatcgatataatagtttttgccaccggatacacttttgccttcccgttcctggacgaaagcgtggtcaaggtcgaggacggccaggctagcttgtataagtacatatttcccgcgcatctacagaagccgacactggccatcattgggttgatcaaaccgctggggtccatgattcccaccggcgagacacaggctagatgggcagtgcgcgttctgaagggggtcaacaagttgccacctccttcagtgatgatcgaggagataaacgcaaggaaggagaataagccaagttggtttggcctatgttactgtaaggccctccagtccgactatatcacctatatagatgaactcctcacatacatcaatgctaagcctaacctttttagcatgttgctgaccgacccacacctggccctgacggtgttcttcggaccatgttcaccgtatcagtttaggctgacaggcccggggaagtgggaaggtgcccgtaatgcaattatgacccagtgggatcggaccttcaaggtgattaaggccagagttgtacaagagtccccaagtccatttgagtcctttctcaaagtgttttcatttctcgctctgctggtggcaatttttctgatctttctatag

SEQ ID NO: 102225 - DNA, 1599 bp, Artificial Sequence
  derived and/or modified sequence
atggctaaaagggtagctatcgttggcgcaggggtgtctggcctcgcgtccatcaagtgttgcctcgaggagggcctggagccaacctgtttcgaacgcagcgatgatctggggggtctctggcgattcaccgagcatgtggaagaggggagagccagcctgtacaagagtgttgtttcaaatagctgcaaagaaatgtcttgctacagtgactttccattccctgaagactaccctaactacgtccctaactcgcagtttcttgagtatctgaagatgtacgccaaccattttgacctcctcaagcacattcagttcaaaacgaaggtctgttccgtcaccaagtgttcagactccgccgtgagcgggcagtgggaagttgtcaccatgcacgaggagaagcaggagtcggccatatttgacgctgtcatggtgtgcaccggcttcctcacaaacccatacctgcctcttgactccttccccgggattaatgcctttaaggggcaatactttcattccagacagtataagcatccagacatcttcaaggataaacgggtgcttgtcataggcatgggaaactccggcacggacattgctgtggaggccagtcacctggcagaaaaagtgttccttagcacgacaggtggagggtgggtgatatcccggatcttcgactcaggatatccctgggacatggttttcatgacacgttttcagaatatgttgcggaattcccttccaacgcctattgtaacttggctgatggagcggaagattaacaactggcttaaccacgcaaattacggcctgattccagaagataggactcagttgaaagagtttgtcctcaatgacgaactgccgggacgcattattaccggcaaggtattcattcggccatcgatcaaagaggtgaaagagaattctgtgatcttcaacaatacctccaaggaggagcccatcgatattattgtgttcgccaccgggtacacatttgccttcccttttttagacgagagtgtggtaaaggtggaggatgggcaggcgagtctgtacaaatatatatttcctgcacacctccagaagcccacgctcgctattatcggccttattaaaccgctgggctcaatgattccaaccggggagacacaggcccgttgggcagttcgcgtgcttaaaggggtgaataagctgcctcctccaagtgtgatgattgaagagatcaatgccagaaaagagaacaagccttcctggtttggactgtgctactgtaaagctttgcaaagcgactacatcacctatatcgacgagctgctcacctacatcaatgccaaacccaatctgttttctatgctgttaactgatcctcatctggctctgacagttttttttggaccctgttctccatatcagttcaggcttaccgggcccgggaagtgggagggcgcgcgaaacgctattatgacgcaatgggacaggacgtttaaggtgatcaaggcgcgcgtggtacaggagtccccttcccctttcgagtccttcttgaaggtgttttctttcctagctctgctagtggccatcttcctaattttcttgtag

SEQ ID NO: 102226 - DNA, 1599 bp, Artificial Sequence
  derived and/or modified sequence
atggccaagagggtggccatcgtgggcgctggggtgtctggcctggccagcatcaagtgctgcctggaggagggcctggagcccacctgctttgagaggagtgatgacctgggcggcctgtggaggttcacagagcacgtggaggagggccgggccagcctgtacaagtctgtggtgagcaacagctgcaaggagatgagctgctacagcgacttccccttccctgaggactaccccaactacgtgcccaacagccagttcctggagtacctgaagatgtatgccaaccactttgacctgctgaagcacatccagttcaagaccaaggtgtgcagcgtgaccaagtgcagcgacagcgctgtgtctggccagtgggaggtggtgaccatgcatgaggagaagcaggagagcgccatctttgatgctgtgatggtgtgcaccggcttcctgaccaacccctacctgcccctggacagcttccctggcatcaatgccttcaagggccagtacttccacagccggcagtacaagcacccagacatcttcaaggacaagagggtgctggtgattggcatgggcaacagcggcacagacattgctgtggaggccagccacctggccgagaaggtgttcctgagcaccactggaggcggctgggtgatcagccgcatctttgattctggctacccctgggacatggtgttcatgacccgcttccagaacatgctgaggaacagcctgcccacccccatcgtgacctggctgatggagaggaagatcaacaactggctgaaccacgccaactacggcctcatccctgaggacaggacccagctgaaggagtttgtgctgaatgatgagctgcccggccgcatcatcaccgggaaggtgttcatccggcccagcatcaaggaggtgaaggagaacagcgtcatcttcaacaacaccagcaaggaggagcccatcgacatcatcgtgtttgccaccggctacacctttgccttccccttcctggatgaatctgtggtgaaggtggaggatggccaggccagcctgtacaagtacatcttccctgcccacctgcagaagcccaccctggccatcatcggcctcatcaagcccctgggctccatgatccccactggagagacccaggcccgctgggccgtgcgggtgctgaagggcgtgaacaagctgcccccaccttctgtgatgattgaggagatcaatgccaggaaggagaacaagcccagctggtttggcctgtgctactgcaaggccctgcagagcgactacatcacctacattgatgagctgctgacctacatcaatgccaagcccaacctcttctccatgctgctgacagacccccacctggccctgaccgtcttcttcggcccctgcagcccctaccagttccggctgaccggccctgggaagtgggagggcgccagaaatgccatcatgacccagtgggacaggaccttcaaggtgatcaaggcccgggtggtgcaggagagccccagcccctttgagagcttcctgaaggtgttctccttcctggccctgctggtggccatcttcctgatcttcctgtag

SEQ ID NO: 102227 - DNA, 1599 bp, Artificial Sequence
  derived and/or modified sequence
atggccaagcgggtggccatcgtgggcgccggcgtgagcggcctggcttctatcaaatgctgtttagaagagggcttggagccaacgtgctttgagaggagcgatgacctggggggactgtggcggttcacagagcatgtggaggaaggtcgcgcaagcctgtataaaagcgtcgtatccaattcttgtaaagagatgtcctgttatagtgacttcccattccccgaagactatccgaattacgtgcctaacagccagttcctagaatatttaaaaatgtacgccaatcatttcgacctgcttaaacatatccagtttaaaaccaaagtgtgctccgtgaccaaatgttccgacagcgccgtgagtggccaatgggaggtggtgacaatgcacgaagagaagcaggagagcgcgatttttgatgctgtgatggtctgtacagggttcctgaccaacccctatttgcctctggatagctttcccggcatcaatgccttcaaaggacagtactttcacagtagacagtacaaacatcctgacattttcaaagacaagagagtcctggttattggtatgggcaatagtgggactgatatagccgtagaggctagccatctggccgaaaaagtctttttaagtaccacgggtggagggtgggtcattagccgcattttcgactcaggctatccatgggatatggtgttcatgacgcggttccagaacatgttacgcaattccctgcccacaccaatcgtgacgtggcttatggagagaaaaattaataattggttaaaccatgctaactacggactcatccccgaagataggacgcagcttaaggagttcgtattaaacgatgaacttccggggcgtataatcaccgggaaggtgttcatcagaccttcaataaaggaagttaaggagaattctgtcatctttaacaacacttctaaggaggagcctattgacatcatcgtgtttgctaccggatataccttcgcattcccattcctggacgagtcagtagttaaggtggaagacggccaggcaagtctgtataaatacatctttccggctcaccttcagaaacctaccctggcaatcattggactgattaaacctctcggcagcatgattccgaccggcgagacccaggctcgctgggcggttcgtgtgttgaaaggcgtgaataagttacccccaccatccgtgatgatcgaggagatcaatgctcgcaaggagaacaagccatcatggtttggattgtgttattgcaaggctctgcagtcagactatatcacctacatcgacgaactgcttacttatattaacgccaagcctaatttgtttagcatgttgctgacagatccccacttggcccttacagtgttcttcgggccctgctcaccttaccagttcaggctcaccgggccagggaagtgggagggtgccagaaacgccatcatgacccagtgggatagaacctttaaggtaataaaagcccgggtagtacaagagtcacctagccctttcgagtctttcctaaaagtgttctcatttctggcactactcgttgctattttcctgattttcctgtag

SEQ ID NO: 102228 - DNA, 1599 bp, Artificial Sequence
  derived and/or modified sequence
atggccaagcgggtggccatcgtgggcgccggcgtgagcggcctggccagtatcaagtgttgtcttgaggagggactggaaccgacctgtttcgaaaggtctgatgacctaggcggtttgtggaggtttaccgagcacgttgaggagggcagggcgtccttatacaagtctgtcgtatctaattcatgtaaggagatgagttgttatagcgattttccattccctgaggattatccaaattacgtgcccaattcacaatttctggagtatttaaaaatgtacgcaaaccattttgacctcctcaagcacatacaattcaagacgaaggtgtgttccgttaccaaatgtagcgacagcgccgttagcgggcagtgggaggtggtgaccatgcatgaagaaaagcaagaatctgcgatctttgatgcagtgatggtctgcacagggttccttacgaacccttacctcccgctggattcattccctgggattaatgcattcaagggacagtacttccacagcagacagtataaacaccctgacattttcaaggataagagagtgctggtgattggcatgggtaactccggaactgatatcgctgtcgaagcatctcaccttgcagaaaaagtgttcttatctacgaccggcggaggctgggttatcagtcggatttttgacagcggatatccatgggatatggtgtttatgaccaggtttcaaaacatgcttaggaacagcctgcccaccccaattgtgacttggctgatggagcgcaaaatcaataattggctgaaccacgcaaattacggcctgatcccagaggacaggactcagctgaaggaatttgttctcaatgacgaactaccgggtcggataatcaccggaaaagtcttcattcgaccttccataaaggaggtcaaggaaaacagcgtaattttcaataacacctctaaagaagaacccattgacatcatcgtgtttgctactggctacacttttgcttttcccttcctggatgagtcagtggtcaaggtcgaagacggacaggcctcgctttataagtacatctttccagcacacctgcaaaagcctactttggcaattatcggcttgatcaaacctctggggagtatgatcccaacaggcgaaacacaggcccggtgggctgtgcgcgtgctcaagggagtgaacaagttgcctcctccaagcgtgatgatcgaggagatcaatgcgagaaaagaaaacaaaccgtcttggttcggattgtgctattgcaaggccctgcagtccgattacattacttacattgacgaactgctgacatatataaatgctaagccaaacctgttcagcatgctgctgaccgacccacacctagctctgactgtgttcttcggaccttgttcgccttatcagtttcgcttgacgggcccggggaagtgggaaggcgctagaaatgcaataatgactcagtgggataggacttttaaagtgatcaaggccagggtggtgcaggagtccccatcccccttcgagagctttctcaaagtgttttctttcctggccctgctcgtggcgatattcctgatctttctgtag

SEQ ID NO: 102229 - DNA, 1599 bp, Artificial Sequence
  derived and/or modified sequence
atggccaagcgcgttgctatcgtgggggcaggagtctccggactcgcctccattaaatgttgcctggaagaaggcctcgagcccacttgtttcgagaggtctgatgacttgggaggtctctggaggtttaccgaacacgtcgaggagggaagggcctccttgtataagagcgtggtgtcaaattcgtgtaaagagatgtcttgttactcagacttccctttcccagaagactacccaaattatgttccaaacagccagtttctcgaatacctgaagatgtatgccaatcactttgacctactgaaacacattcagtttaagaccaaagtttgtagcgtgaccaaatgctcagactcagccgtctcaggccagtgggaggttgttacaatgcacgaagaaaagcaggaaagtgctatcttcgatgctgtaatggtttgtaccggcttccttactaatccataccttccgctggacagtttccccggtatcaacgcgttcaaggggcagtacttccacagcaggcagtacaagcatcccgatatctttaaggacaagcgggtgctggtgattgggatgggcaatagtggtaccgacatcgcagtggaagcaagtcaccttgccgagaaggttttcctttctacaaccggaggagggtgggtgatttccaggatttttgactccgggtacccttgggacatggtatttatgacaagatttcagaacatgctgcgcaacagcctacctaccccaattgtgacgtggctgatggaaaggaagatcaataattggctgaaccacgcaaattacgggctcatccctgaagaccggactcagcttaaggagtttgtccttaatgacgaactccctggacgcataattaccggaaaagtttttatcagaccatctattaaagaggtgaaggaaaactccgtcatctttaataacacatcaaaagaggagcctattgacatcattgttttcgctacaggctacacatttgcatttccattcctagacgagtcagttgtgaaagtggaagatgggcaggctagtttatacaaatacatctttcccgctcacttgcagaaaccaaccctggccataattggcctgatcaaaccccttggatccatgattccaacaggcgaaacacaagcgaggtgggccgttagagtgctcaaaggcgtgaataaactgccacctccctctgtaatgatagaagaaataaatgccagaaaagaaaataaaccttcatggttcggcctgtgttattgcaaagccctgcagagcgattacattacatacatagacgagctcctgacctacatcaacgctaaacccaatctgttcagtatgctcctgacggacccccacctcgccttgactgtatttttcggaccctgtagcccctaccagttccgactgacgggaccaggtaagtgggaaggagcacggaacgctatcatgacccagtgggaccgaacctttaaggtcatcaaggctcgggtagttcaagaaagcccctcaccttttgaaagctttcttaaagtgttcagtttcttggcattgcttgtcgcgatctttctaatttttctgtag

SEQ ID NO: 102230 - DNA, 1599 bp, Artificial Sequence
  derived and/or modified sequence
atggccaagagggtggcaattgttggggctggagtctcaggtctggcatcgatcaagtgttgtctcgaagaaggactcgaaccgacttgctttgaacggtcggatgaccttggtgggctgtggcggtttactgaacacgtggaggagggcagagcctccctttataaatccgtggttagcaactcctgtaaagaaatgtcatgttactcagatttccctttccctgaagactacccaaattacgtcccgaactcccagttccttgagtacctgaagatgtacgctaaccactttgatctccttaagcacatacagtttaaaaccaaagtttgctcagtgacaaagtgcagtgattctgccgttagcggccaatgggaggtagtcaccatgcacgaggaaaagcaggagagcgctatcttcgatgccgtgatggtatgtactggcttcctaactaacccatacttgccactggacagtttccctggcatcaatgccttcaaagggcagtattttcactctaggcagtacaaacatcccgatattttcaaggacaaaagggtgctcgtgatcggcatgggcaacagtggaacagacattgcggtggaagcatctcacttggccgagaaagtcttcctatcaacgactggtggcggatgggtaatttcgcggatctttgattccggatacccctgggatatggtctttatgacaaggttccagaacatgttacggaactccctccctacgcctattgtcacttggcttatggagaggaagataaataattggctgaaccacgcgaactatgggctgatcccggaagatagaactcagctaaaggagttcgtattgaacgacgagctgcctggaaggatcattaccggcaaagtgtttattcgcccaagcatcaaggaggtgaaggaaaatagtgtcattttcaataacacttccaaggaagaaccaatcgatatcatcgtattcgctactggatacacatttgcattccctttcctggacgaatccgttgtgaaggttgaggacggccaggcgagtctctacaaatacatatttcccgctcacctgcagaaaccaacacttgcaataatcgggctcattaagcctctgggctcaatgatacctacaggagagacacaggctagatgggctgtgcgcgtgctgaagggtgtcaacaagttgcctccaccatctgtgatgattgaggaaattaacgcgaggaaagagaacaagcccagctggttcggcctgtgctattgtaaagcactacagtccgattatatcacttacattgatgagctgcttacgtacatcaacgctaaacccaacctctttagcatgttactaactgatccccacctcgcgcttaccgtattcttcgggccttgtagtccttatcagttccgacttaccgggcctggcaaatgggaaggcgctaggaatgcaataatgacgcagtgggataggacctttaaggtgattaaagcacgtgtagtacaggaatcaccctccccatttgagagctttctgaaagtattctcattcttagctctgttggtagccatcttcctcatttttctttag

SEQ ID NO: 102231 - DNA, 1599 bp, Artificial Sequence
  derived and/or modified sequence
atggccaagagagtggccatcgtgggcgccggcgtgagcggcctggccagcatcaagtgctgcctggaggagggcctggagcccacctgcttcgagagaagcgacgacctgggcggcctgtggagattcaccgagcacgtggaggagggcagagccagcctgtacaagagcgtggtgagcaacagctgcaaggagatgagctgctacagcgacttccccttccccgaggactaccccaactacgtgcccaacagccagttcctggagtacctgaagatgtacgccaaccacttcgacctgctgaagcacatccagttcaagaccaaggtgtgcagcgtgaccaagtgcagcgacagcgccgtgagcggccagtgggaggtggtgaccatgcacgaggagaagcaggagagcgccatcttcgacgccgtgatggtgtgcaccggcttcctgaccaacccctacctgcccctggacagcttccccggcatcaacgccttcaagggccagtacttccacagcagacagtacaagcaccccgacatcttcaaggacaagagagtgctggtgatcggcatgggcaacagcggcaccgacatcgccgtggaggccagccacctggccgagaaggtgttcctgagcaccaccggcggcggctgggtgatcagcagaatcttcgacagcggctacccctgggacatggtgttcatgaccagattccagaacatgctgagaaacagcctgcccacccccatcgtgacctggctgatggagagaaagatcaacaactggctgaaccacgccaactacggcctgatccccgaggacagaacccagctgaaggagttcgtgctgaacgacgagctgcccggcagaatcatcaccggcaaggtgttcatcagacccagcatcaaggaggtgaaggagaacagcgtgatcttcaacaacaccagcaaggaggagcccatcgacatcatcgtgttcgccaccggctacaccttcgccttccccttcctggacgagagcgtggtgaaggtggaggacggccaggccagcctgtacaagtacatcttccccgcccacctgcagaagcccaccctggccatcatcggcctgatcaagcccctgggcagcatgatccccaccggcgagacccaggccagatgggccgtgagagtgctgaagggcgtgaacaagctgcccccccccagcgtgatgatcgaggagatcaacgccagaaaggagaacaagcccagctggttcggcctgtgctactgcaaggccctgcagagcgactacatcacctacatcgacgagctgctgacctacatcaacgccaagcccaacctgttcagcatgctgctgaccgacccccacctggccctgaccgtgttcttcggcccctgcagcccctaccagttcagactgaccggccccggcaagtgggagggcgccagaaacgccatcatgacccagtgggacagaaccttcaaggtgatcaaggccagagtggtgcaggagagccccagccccttcgagagcttcctgaaggtgttcagcttcctggccctgctggtggccatcttcctgatcttcctgtag

SEQ ID NO: 102232 - protein, 469 aa, Artificial Sequence
  derived and/or modified sequence
MAKRVAIVGAGVSGLASIKCCLEEGLEPTCFERSDDLGGLWRFTTKVCSVTKCSDSAVSGQWEVVTMHEEKQESAIFDAVMVCTGFLTNPYLPLDSFPGINAFKGQYFHSRQYKHPDIFKDKRVLVIGMGNSGTDIAVEASHLAEKVFLSTTGGGWVISRIFDSGYPWDMVFMTRFQNMLRNSLPTPIVTWLMERKINNWLNHANYGLIPEDRTQLKEFVLNDELPGRIITGKVFIRPSIKEVKENSVIFNNTSKEEPIDIIVFATGYTFAFPFLDESVVKVEDGQASLYKYIFPAHLQKPTLAIIGLIKPLGSMIPTGETQARWAVRVLKGVNKLPPPSVMIEEINARKENKPSWFGLCYCKALQSDYITYIDELLTYINAKPNLFSMLLTDPHLALTVFFGPCSPYQFRLTGPGKWEGARNAIMTQWDRTFKVIKARVVQESPSPFESFLKVFSFLALLVAIFLIFL

SEQ ID NO: 102233 - DNA, 1572 bp, Artificial Sequence
  derived and/or modified sequence
tcattttgatctctgctaataccagagtcctgcgtggcagagccattggcaccagaaattacaagtacgtaaagagaacatggccaagcgagttgccattgtgggagctggggtcagcggcctggcctccatcaagtgctgtctggaagaaggactggagcccacctgctttgagaggagcgatgaccttggggggctgtggagattcaccaccaaagtctgcagtgtaacaaaatgctcagattctgctgtctctggccaatgggaggtggtcactatgcatgaagagaagcaagagtcagccatctttgatgctgtcatggtctgcactggctttcttactaatccttatttgccactggattcctttccaggtattaatgcctttaaaggccagtactttcatagccggcaatataagcatccagatatatttaaggacaagagagtccttgtgattggaatgggaaattctggcacagacattgctgtggaggccagccacctggcggaaaaggtgttcctcagcaccaccggagggggatgggtgatcagccgaatctttgactcgggctacccatgggacatggtgttcatgacacgctttcagaacatgttgagaaattccctcccaaccccaattgtgacttggttgatggagcgaaagataaacaactggctcaatcatgcaaattacggcttaataccagaagacaggactcagctgaaagagtttgtgctaaatgatgagctcccaggacgcatcatcactgggaaagtgttcatcaggccaagcataaaagaggtaaaggaaaactctgtcatatttaacaatacttcaaaggaagagcctattgacatcattgtctttgccactggatacacatttgctttccccttccttgatgagtctgtagtgaaagttgaagatggccaggcctcactgtacaagtatatcttccctgcacatctgcaaaagccaaccctggccattattggcctcatcaaacccttgggctccatgatacctacaggagaaacacaagctcggtgggctgttcgagtcctgaaaggtgtaaataagttaccaccaccaagtgtcatgatagaggaaattaatgcaaggaaagaaaacaagcccagttggtttggcttgtgctactgcaaggctttacaatcagattatatcacatacatagatgaactcctgacctatatcaatgcaaaacccaacctgttctctatgctcctaacggatccacatctggctctgaccgtcttctttggcccatgctcaccataccagttccgcttgactggcccaggaaaatgggaaggagccagaaatgccatcatgacccagtgggaccgaacattcaaggtcatcaaagctcgagttgtacaagagtctccatctccctttgaaagttttcttaaagtctttagctttctggctttgcttgtggctatttttctgattttcctataagtaaaagatctcctaaatggaagatgcacagagtagatttacaatgctccaattcctctcttacagcaatattgccttcacag

SEQ ID NO: 102234 - DNA, 1410 bp, Artificial Sequence
  derived and/or modified sequence
atggccaaaagagtagcaattgtcggagccggtgtctcgggcctcgcctccatcaagtgctgcctggaggagggattggaacctacttgcttcgaaagatctgatgatttggggggcctgtggcgattcactactaaagtttgcagcgtgacgaaatgctctgactcggctgtgagtggtcagtgggaagtggttactatgcacgaagagaagcaggagtcggcaattttcgatgccgtgatggtgtgcactggatttctgacgaatccctatttgcctctcgacagcttcccaggcattaatgcatttaaagggcagtacttccactcccggcagtataaacacccagatattttcaaagataagagagtgctggttattggcatgggcaattcaggaaccgatatcgcggtggaggctagtcaccttgctgaaaaagtcttcctcagtacaacaggcggagggtgggtgatatccagaatatttgattcgggctacccttgggacatggtatttatgactcgtttccagaacatgttgcggaactccttgccaacccccatcgtaacttggctcatggagcggaagatcaacaattggctgaaccacgccaactatggtctgattcctgaagatagaacacagctgaaggagtttgtgctcaacgacgaactgcctggccgcataatcaccggcaaggttttcattcgcccatcgataaaagaggtgaaagaaaattctgttattttcaacaacaccagtaaggaagagccaatcgatatcatcgttttcgccactggttacaccttcgcctttccttttttagacgaatctgtggtgaaggtagaggatggacaggctagcctctacaagtacattttccccgcacatttgcagaagccaactttggccatcatcgggctcatcaagcctctgggctctatgatccccaccggcgaaactcaggcaagatgggcagtgcgcgtgctcaaaggggtcaacaaacttccccccccatcagtaatgattgaggaaataaatgcccgtaaagagaataagcctagctggtttgggctttgttactgcaaagccctgcagagcgattacattacatacatcgacgagctgcttacatacatcaatgctaagccaaatctgttcagcatgttgcttacagacccccacctggctctcacagtattcttcggcccttgctccccctaccagtttcgactgaccggtccaggaaagtgggaaggcgcacgcaatgccataatgacccagtgggataggacgtttaaagtgatcaaggcacgcgtggtccaggaaagtccttccccctttgaatcttttctgaaggtattctccttcctcgcactgctggtggccatatttctgatcttcctgtag

SEQ ID NO: 102235 - DNA, 1410 bp, Artificial Sequence
  derived and/or modified sequence
atggccaagagggtggccatcgtgggcgctggggtgtctggcctggccagcatcaagtgctgcctggaggagggcctggagcccacctgctttgagaggagtgatgacctgggcggcctgtggaggttcaccaccaaggtgtgcagcgtgaccaagtgcagcgacagcgctgtgtctggccagtgggaggtggtgaccatgcatgaggagaagcaggagagcgccatctttgatgctgtgatggtgtgcaccggcttcctgaccaacccctacctgcccctggacagcttccctggcatcaatgccttcaagggccagtacttccacagccggcagtacaagcacccagacatcttcaaggacaagagggtgctggtgattggcatgggcaacagcggcacagacattgctgtggaggccagccacctggccgagaaggtgttcctgagcaccaccggcggcggctgggtgatcagccgcatctttgacagcggctacccctgggacatggtgttcatgacccgcttccagaacatgctgaggaacagcctgcccacccccatcgtgacctggctgatggagaggaagatcaacaactggctgaaccacgccaactacggcctcatccctgaggacaggacccagctgaaggagtttgtgctgaatgatgagctgcccggccgcatcatcaccgggaaggtgttcatccggcccagcatcaaggaggtgaaggaaaattctgtcatcttcaacaacaccagcaaggaggagcccatcgacatcatcgtgtttgccaccggctacacctttgccttccccttcctggatgagagcgtggtgaaggtggaggatggccaggccagcctgtacaagtacatcttccctgcccacctgcagaagcccaccctggccatcatcggcctcatcaagcccctgggctccatgatccccaccggggagacccaggcccgctgggccgtgcgggtgctgaagggcgtgaacaagctgcccccacccagcgtgatgattgaggagatcaatgccaggaaagaaaacaagcccagctggtttggcctgtgctactgcaaggccctgcagagcgactacatcacctacattgatgagctgctgacctacatcaatgccaagcccaacctcttctccatgctgctgacagacccccacctggccctgactgtgttcttcggcccctgcagcccctaccagttccggctgactggacctgggaagtgggagggcgccagaaatgccatcatgacccagtgggacaggaccttcaaggtgatcaaggcccgggtggtgcaggagagccccagcccctttgagagcttcctgaaggtgttctccttcctggccctgctggtggccatcttcctgatcttcctgtag

SEQ ID NO: 102236 - DNA, 1410 bp, Artificial Sequence
  derived and/or modified sequence
atggccaagcgggtggccatcgtgggcgccggcgtgagcggcctggccagcatcaaatgttgtctggaagaaggactggaacccacgtgctttgaacgaagcgatgatctcggggggctgtggagattcactactaaagtctgctcagtcacaaagtgctccgacagtgccgtgagcggccagtgggaggtggtgaccatgcatgaggagaagcaggagagcgcgatcttcgacgccgtgatggtctgcaccggcttcctcactaatccttacctcccactggacagctttcctgggattaatgctttcaaagggcaatactttcactcccggcagtacaaacacccggatattttcaaagataagagggtgctcgtaattggaatgggcaatagtggtaccgatatcgctgtagaagcttcgcacctcgctgagaaggtcttcctgtccaccacaggcgggggttgggtaattagcagaatcttcgattcagggtacccctgggatatggtatttatgacaagattccagaacatgctgcgcaactccctgccaacaccaattgtaacctggctcatggaacggaaaatcaataactggctgaatcacgctaattatggcctgataccagaagaccgcacccagctcaaggaatttgtactcaacgacgaactgcccgggcggatcatcactggaaaggtcttcatacggccttccattaaggaagtcaaagagaacagtgtgatttttaacaataccagcaaggaagagccaatcgatattatagtttttgccactggatacacttttgcattcccgtttttggacgaatccgtggtcaaggttgaagatggtcaggcctcactctacaaatacatcttccccgcccacctgcagaagcctacacttgctataattggtctgatcaaacccctggggagtatgatcccgactggtgaaacacaggcgagatgggccgtgcgagttctcaagggtgtgaacaagctcccacccccatcagtgatgatcgaagaaatcaacgcccgcaaagagaacaagccttcctggttcggtttgtgttattgtaaggccttgcagtctgattacatcacttatatcgatgaactattaacttacataaatgccaaacctaacctgttctctatgctgctgacagatccgcacttggctctgaccgtgttttttggaccctgctccccgtaccaattccgattgacagggccgggaaagtgggagggcgcccgaaatgccattatgactcaatgggatcgtactttcaaggtgatcaaggctagagtggtgcaagagagcccgtccccattcgagtccttcctgaaagtatttagcttcttggctctcctggtcgctatctttcttatttttctctag

SEQ ID NO: 102237 - DNA, 1410 bp, Artificial Sequence
  derived and/or modified sequence
atggctaagcgggtggccatcgtcggagccggagtcagcggactggcatccataaaatgttgtcttgaggaggggcttgaaccaacttgctttgaaagatccgatgacctggggggtctttggcgttttaccacgaaagtctgcagtgtgacgaaatgctctgactccgcagtgtccgggcagtgggaagtggtgaccatgcacgaagaaaaacaggaaagtgcaatcttcgacgccgttatggtgtgtaccggattcctcacaaatccatatttgcccctggacagcttcccagggattaatgcatttaaaggccagtacttccactcaagacagtacaaacatccagacatatttaaagacaagagagtccttgtgatcggcatgggcaactcagggacagatattgctgtagaagcttcacacctggcggagaaagtgtttctgtccactaccggaggcggatgggttataagccggatattcgattctgggtatccatgggatatggtatttatgactcgattccagaacatgcttaggaacagcctcccaactccaatcgtgacctggctgatggaacgtaagattaataactggcttaaccatgccaactacgggctgattcccgaggaccgtactcagctcaaggaattcgtactgaacgacgaattgcccggaaggattatcactggcaaagtcttcattcggccttcaatcaaggaagttaaagaaaactcagtcatctttaacaacacatccaaggaagaacctatcgacattatcgtattcgctactggctatacgtttgcattcccgtttctggacgaaagtgtagtcaaagtggaagacggacaggccagcttgtataagtatatatttcccgcacacctgcaaaaaccaaccctggcgataattggcctgatcaaacctctcggttctatgatcccgacgggggaaacgcaggccagatgggctgttagggttttgaaaggcgtgaacaagctccccccacccagcgtcatgattgaagagattaacgccagaaaagagaacaaaccatcttggttcggactgtgctactgcaaagcactgcagagcgactacatcacgtacatcgacgagctgttaacatatataaacgcgaagcccaatttgttttccatgttgctgaccgatccccaccttgccttgacggtgttctttgggccttgtagtccgtaccagttccgactcactggcccaggaaagtgggagggtgcacgcaacgctataatgacgcagtgggatcgtacgttcaaggtaataaaggccagggtggtgcaggagagtcctagtccttttgagagctttctcaaagtgtttagctttctggcccttctggtggcaatctttctgatattcctctag

SEQ ID NO: 102238 - DNA, 1410 bp, Artificial Sequence
  derived and/or modified sequence
atggccaagagagtggccatcgtgggcgccggcgtgagcggcctggccagcatcaagtgctgcctggaggagggcctggagcccacctgcttcgagagaagcgacgacctgggcggcctgtggagattcaccaccaaggtgtgcagcgtgaccaagtgcagcgacagcgccgtgagcggccagtgggaggtggtgaccatgcacgaggagaagcaggagagcgccatcttcgacgccgtgatggtgtgcaccggcttcctgaccaacccctacctgcccctggacagcttccccggcatcaacgccttcaagggccagtacttccacagcagacagtacaagcaccccgacatcttcaaggacaagagagtgctggtgatcggcatgggcaacagcggcaccgacatcgccgtggaggccagccacctggccgagaaggtgttcctgagcaccaccggcggcggctgggtgatcagcagaatcttcgacagcggctacccctgggacatggtgttcatgaccagattccagaacatgctgagaaacagcctgcccacccccatcgtgacctggctgatggagagaaagatcaacaactggctgaaccacgccaactacggcctgatccccgaggacagaacccagctgaaggagttcgtgctgaacgacgagctgcccggcagaatcatcaccggcaaggtgttcatcagacccagcatcaaggaggtgaaggagaacagcgtgatcttcaacaacaccagcaaggaggagcccatcgacatcatcgtgttcgccaccggctacaccttcgccttccccttcctggacgagagcgtggtgaaggtggaggacggccaggccagcctgtacaagtacatcttccccgcccacctgcagaagcccaccctggccatcatcggcctgatcaagcccctgggcagcatgatccccaccggcgagacccaggccagatgggccgtgagagtgctgaagggcgtgaacaagctgcccccccccagcgtgatgatcgaggagatcaacgccagaaaggagaacaagcccagctggttcggcctgtgctactgcaaggccctgcagagcgactacatcacctacatcgacgagctgctgacctacatcaacgccaagcccaacctgttcagcatgctgctgaccgacccccacctggccctgaccgtgttcttcggcccctgcagcccctaccagttcagactgaccggccccggcaagtgggagggcgccagaaacgccatcatgacccagtgggacagaaccttcaaggtgatcaaggccagagtggtgcaggagagccccagccccttcgagagcttcctgaaggtgttcagcttcctggccctgctggtggccatcttcctgatcttcctgtag

SEQ ID NO: 102239 - DNA, 396 bp, Artificial Sequence
  derived and/or modified sequence
atggccgagcccgactacatcgaggacgacaaccccgagctgatcagaccccagaagctgatcaaccccgtgaagaccagcagaaaccaccaggacctgcacagagagctgctgatgaaccagaagagaggcctggccccccagaacaagcccgagctgcagaaggtgatggagaagagaaagagagaccaggtgatcaagcagaaggaggaggaggcccagaagaagaagagcgacctggagatcgagctgctgaagagacagcagaagctggagcagctggagctggagaagcagaagctgcaggaggagcaggagaacgcccccgagttcgtgaaggtgaagggcaacctgagaagaaccggccaggaggtggcccaggcccaggagagctag

SEQ ID NO: 102240 - DNA, 273 bp, Artificial Sequence
  derived and/or modified sequence
atggccgagcccgactacatcgaggacgacaaccccgagctgatcagaccccagaagctgatcaaccccgtgaagaccagcagaaaccaccaggacctgcacagagagctgctgatgaaccagaagagaggcctggccccccagaacaagcccgagctgcagaaggtgatggagaagagaaagagagaccaggtgatcaagcagaaggaggaggaggcccagaagaagaagagcgacctggagatcgagctgctgaagagacagcagaagtag

SEQ ID NO: 102241 - DNA, 387 bp, Artificial Sequence
  derived and/or modified sequence
atggccgagcccgactacatcgaggacgacaaccccgagctgatcagaccccagaagctgatcaaccccgtgaagaccagcagaaaccaccaggacctgcacagagagctgctgatgaaccagaagagaggcctggccccccagaacaagcccgagctgcagaaggtgatggagaagagaaagagagaccaggtgatcaagcagaaggaggaggaggcccagaagaagaagagcgacctggagatcgagctgctgaagagacagcagaagctggagcagctggagctggagaagcagaagctgcaggaggagcaggagaacgcccccgagttcgtgaaggtgaagggcaacctgagaagaaccggccaggaggtggcccaggcctag

SEQ ID NO: 102242 - DNA, 204 bp, Artificial Sequence
  derived and/or modified sequence
atggccgagcccgactacatcgaggacgacaaccccgagctgatcagaccccagaagctgatcaaccccgtgaagaccagcagaaaccaccaggacctgcacagagagctgctgatgaaccagaagagaggcctggccccccagaacaagcccgagctgcagaaggtgatggagaagagaaagagagaccaggtgatcaagtag

SEQ ID NO: 102243 - DNA, 306 bp, Artificial Sequence
  derived and/or modified sequence
atggccgagcccgactacatcgaggacgacaaccccgagctgatcagaccccagaagctgatcaaccccgtgaagaccagcagaaaccaccaggacctgcacagagagctgctgatgaaccagaagagaggcctggccccccagaacaagcccgagctgcagaaggtgatggagaagagaaagagagaccaggtgatcaagcagaaggaggaggaggcccagaagaagaagagcgacctggagatcgagctgctgaagagacagcagaagctggagcagctggagctggagaagcagaagctgtag

SEQ ID NO: 102244 - DNA, 255 bp, Artificial Sequence
  derived and/or modified sequence
atggccgagcccgactacatcgaggacgacaaccccgagctgatcagaccccagaagctgatcaaccccgtgaagaccagcagaaaccaccaggacctgcacagagagctgctgatgaaccagaagagaggcctggccccccagaacaagcccgagctgcagaaggtgatggagaagagaaagagagaccaggtgatcaagcagaaggaggaggaggcccagaagaagaagagcgacctggagatcgagctgtag

SEQ ID NO: 102245 - DNA, 282 bp, Artificial Sequence
  derived and/or modified sequence
atggccgagcccgactacatcgaggacgacaaccccgagctgatcagaccccagaagctgatcaaccccgtgaagaccagcagaaaccaccaggacctgcacagagagctgctgatgaaccagaagagaggcctggccccccagaacaagcccgagctgcagaaggtgatggagaagagaaagagagaccaggtgatcaagcagaaggaggaggaggcccagaagaagaagagcgacctggagatcgagctgctgaagagacagcagaagctggagcagtag

SEQ ID NO: 102246 - DNA, 381 bp, Artificial Sequence
  derived and/or modified sequence
atggccgagcccgactacatcgaggacgacaaccccgagctgatcagaccccagaagctgatcaaccccgtgaagaccagcagaaaccaccaggacctgcacagagagctgctgatgaaccagaagagaggcctggccccccagaacaagcccgagctgcagaaggtgatggagaagagaaagagagaccaggtgatcaagcagaaggaggaggaggcccagaagaagaagagcgacctggagatcgagctgctgaagagacagcagaagctggagcagctggagctggagaagcagaagctgcaggaggagcaggagaacgcccccgagttcgtgaaggtgaagggcaacctgagaagaaccggccaggaggtggcctag

SEQ ID NO: 102247 - DNA, 378 bp, Artificial Sequence
  derived and/or modified sequence
atggccgagcccgactacatcgaggacgacaaccccgagctgatcagaccccagaagctgatcaaccccgtgaagaccagcagaaaccaccaggacctgcacagagagctgctgatgaaccagaagagaggcctggccccccagaacaagcccgagctgcagaaggtgatggagaagagaaagagagaccaggtgatcaagcagaaggaggaggaggcccagaagaagaagagcgacctggagatcgagctgctgaagagacagcagaagctggagcagctggagctggagaagcagaagctgcaggaggagcaggagaacgcccccgagttcgtgaaggtgaagggcaacctgagaagaaccggccaggaggtgtag

SEQ ID NO: 102248 - DNA, 396 bp, Artificial Sequence
  derived and/or modified sequence
atggctgaaccagattatatcgaggacgacaacccggaactgatccgcccccagaaacttatcaaccccgtaaagacgtcacggaatcaccaagatctgcaccgggagttactcatgaaccaaaagcgcggtctcgcccctcagaacaaacccgagttgcagaaagtgatggagaaaagaaaaagggatcaggtgattaaacagaaagaggaggaggcacagaagaagaaatcagacctggaaatagagctgttgaagcgccaacagaaactggagcagctcgagttggaaaagcaaaagttacaagaggaacaagagaatgcccccgagttcgtgaaagttaagggcaacttgcgcagaacaggacaggaggtagcccaagcccaggaaagctag

SEQ ID NO: 102249 - DNA, 396 bp, Artificial Sequence
  derived and/or modified sequence
atggcggagcctgattacatcgaagatgacaatcccgagctgatccgcccccagaagctcatcaacccagtgaagacttcccgcaaccatcaagacctgcatagagagcttctgatgaatcagaagagaggccttgcgccccaaaacaagcctgaactacagaaggtcatggagaaacgaaagagagaccaggttataaagcaaaaggaagaggaggcgcaaaaaaagaaatcagacctggaaattgagctgctcaagagacagcaaaaactcgagcagctagagctcgagaagcagaaactacaggaggagcaagagaatgcacccgaattcgtgaaggtgaaaggtaatctgagaagaacagggcaggaagtggctcaggctcaggaaagttag

SEQ ID NO: 102250 - DNA, 396 bp, Artificial Sequence
  derived and/or modified sequence
atggccgaaccggactatattgaggacgataaccccgagttgatacgaccgcaaaaactaattaaccccgtcaagacctcaagaaatcatcaggatcttcatcgcgaactgctgatgaaccaaaaaagaggcctggcgccacaaaacaaaccagaattgcagaaagtgatggagaagagaaagcgcgatcaggtgataaagcagaaagaggaggaggcacagaagaagaaaagtgacctggagatcgagctgctgaaaagacaacagaaactggaacagctggaactggagaagcagaaacttcaagaagagcaagaaaacgccccagagtttgtgaaggtaaaagggaatttaaggcgaacggggcaagaggtcgcccaggcgcaggagagttag

SEQ ID NO: 102251 - DNA, 396 bp, Artificial Sequence
  derived and/or modified sequence
atggctgaacctgactatattgaggacgataaccctgaactcattcgccctcagaagctgattaaccctgtaaaaacatcccgcaaccatcaggacctccatcgtgaactgctcatgaatcagaagagagggctggcgccccagaacaagccagagctacagaaagtgatggaaaagcgtaaacgtgaccaggtgattaaacagaaggaagaagaagcgcagaaaaagaaaagtgatcttgagattgaactgttgaaacggcaacagaagctggagcagctcgaacttgaaaagcagaaactccaggaggaacaggagaacgcaccagagttcgtgaaagtcaagggtaatttaagacgcactggccaagaggtcgctcaggcacaggaaagttag

SEQ ID NO: 102252 - DNA, 396 bp, Artificial Sequence
  derived and/or modified sequence
atggctgaacccgattacatcgaagatgacaatcctgagctcatcagaccacagaagcttataaatccggtgaagacgtcacgaaaccatcaggacctgcatcgagagctgctaatgaatcagaagcgagggctggcacctcagaataagcctgaacttcaaaaagtcatggaaaagcgcaagcgagaccaggttattaagcaaaaagaagaggaggctcagaagaaaaaaagtgacttagagatcgagctgctgaagcgtcagcagaaactggaacagctggagctggagaagcagaagctacaggaggagcaggaaaacgctcctgaattcgtcaaggtgaagggaaaccttaggcggaccggacaggaagtggcgcaggcacaggagtcttag

SEQ ID NO: 102253 - DNA, 396 bp, Artificial Sequence
  derived and/or modified sequence
atggctgagccggactatatagaagacgataatccagagctcatccgcccccagaaactgatcaaccccgtgaaaaccagtaggaatcaccaggacctgcaccgggaattattaatgaaccagaagcggggcttggctccccagaacaagccagagctgcagaaggtcatggagaaacggaagagggatcaggtcatcaaacagaaggaagaggaggcgcaaaaaaaaaagagcgacctggagattgaactgctcaaacgccagcagaaactggagcagctggaactagagaagcagaaattgcaggaagagcaggaaaacgctcccgagtttgtgaaggtcaaggggaacctccggcgtaccggtcaggaggtagcacaggcgcaggaatcatag

SEQ ID NO: 102254 - DNA, 273 bp, Artificial Sequence
  derived and/or modified sequence
atggccgagccggactacatagaagatgataaccccgagctcatcagacctcagaagttaattaatcccgttaaaacctctcgtaaccaccaggacttacatcgagagcttctgatgaatcagaaaagggggctggcccctcagaacaaacctgagttacagaaggttatggagaaacgcaagcgtgatcaagtcataaagcaaaaggaggaggaggcccagaagaagaaatctgatctggaaatagagttactgaagagacagcagaaatag

SEQ ID NO: 102255 - DNA, 387 bp, Artificial Sequence
  derived and/or modified sequence
atggcagagcccgactatatcgaggatgacaaccctgaactgattcggccacagaaactaattaacccagtgaagacgagcaggaaccaccaagatctgcaccgggagctgttaatgaatcaaaagcggggcctggcccctcagaacaaacctgaattgcaaaaagttatggagaagcgcaagagagaccaggtaatcaaacagaaagaagaggaggcccaaaagaagaaatctgacctggagatcgaattgctcaagagacagcagaaactggagcagctggaactggagaagcagaaactacaagaggaacaggagaatgcgccagaattcgttaaggtgaagggcaacctgcgccgtacaggacaggaggtcgctcaagcatag

SEQ ID NO: 102256 - DNA, 396 bp, Artificial Sequence
  derived and/or modified sequence
atggccgaacctgattatatcgaggatgataatcctgaactcatcaggcctcaaaagttgatcaaccccgtgaaaacttccagaaaccaccaggatctccatcgggagctcctaatgaatcagaagcgagggctcgccccccagaataaaccagaactacaaaaggtgatggagaagcgcaagagggatcaagtaatcaaacaaaaagaagaggaggctcagaagaaaaagtcagacctggagattgaattgttgaaacgacagcagaaactcgaacagctcgagttggaaaagcaaaagctgcaggaagagcaagaaaacgcacccgagttcgtcaaggtaaagggaaatcttcgcagaacaggacaggaggttgcgcaagctcaagaatcgtag

SEQ ID NO: 102257 - DNA, 396 bp, Artificial Sequence
  derived and/or modified sequence
atggcagagccagattacattgaggatgacaaccccgagctgatcagacctcagaagctcatcaatccagtaaaaactagccgcaaccatcaggatttgcacagggaattgctgatgaatcagaaaagaggcctcgcgccacagaataaacccgaactgcagaaagtcatggaaaaacgcaaacgggatcaggtgattaaacagaaggaggaagaagcacagaagaaaaagagtgacctcgaaattgaactgctaaaaagacagcagaaactggagcagttagagttagagaaacaaaagcttcaggaggagcaggaaaatgcccccgaattcgttaaggtcaaagggaaccttcgccgaacaggtcaggaggtggcacaggcacaggaatcttag

SEQ ID NO: 102258 - DNA, 204 bp, Artificial Sequence
  derived and/or modified sequence
atggccgagccagattacattgaagacgacaaccccgagctcatccgccctcagaagctaatcaatcccgtgaaaacttcgcgtaatcaccaggatctccacagagagctgctgatgaaccagaagcgcgggctcgcaccccagaataaacctgaactgcagaaggtgatggagaaacgtaagcgcgatcaagtgataaaatag

SEQ ID NO: 102259 - DNA, 306 bp, Artificial Sequence
  derived and/or modified sequence
atggctgaacccgactatatcgaggacgataaccccgagctgataagaccccaaaagttaattaaccctgtcaaaacgagtagaaaccatcaagatcttcaccgcgagctccttatgaaccagaagcgcggtctggcgcctcagaacaagcctgaactacagaaagttatggagaagagaaagcgcgatcaggtcattaagcagaaggaggaggaagctcagaagaagaagagcgacttggagatagagctgttgaaaagacaacagaaactggagcaactagaacttgagaagcagaagctctag

SEQ ID NO: 102260 - DNA, 396 bp, Artificial Sequence
  derived and/or modified sequence
atggctgagcccgattatatcgaggacgacaatccagagctgattcggcctcagaagctgattaaccctgtcaaaacgtctcggaaccaccaggatctccacagagaattacttatgaaccagaaaagaggcttggctccccagaacaaacctgaattacagaaagtaatggagaagcggaagcgcgaccaggtgattaagcagaaggaagaggaggctcagaaaaagaaatctgacctggagatcgagctcctgaagcgacaacaaaagctagaacagttggaactggaaaagcagaagctgcaggaggaacaggaaaacgcgcctgagttcgttaaagtcaagggcaatctccgtagaacaggacaagaagtagcccaagctcaggaaagctag

SEQ ID NO: 102261 - DNA, 396 bp, Artificial Sequence
  derived and/or modified sequence
atggccgaaccggactacattgaggacgacaaccctgagcttatccgaccacagaaactcattaaccccgtgaagacatcaagaaaccatcaggatttacaccgggagctgttaatgaatcagaaacgtggccttgcaccgcagaacaaaccggaactgcagaaggtcatggagaagcggaagagggatcaggtgatcaagcagaaggaagaggaggcacagaagaagaaatccgacctggagattgagcttctaaaaagacagcagaagctggaacagcttgagttggagaagcaaaagctgcaggaggagcaagagaacgccccagaattcgttaaagtgaagggaaacctgagaagaacaggacaggaggtggcccaggctcaagagtcctag

SEQ ID NO: 102262 - DNA, 255 bp, Artificial Sequence
  derived and/or modified sequence
atggctgaacccgactacatcgaggacgataatccagagttgattaggccccaaaagttgatcaaccctgtcaagacaagccgcaaccaccaagatctccaccgggagttattgatgaatcagaagaggggccttgcaccacagaataagcccgagttgcaaaaggtgatggagaaacgaaagagggaccaggtgatcaagcaaaaggaggaagaagcacagaagaaaaaatccgacctggagatcgaactatag

SEQ ID NO: 102263 - DNA, 282 bp, Artificial Sequence
  derived and/or modified sequence
atggccgaaccagattatatagaagatgacaatcctgagttaatacgaccccagaagttaatcaacccagtgaagacctctcgcaaccaccaggatttgcacagggagctattaatgaatcagaagaggggactggcacctcagaataaacccgaactgcagaaagtgatggaaaaacggaaacgggatcaggtgatcaagcagaaggaggaagaagcccagaagaagaagtctgacctggaaattgaactcttaaaaaggcagcagaagctcgaacagtag

SEQ ID NO: 102264 - DNA, 381 bp, Artificial Sequence
  derived and/or modified sequence
atggcagagccagattacattgaagacgacaaccccgaactgattagaccacagaagttgatcaaccccgtgaaaacttcccgaaaccaccaggacttacatagggagctcctcatgaaccagaaaaggggactcgcacctcaaaataagcccgagttacagaaggttatggagaagagaaagagagatcaagtgattaagcagaaggaagaggaggctcagaagaagaaatctgacctagaaatcgagctccttaagaggcagcagaagcttgagcaactcgagttggaaaagcaaaaattgcaggaggagcaggagaacgcgcctgagttcgttaaagtgaaggggaacttaagacggaccggccaggaggttgcatag

SEQ ID NO: 102265 - DNA, 378 bp, Artificial Sequence
  derived and/or modified sequence
atggcagaaccagactacatagaggacgataaccctgagctcatacgcccccagaagcttattaaccccgtcaaaaccagcaggaatcatcaggacctgcacagagagctcctgatgaaccagaagagagggctggcaccccaaaacaagcctgaactccagaaggtaatggagaagaggaaacgcgatcaggtgattaaacagaaggaagaggaagcacagaaaaaaaagtccgaccttgagattgaactcttgaagagacaacaaaaactcgaacagctcgaactggaaaagcagaaactacaggaggagcaagaaaacgcacccgaattcgtgaaggtgaagggcaatttgagacgtaccgggcaggaggtgtag

SEQ ID NO: 102266 - DNA, 396 bp, Artificial Sequence
  derived and/or modified sequence
atggctgagcccgattacattgaagatgataatcctgagctgataaggccacagaaactgattaacccggttaagacatccagaaatcaccaggatctgcatcgcgaattgctcatgaatcagaaacgggggctggctccccagaataagcctgaactgcagaaggtcatggaaaaaaggaaacgggaccaggtcattaagcagaaggaggaagaggcccagaagaagaaaagcgaccttgagattgaactcctgaagcgccagcagaagcttgagcaattggaactggagaaacagaaacttcaggaggaacaagagaacgccccggaatttgtgaaggtaaagggcaacctccgacgaacaggtcaggaagtggctcaggcgcaggaatcatag

SEQ ID NO: 102267 - DNA, 396 bp, Artificial Sequence
  derived and/or modified sequence
atggccgagccagactacattgaagatgacaaccctgagctgatccggccccagaagctgatcaaccctgtgaagaccagcaggaaccaccaggacctgcaccgggagctgctgatgaaccagaagaggggcctggccccccagaacaagccagagctgcagaaggtgatggagaagaggaagagggaccaggtgatcaagcagaaggaggaggaggcccagaagaagaagagtgacctggagattgagctgctgaagaggcagcagaagctggagcagctggagctggagaagcagaagctgcaggaggagcaggagaatgcccctgagtttgtgaaggtgaagggcaacctgcggaggacaggccaggaggtggcccaggcccaggagagctag

SEQ ID NO: 102268 - DNA, 273 bp, Artificial Sequence
  derived and/or modified sequence
atggccgagccagactacattgaagatgacaaccctgagctgatccggccccagaagctgatcaaccctgtgaagaccagcaggaaccaccaggacctgcaccgggagctgctgatgaaccagaagaggggcctggccccccagaacaagccagagctgcagaaggtgatggagaagaggaagagggaccaggtgatcaagcagaaggaggaggaggcccagaagaagaagagtgacctggagattgagctgctgaagaggcagcagaagtag

SEQ ID NO: 102269 - DNA, 387 bp, Artificial Sequence
  derived and/or modified sequence
atggccgagccagactacattgaagatgacaaccctgagctgatccggccccagaagctgatcaaccctgtgaagaccagcaggaaccaccaggacctgcaccgggagctgctgatgaaccagaagaggggcctggccccccagaacaagccagagctgcagaaggtgatggagaagaggaagagggaccaggtgatcaagcagaaggaggaggaggcccagaagaagaagagtgacctggagattgagctgctgaagaggcagcagaagctggagcagctggagctggagaagcagaagctgcaggaggagcaggagaatgcccctgagtttgtgaaggtgaagggcaacctgcggaggacaggccaggaggtggcccaggcctag

SEQ ID NO: 102270 - DNA, 204 bp, Artificial Sequence
  derived and/or modified sequence
atggccgagccagactacattgaagatgacaaccctgagctgatccggccccagaagctgatcaaccctgtgaagaccagcaggaaccaccaggacctgcaccgggagctgctgatgaaccagaagaggggcctggccccccagaacaagccagagctgcagaaggtgatggagaagaggaagagggaccaggtgatcaagtag

SEQ ID NO: 102271 - DNA, 306 bp, Artificial Sequence
  derived and/or modified sequence
atggccgagccagactacattgaagatgacaaccctgagctgatccggccccagaagctgatcaaccctgtgaagaccagcaggaaccaccaggacctgcaccgggagctgctgatgaaccagaagaggggcctggccccccagaacaagccagagctgcagaaggtgatggagaagaggaagagggaccaggtgatcaagcagaaggaggaggaggcccagaagaagaagagtgacctggagattgagctgctgaagaggcagcagaagctggagcagctggagctggagaagcagaagctgtag

SEQ ID NO: 102272 - DNA, 255 bp, Artificial Sequence
  derived and/or modified sequence
atggccgagccagactacattgaagatgacaaccctgagctgatccggccccagaagctgatcaaccctgtgaagaccagcaggaaccaccaggacctgcaccgggagctgctgatgaaccagaagaggggcctggccccccagaacaagccagagctgcagaaggtgatggagaagaggaagagggaccaggtgatcaagcagaaggaggaggaggcccagaagaagaagagtgacctggagattgagctgtag

SEQ ID NO: 102273 - DNA, 282 bp, Artificial Sequence
  derived and/or modified sequence
atggccgagccagactacattgaagatgacaaccctgagctgatccggccccagaagctgatcaaccctgtgaagaccagcaggaaccaccaggacctgcaccgggagctgctgatgaaccagaagaggggcctggccccccagaacaagccagagctgcagaaggtgatggagaagaggaagagggaccaggtgatcaagcagaaggaggaggaggcccagaagaagaagagtgacctggagattgagctgctgaagaggcagcagaagctggagcagtag

SEQ ID NO: 102274 - DNA, 381 bp, Artificial Sequence
  derived and/or modified sequence
atggccgagccagactacattgaagatgacaaccctgagctgatccggccccagaagctgatcaaccctgtgaagaccagcaggaaccaccaggacctgcaccgggagctgctgatgaaccagaagaggggcctggccccccagaacaagccagagctgcagaaggtgatggagaagaggaagagggaccaggtgatcaagcagaaggaggaggaggcccagaagaagaagagtgacctggagattgagctgctgaagaggcagcagaagctggagcagctggagctggagaagcagaagctgcaggaggagcaggagaatgcccctgagtttgtgaaggtgaagggcaacctgcggaggacaggccaggaggtggcctag

SEQ ID NO: 102275 - DNA, 378 bp, Artificial Sequence
  derived and/or modified sequence
atggccgagccagactacattgaagatgacaaccctgagctgatccggccccagaagctgatcaaccctgtgaagaccagcaggaaccaccaggacctgcaccgggagctgctgatgaaccagaagaggggcctggccccccagaacaagccagagctgcagaaggtgatggagaagaggaagagggaccaggtgatcaagcagaaggaggaggaggcccagaagaagaagagtgacctggagattgagctgctgaagaggcagcagaagctggagcagctggagctggagaagcagaagctgcaggaggagcaggagaatgcccctgagtttgtgaaggtgaagggcaacctgcggaggacaggccaggaggtgtag

SEQ ID NO: 102276 - DNA, 396 bp, Artificial Sequence
  derived and/or modified sequence
atggccgagcccgactacatcgaggacgacaaccccgagctgatcaggccgcaaaagctgattaaccccgtaaagacaagtcgaaaccaccaggatctgcacagggaattgctcatgaatcagaaacgaggattggcgccccagaataaacctgagctgcaaaaggtgatggaaaagcggaaacgcgaccaggtgatcaagcagaaagaggaggaggctcagaaaaagaaaagtgatcttgagattgagctgctaaaacggcagcagaagttggagcagttggagctcgaaaagcagaagttacaagaggaacaggaaaacgcacctgagtttgttaaggtgaaaggcaacctgcggcgtacgggccaggaggtggcccaggcccaggagagctag

SEQ ID NO: 102277 - DNA, 396 bp, Artificial Sequence
  derived and/or modified sequence
atggccgagcccgactacatcgaggacgacaaccccgagctgatccgtccccaaaagctcataaatccagtcaaaacttctaggaaccatcaggacttgcatagggaactgctaatgaatcagaaaagaggtctggctccacagaataagcctgagctgcagaaagtgatggaaaagaggaagcgcgatcaggtcatcaagcaaaaggaggaggaagctcagaaaaagaagtctgacctggaaattgagctattaaaaaggcagcagaagctggagcagttggaactggaaaagcagaagctccaagaggagcaggaaaatgctccagagtttgtcaaggttaaagggaacctgcgcaggacaggtcaggaggtcgcacaggctcaggagagttag

SEQ ID NO: 102278 - DNA, 396 bp, Artificial Sequence
  derived and/or modified sequence
atggccgagcccgactacatcgaggacgacaaccccgagctgatccggccgcagaagctgatcaatccagtgaagacaagcaggaatcaccaggacctacatcgtgaactgctgatgaatcagaagcgcgggctggcccctcagaacaaacctgagctgcagaaagtcatggagaagcggaagagggaccaggtgatcaagcagaaggaagaagaggcacagaaaaaaaagagcgacttggaaatcgagctgttgaaacgacaacaaaagctcgaacagctggagctggaaaaacaaaagctccaggaggagcaggagaatgctcccgaattcgtgaaggtgaaagggaatttgagacggactggtcaggaagttgcccaggctcaggagtcctag

SEQ ID NO: 102279 - DNA, 396 bp, Artificial Sequence
  derived and/or modified sequence
atggccgagcccgactacatcgaggacgacaaccccgagctgatcaggcctcagaaactgattaatcctgtaaaaacttcccgcaaccatcaggacctgcaccgggaactgttaatgaatcagaaaagaggcctagccccccagaacaaaccagagctccaaaaggtcatggagaaaagaaaacgtgatcaggtgattaaacagaaggaagaagaagcacagaaaaaaaagagtgacctagagattgaattactgaagcgccagcagaagctggaacagttagaactggaaaaacagaaactgcaggaagagcaagagaacgcacccgaatttgtgaaggtaaaaggcaatctccggcgaaccgggcaggaggtggcccaggctcaggagtcctag

SEQ ID NO: 102280 - DNA, 396 bp, Artificial Sequence
  derived and/or modified sequence
atggccgagcccgactacatcgaggacgacaaccccgagctgatcaggccccaaaagctcatcaatcccgtgaaaactagtcgcaaccaccaggacttacacagggagttgttgatgaaccaaaagcgcggcctcgctccacagaataagccggaacttcagaaggtgatggaaaagagaaagcgggatcaggtgatcaaacagaaagaggaggaagcccagaagaagaagtcggacctggagatcgaactgctcaagagacaacagaagctggagcagctggagttggaaaagcagaaactgcaggaggagcaggaaaacgccccagaattcgtgaaagtgaaaggcaacctaaggagaaccggccaggaagtcgcgcaggctcaggagagctag

SEQ ID NO: 102281 - DNA, 396 bp, Artificial Sequence
  derived and/or modified sequence
atggccgagcccgactacatcgaggacgacaaccccgagctgatccgcccacagaaactaattaatcctgtgaagacttcacgtaaccaccaggacctgcatcgggaacttttgatgaatcagaaacgtggtcttgcaccacagaataaacccgaactacagaaggtgatggagaagcgcaagcgcgatcaagttattaaacaaaaggaggaagaggcccagaagaagaagtccgacctggaaattgaacttctcaagcgtcagcaaaagttagagcagctggaactggaaaagcagaaacttcaggaagagcaggaaaacgcccccgaattcgtgaaagtgaaaggcaacctaaggaggaccggccaggaggtggcccaagcccaggaatcctag

SEQ ID NO: 102282 - DNA, 273 bp, Artificial Sequence
  derived and/or modified sequence
atggccgagcccgactacatcgaggacgacaaccccgagctgatccggccccaaaagctgatcaacccggtgaagaccagtagaaaccatcaggacctgcacagggaactacttatgaatcaaaaacgcgggctagcccctcagaacaagcctgaactccagaaagttatggagaaacgcaaacgtgatcaagtgatcaagcaaaaagaggaagaggctcagaagaaaaagagtgaccttgaaatcgagttactcaaaaggcaacagaagtag

SEQ ID NO: 102283 - DNA, 387 bp, Artificial Sequence
  derived and/or modified sequence
atggccgagcccgactacatcgaggacgacaaccccgagctgatccgtccccagaaattgattaatccggttaaaacaagtaggaatcaccaagatctccatagggagcttctcatgaatcaaaagcggggcctggccccacaaaataaacccgagctgcagaaagtgatggagaagaggaagagggaccaggtgattaagcagaaggaggaagaggctcagaagaagaagtccgatctcgagatcgaactactaaagcgccaacagaaactagaacagttggaactggagaaacagaaactacaggaggagcaagaaaatgctcccgaatttgtgaaggtcaaggggaatttacgcaggactggtcaagaagtagctcaggcctag

SEQ ID NO: 102284 - DNA, 396 bp, Artificial Sequence
  derived and/or modified sequence
atggccgagcccgactacatcgaggacgacaaccccgagctgatccggccacagaaactgattaatcctgtgaagacctcacggaaccaccaagacttgcatcgggagctgcttatgaatcagaaacgcggcttggcccctcagaacaagccagagttacagaaggtcatggaaaagcggaaacgcgaccaagtgatcaagcagaaagaggaagaggcccagaaaaaaaagagcgatctggaaatcgagctcctgaaacgccagcagaagctcgaacaactggaattagagaaacagaaactacaagaagaacaggagaacgctcctgaattcgtgaaagtgaagggaaatctgaggcgcactgggcaggaagtggctcaggctcaggaaagttag

SEQ ID NO: 102285 - DNA, 396 bp, Artificial Sequence
  derived and/or modified sequence
atggccgagcccgactacatcgaggacgacaaccccgagctgatcaggcctcagaagctaataaacccagtaaagacaagcaggaaccatcaagacctgcacagggagctgctgatgaaccagaagagaggtcttgctccccagaataaaccggaattgcagaaagtgatggagaaacgcaagcgcgatcaagtgatcaagcagaaggaggaagaagcacagaagaagaagtctgacctggaaatcgagttgctgaaaagacaacagaaattggagcaactcgaactcgagaaacaaaaactgcaggaagagcaggaaaatgcgcctgaatttgtgaaagtcaagggcaacctccgccgcacaggtcaggaagtggcccaggcacaagagagttag

SEQ ID NO: 102286 - DNA, 204 bp, Artificial Sequence
  derived and/or modified sequence
atggccgagcccgactacatcgaggacgacaaccccgagctgatcaggccacagaaacttattaatcctgtgaagacttctcgaaatcatcaggatctgcatcgcgagttgcttatgaaccaaaaacgcggtttggccccccagaacaagccggagctccagaaggtgatggaaaaacggaagagggatcaggttatcaaatag

SEQ ID NO: 102287 - DNA, 306 bp, Artificial Sequence
  derived and/or modified sequence
atggccgagcccgactacatcgaggacgacaaccccgagctgatcagaccccaaaagctcattaatccagttaagacgtcaagaaatcatcaggatttacacagagaattgcttatgaatcagaaaaggggtctcgctccccagaataaaccagagctccagaaggttatggaaaagcgcaagagggatcaggtgataaagcagaaggaagaagaggcacagaagaaaaaaagtgacttggaaatagagctgttgaaacggcaacaaaaactcgagcagttggaactcgagaaacagaaactgtag

SEQ ID NO: 102288 - DNA, 396 bp, Artificial Sequence
  derived and/or modified sequence
atggccgagcccgactacatcgaggacgacaaccccgagctgatcaggccccaaaagctgatcaaccctgtgaagacctcgagaaaccaccaagatcttcaccgggagctgttgatgaatcagaaaagaggcctcgcccctcaaaataaacccgagcttcaaaaggtcatggagaagaggaagagggaccaggtcatcaaacagaaggaggaagaggcccaaaaaaaaaagagcgatttagagatcgagttactgaaacgtcagcaaaaactggagcagctcgaactggaaaagcagaagctgcaggaagagcaggagaacgcgcctgagttcgtgaaggtgaaaggcaacctgagacggaccgggcaggaagtcgcacaagcacaggagtcctag

SEQ ID NO: 102289 - DNA, 396 bp, Artificial Sequence
  derived and/or modified sequence
atggccgagcccgactacatcgaggacgacaaccccgagctgatcaggccacagaaattgataaatcccgtgaagacctctaggaatcaccaggacctgcacagggagctgcttatgaatcaaaaacgaggactcgctccacagaacaaaccagagctccagaaggtgatggagaagagaaagcgcgaccaggtgattaagcagaaagaagaggaagctcagaagaagaagtcagacttggagatagagctcctgaaaaggcagcagaagctagagcagctggagctggagaaacagaaacttcaggaagagcaagaaaacgcacccgagttcgtgaaagtgaagggcaatttacgaaggacaggacaggaggtcgcacaggctcaggagtcgtag

SEQ ID NO: 102290 - DNA, 255 bp, Artificial Sequence
  derived and/or modified sequence
atggccgagcccgactacatcgaggacgacaaccccgagctgatcaggcctcagaagctgattaatccagtgaagactagccggaaccaccaggacttgcatcgagagcttctgatgaaccagaagcgaggtttggctcctcagaacaaacctgagctacagaaagtgatggagaaaaggaaaagagaccaggtgatcaaacagaaagaagaggaggctcagaagaagaaatccgacctggaaatagagctttag

SEQ ID NO: 102291 - DNA, 282 bp, Artificial Sequence
  derived and/or modified sequence
atggccgagcccgactacatcgaggacgacaaccccgagctgatccgaccacagaagctgatcaatcctgtgaaaacgtctcggaaccaccaggatctgcaccgggagttactgatgaatcagaagaggggtttagccccacagaacaaaccagaactgcagaaggtgatggagaagcggaaacgagatcaggttatcaagcagaaagaggaggaggcccagaaaaaaaagagtgaccttgagatcgaactgctcaagcgccaacaaaaactggagcaatag

SEQ ID NO: 102292 - DNA, 381 bp, Artificial Sequence
  derived and/or modified sequence
atggccgagcccgactacatcgaggacgacaaccccgagctgatccgaccacaaaagcttattaatcccgtgaagacgtcccgcaatcaccaggacctccatagggaactgctcatgaatcagaagcgtggactcgcaccacagaacaagccagagctccagaaagttatggaaaaaagaaaaagagatcaggttatcaagcagaaggaagaagaggcccagaaaaaaaagtccgatctggaaatcgagctcctcaaacggcagcaaaaactcgagcagttggaactggaaaagcagaagctgcaggaggaacaggagaacgctcccgagttcgtcaaagtgaagggaaatctgcggagaaccggccaagaggtggcatag

SEQ ID NO: 102293 - DNA, 378 bp, Artificial Sequence
  derived and/or modified sequence
atggccgagcccgactacatcgaggacgacaaccccgagctgatccgacctcagaagttaatcaacccagtgaagacatcccgcaatcaccaagatctccaccgggaactacttatgaatcaaaagcgcggcttggccccccaaaataaaccagagctccagaaagtaatggaaaagcgcaagagagatcaagtaataaaacagaaagaagaagaggcccagaagaagaaatctgatctggagatcgaactgctcaagcggcagcaaaagcttgagcaactcgagctagagaaacagaagctccaggaagaacaggaaaatgcaccagagttcgtgaaggtgaagggcaatctgcgtcggactggacaggaagtatag

SEQ ID NO: 102294 - DNA, 396 bp, Artificial Sequence
  derived and/or modified sequence
atggccgagcccgactacatcgaggacgacaaccccgagctgatccggccacagaaactaattaatccggtgaaaactagccgtaatcaccaagacctgcatagggaattattaatgaaccaaaaacgtggcttagcccctcagaacaagcctgagctccagaaagtcatggaaaaacgaaagcgtgaccaggtaatcaaacagaaggaggaagaagctcagaagaagaaatcagatctagagatcgaacttcttaagcgacaacagaagctcgaacaactcgagcttgaaaaacagaagctgcaggaggaacaggagaatgccccggagtttgtgaaagtgaagggcaaccttcgcaggacaggacaagaggtggcgcaagcccaagagagctag

SEQ ID NO: 102295 - DNA, 396 bp, Artificial Sequence
  derived and/or modified sequence
atggcagaaccagactacatcgaggacgataatcctgaactaattagaccacagaaattgatcaatcccgtcaagactagtcgtaatcaccaggatttgcatagggaactgctgatgaaccagaagcggggtctggctccacagaacaaacccgaactgcaaaaggtcatggagaagcgcaagcgagaccaggtgataaagcagaaagaggaagaggcgcagaagaaaaagtctgatctcgagatagaattgctcaaaagacagcaaaagctcgaacaactggagctggagaagcaaaaactgcaagaagaacaggaaaatgcccctgagttcgttaaagtgaagggtaatctgcgcagaacaggtcaggaggtcgctcaggctcaggagagttag

SEQ ID NO: 102296 - DNA, 396 bp, Artificial Sequence
  derived and/or modified sequence
atggcagagccggactacattgaggatgacaatcctgagctgatccggccacagaagcttataaatcctgtgaagacgtctcgcaaccaccaggaccttcaccgtgaactgttgatgaatcaaaagcgtgggttggcccctcagaataaaccggagctgcagaaggtgatggagaagcggaaacgggaccaggtgattaaacagaaagaagaggaggcccagaagaaaaaatccgacctagagatagagctgttgaagcggcagcagaaactcgagcagctcgaactggaaaaacagaagcttcaggaagaacaggaaaatgcgccagaattcgtaaaggtcaaaggaaatctgcggaggaccgggcaagaggtcgctcaagcccaggagtcatag

SEQ ID NO: 102297 - DNA, 396 bp, Artificial Sequence
  derived and/or modified sequence
atggctgagcccgactacatcgaagatgacaaccccgagttgatcaggccccagaagctaatcaatcccgtcaaaacctcccggaaccatcaggatctacatcgcgaactgctcatgaatcagaagcgaggcctggcccctcagaacaaaccagaattgcagaaggtcatggaaaagaggaagagggaccaggtcatcaagcagaaagaagaagaagcgcagaaaaaaaaatctgacctggagatcgagctgctaaaacgtcagcaaaaactggaacagctggagctggaaaagcagaagttacaggaggaacaggagaatgcccctgagttcgtgaaggtcaagggcaatctacgcaggactgggcaggaagtggctcaggcacaggaatcttag

SEQ ID NO: 102298 - DNA, 396 bp, Artificial Sequence
  derived and/or modified sequence
atggccgagccggattacattgaggacgacaacccagagctgataagacctcagaagctcattaatccagtcaagaccagcagaaaccaccaggacctgcatcgcgagctgctgatgaatcagaaaagaggtttggctccccagaataaaccggaactacagaaggtgatggagaagcggaaaagggaccaggtgattaaacaaaaggaggaagaggctcaaaaaaagaagtcagacttggagatcgaactcctaaagagacagcaaaagctcgagcagctagaactagagaagcagaagctgcaagaggaacaggagaatgcaccagagtttgttaaagtgaaggggaatcttcggcgtaccggccaggaagtcgctcaagctcaggagtcctag

SEQ ID NO: 102299 - DNA, 396 bp, Artificial Sequence
  derived and/or modified sequence
atggcagagcccgattacatcgaggatgataacccggaacttattcgcccacagaagctaataaacccagtaaaaactagccggaaccaccaagacctgcatcgggaactgcttatgaatcaaaagcggggtctggctcctcagaataaaccagaactgcagaaggtaatggaaaaaaggaagagagatcaggtgataaaacaaaaggaggaagaggcgcagaaaaagaaatccgatcttgaaattgagctgctcaaaagacagcagaaactggaacagcttgagctagaaaaacagaaactgcaagaggaacaggaaaacgcacccgagtttgtgaaagtcaagggcaatctgcgcaggactgggcaagaagtggcacaggcccaggagagctag

SEQ ID NO: 102300 - DNA, 396 bp, Artificial Sequence
  derived and/or modified sequence
atggcagaacctgattacattgaggacgataacccggagcttattagaccgcaaaagctcataaacccagtgaagacaagccggaatcaccaggaccttcatcgggaacttttgatgaaccagaagcggggactggcccctcaaaacaaaccagagctgcagaaagtaatggaaaagagaaagcgtgaccaggtgatcaaacagaaagaagaagaggcgcagaagaagaaaagtgatctggaaattgaacttttgaaacgacagcaaaaactggagcagcttgagctggagaaacagaagctgcaggaagagcaagaaaacgctccagagtttgtgaaagtgaaaggtaatctacgtcggacagggcaggaggtcgctcaagcccaggaaagctag

SEQ ID NO: 102301 - DNA, 273 bp, Artificial Sequence
  derived and/or modified sequence
atggctgagccggattatatcgaagatgacaatcctgaactgataagaccacagaaactaatcaaccctgtgaagaccagtcgaaatcaccaggatctccaccgcgagttgcttatgaatcagaagcggggacttgctccccagaataagcctgaactacagaaagtgatggagaagagaaaaagagaccaagtcatcaaacagaaggaggaggaagcacagaagaagaagtccgatctggaaatcgagctgcttaagcgtcaacagaaatag

SEQ ID NO: 102302 - DNA, 387 bp, Artificial Sequence
  derived and/or modified sequence
atggcagagccagattacattgaagacgacaatcctgagctgatcagaccgcagaaactaatcaacccagtgaaaacttctagaaaccatcaggacctgcatagggagctactgatgaaccagaagaggggcctggcccctcagaacaagcctgagctacagaaagttatggaaaaaaggaagagagaccaggtgatcaaacagaaggaggaggaggcacagaagaagaaatcggacctcgaaatcgaactgctcaaaaggcagcagaagctggaacagcttgagctcgaaaagcagaagctgcaagaagaacaggaaaacgctcccgagtttgtcaaggttaagggtaacctcaggaggaccggacaagaggtcgcccaggcgtag

SEQ ID NO: 102303 - DNA, 396 bp, Artificial Sequence
  derived and/or modified sequence
atggccgaaccagactatattgaagatgacaatcccgagctgatcaggccccaaaagctgatcaatccagtgaagacctcccggaatcatcaggatctccatcgcgagttactgatgaatcagaagaggggattggcacctcagaataagccagagctacaaaaggtgatggaaaagcggaagagggatcaggtcatcaaacagaaggaagaagaggcacagaaaaaaaaatccgacttagagatagagcttctgaagagacagcagaaactggagcagctggagctggaaaagcagaagcttcaggaggagcaggaaaacgctcctgagttcgtgaaagtaaaagggaatctgaggcggactggccaagaagtcgcacaggctcaggagtcctag

SEQ ID NO: 102304 - DNA, 396 bp, Artificial Sequence
  derived and/or modified sequence
atggcagagcccgattatattgaagatgacaatcctgaactcatccgtcctcagaagctcatcaaccctgtaaaaacaagccggaatcatcaagatcttcatagagagctcctgatgaatcagaagcggggactcgccccacaaaataagccagagctgcaaaaggtcatggagaagcggaaaagagaccaggtcattaaacagaaggaggaggaggcccagaaaaagaagagcgacctggagattgaactattaaagagacagcagaaattagaacagctggaactggaaaagcaaaagctccaggaagagcaggagaatgcaccagaattcgtgaaagttaagggtaacctgaggagaactgggcaggaggtcgcccaagcgcaggaaagctag

SEQ ID NO: 102305 - DNA, 204 bp, Artificial Sequence
  derived and/or modified sequence
atggccgagcccgactacatagaagatgacaacccggagttaatccgcccacagaagctgattaacccagtgaaaacctcacgcaaccatcaggacttgcacagagaactgctcatgaatcagaagagaggtttggcccctcagaacaaaccagaattacagaaagtaatggagaagagaaagcgcgaccaggtgattaagtag

SEQ ID NO: 102306 - DNA, 306 bp, Artificial Sequence
  derived and/or modified sequence
atggcagagccggattatattgaggacgataaccccgagctgatccggccacaaaagttgattaacccagtcaagacaagccgaaatcaccaagatctgcaccgagaacttttaatgaatcagaagcgaggtctggccccacagaataaaccggaacttcaaaaagtgatggaaaaaagaaaacgtgaccaggtgattaagcagaaggaggaagaggcacagaaaaaaaaaagtgatctggagatagagctgttgaagagacagcaaaaattggaacagctggaattggagaagcagaagctctag

SEQ ID NO: 102307 - DNA, 396 bp, Artificial Sequence
  derived and/or modified sequence
atggccgagccagattatattgaggatgacaaccctgagctgattcgaccgcaaaaattgatcaacccagtgaagaccagtaggaatcaccaggaccttcatcgggagctcctgatgaatcagaaacgcggtttagcgcctcagaacaagcctgagctgcagaaagtaatggaaaagcggaaacgcgatcaggtgatcaaacaaaaagaagaagaggcacagaagaaaaagagcgaccttgagattgagttgctcaagagacagcaaaagcttgagcagttggagctcgagaagcaaaagctccaggaggaacaagaaaacgcacctgagtttgtcaaggtgaaaggaaatttgcgacgaaccggacaagaagtagcccaggctcaggagtcatag

SEQ ID NO: 102308 - DNA, 396 bp, Artificial Sequence
  derived and/or modified sequence
atggccgagcctgattacatcgaggacgacaatccggaactgattcggcctcagaaattgatcaatcctgtcaagactagtaggaaccatcaagacctgcatcgcgaattacttatgaaccagaaaaggggcctcgcaccgcagaataaaccggagctccagaaggttatggagaaaaggaaaagagaccaagttatcaagcagaaggaggaggaagcccagaagaaaaagtccgacctggaaattgagttattgaaacggcaacagaagctggagcaactggagttggagaaacaaaaactgcaggaggaacaggagaacgcgcctgaatttgtgaaagttaagggaaatctgcgtaggacaggccaggaagtggcccaggcccaagaatcctag

SEQ ID NO: 102309 - DNA, 255 bp, Artificial Sequence
  derived and/or modified sequence
atggcagagcctgactatatcgaagacgacaacccagaactgatcagacctcagaaactaatcaatccggtgaaaacctcacggaaccaccaggatttgcatcgagaactcttgatgaaccagaaaagaggcctggcgccacagaacaaacctgagctacagaaggtaatggaaaagcgaaaacgagaccaggtaattaaacagaaggaagaagaggcccagaaaaaaaagtctgacctggaaattgaattgtag

SEQ ID NO: 102310 - DNA, 282 bp, Artificial Sequence
  derived and/or modified sequence
atggccgagcccgactatattgaagacgacaaccctgaactcatcagaccccaaaaactgattaacccagtcaaaaccagtcgcaaccaccaggacttacaccgcgagcttctgatgaatcaaaagaggggtcttgcacctcagaacaaacccgagctccagaaggtgatggagaagcgcaaacgagaccaggtgatcaagcagaaggaagaggaagctcaaaagaagaaatcagatttggaaatagaactccttaaacgacagcagaagctggaacagtag

SEQ ID NO: 102311 - DNA, 381 bp, Artificial Sequence
  derived and/or modified sequence
atggcagaaccagattacatcgaggacgacaaccccgagctgattagacctcagaaattgatcaacccagtcaagacgagccggaaccaccaggatctgcacagagagctcttgatgaatcagaaacgagggctggcacctcagaacaaacctgaactgcagaaggtgatggaaaagcggaagcgtgaccaggtgattaagcagaaggaagaggaagcgcagaagaagaagagcgatcttgaaatcgaacttctgaagagacaacagaagctggaacagcttgagctggagaaacagaagttacaagaggagcaggaaaacgcacccgagttcgtcaaagtgaagggcaacctgaggagaaccggccaggaggttgcgtag

SEQ ID NO: 102312 - DNA, 378 bp, Artificial Sequence
  derived and/or modified sequence
atggccgagccagactacatagaagatgacaatccagaactgatacgccctcagaaactgataaaccctgtgaagacatcaagaaatcaccaggacctgcaccgggagttgctaatgaatcagaaacgcggtctggcaccccagaataaacctgaactccaaaaagtgatggagaaaaggaagcgtgaccaggtcatcaagcagaaggaggaggaggcccagaaaaagaagtcggacctggagatcgagctgctgaaacgacagcagaagctggagcagttggagctcgaaaaacaaaagctacaggaggaacaggagaacgcccctgaattcgtgaaagtcaaaggcaatttgcgtcggactggccaagaagtttag

SEQ ID NO: 102313 - DNA, 396 bp, Artificial Sequence
  derived and/or modified sequence
atggctgagccggattatatagaggatgataatcctgaactgattcgtccccaaaaactgatcaaccccgtaaagacatcccggaatcaccaggatctacacagggagctgttaatgaatcagaagcggggattagctccacagaacaagcccgagttacagaaagttatggagaaaagaaagcgcgaccaagtgataaagcagaaagaggaggaggctcagaagaagaaatccgacttagaaatagagttactgaaaaggcagcaaaaattggaacagttggaactcgaaaagcagaaactgcaggaagagcaggagaacgcaccggagtttgtgaaggtgaaggggaatctgcgacgcaccgggcaggaagttgctcaggctcaagaatcttag

SEQ ID NO: 102314 - DNA, 36 bp, Artificial Sequence
  derived and/or modified sequence
atgtatcccagcacgaccatggcaaacgccccatag

SEQ ID NO: 102315 - DNA, 36 bp, Artificial Sequence
  derived and/or modified sequence
atgtaccccagcaccaccatggccaatgccccctag

SEQ ID NO: 102316 - DNA, 36 bp, Artificial Sequence
  derived and/or modified sequence
atgtatccttctacaactatggccaacgctccctag

SEQ ID NO: 102317 - DNA, 986 bp, Artificial Sequence
  derived and/or modified sequence
attgcactgtgtgagcagaacacaatttatccttccactgctgatgggcatttgggcggtttgcagtttgggatctggccagttctgctgttgtgagcattcttaagcctgcctttcggtgaattcacacgcccgtgggaagttcatatgagccataacaaggattggaagaagttttagaagtaacctcctgggagtccatgaattagcagcagtgagaggctagaggcctgacaaagaattgagaagcagctgctatatcccaagtggcaaatgccagtgtggatggagaagagagagcttcattctgtggcaggaaagcttggctgctgacaatgagactgcacccttgggatttgtcccttggattctttagcatctgagctctaacctctgaaacacaagaaaaaatgagcaagatgtttgctcagcatcaattcagataccgctgaatagaaggcaacacccaaccacacagccagaggcctcctgggtaaatcggggactgctctcctctgacccctctttctcctgcctctaccccttggcttcacagcaattattcattttttaacactcaaatgctgggtacctgttgcctatgtcggggcacgctgttactccctacacacaggtaaaattgattaaccgaatcttgccctccactggcttactgtgcaacggtagagactggaagcaacagacgagggtgagctttggaagagctgatgaggccatgattaatttcaactgagaggacgctcactctcagagcacagcttccagaggagagaagatacccccagcatccatgagaagagacctccgggagaagcttgtgtgggtgtgccgaccactggccccagttgaggtcccagccaacatcagctccgacttccagccatgctcaccaacttctcctgcccactccctatcaaggaaaagtcccataatgtatccatcaaccaccatggctaatgcacccg

SEQ ID NO: 102318 - DNA, 36 bp, Artificial Sequence
  derived and/or modified sequence
atgtaccccagcaccaccatggccaacgccccctag

SEQ ID NO: 102319 - protein, 445 aa, Artificial Sequence
  derived and/or modified sequence
MYPSTTMANAPGLVSCTFFLAVNGLYSSSDDVIELTPSNFNREVIQSDSLWLVEFYAPWCGHCQRLTPEWKKAATALKDVVKVGAVDADKHHSLGGQYGVQGFPTIKIFGSNKNRPEDYQGGRTGEAIVDAALSALRQLVKDRLGGRSGGYSSGKQGRSDSSSKKDVIELTDDSFDKNVLDSEDVWMVEFYAPWCGHCKNLEPEWAAAASEVKEQTKGKVKLAAVDATVNQVLASRYGIRGFPTIKIFQKGESPVDYDGGRTRSDIVSRALDLFSDNAPPPELLEIINEDIAKRTCEEHQLCVVAVLPHILDTGAAGRNSYLEVLLKLADKYKKKMWGWLWTEAGAQSELETALGIGGFGYPAMAAINARKMKFALLKGSFSEQGINEFLRELSFGRGSTAPVGGGAFPTIVEREPWDGRDGELPVEDDIDLSDVELDDLGKDEL

SEQ ID NO: 102320 - DNA, 1851 bp, Artificial Sequence
  derived and/or modified sequence
gtgcttcaaacaggaattaatagaatcccaccaggtggtgtttgtgaggcgtagatggcgaggatatctgcagctgcagtttgctcattctcacggctgcactgcattgcactgtgtgagcagaacacaatttatccttccactgctgatgggcatttgggcggtttgcagtttgggatctggccagttctgctgttgtgagcattcttaagcctgcctttcggtgaattcacacgcccgtggggctcaccaacttctcctgcccactccctatcaaggaaaagtcccataatgtatccatcaaccaccatggctaatgcacccggtctggtgagctgtaccttctttctggcagtgaatggtctgtattcctctagtgatgatgtgatcgaattaactccatcgaatttcaaccgagaagttattcagagtgatagtttgtggcttgtagaattctatgctccatggtgtggtcactgtcaaagattaacaccagaatggaagaaagcagcaactgcattaaaagatgttgtcaaagttggtgcagttgatgcagataagcatcattccctaggaggtcagtatggtgttcagggatttcctaccattaagatttttggatccaacaaaaacagaccagaagattaccaaggtggcagaactggtgaagccattgtagatgctgcgctgagtgctctgcgccagctcgtgaaggatcgcctcgggggacggagcggaggatacagttctggaaaacaaggcagaagtgatagttcaagtaagaaggatgtgattgagctgacagacgacagctttgataagaatgttctggacagtgaagatgtttggatggttgagttctatgctccttggtgtggacactgcaaaaacctagagccagagtgggctgccgcagcttcagaagtaaaagagcagacgaaaggaaaagtgaaactggcagctgtggatgctacagtcaatcaggttctggcctcccgatacgggattagaggatttcctacaatcaagatatttcagaaaggcgagtctcctgtggattatgacggtgggcggacaagatccgacatcgtgtcccgggcccttgatttgttttctgataacgccccacctcctgagctgcttgagattatcaacgaggacattgccaagaggacgtgtgaggagcaccagctctgtgttgtggctgtgctgccccatatccttgatactggagctgcaggcagaaattcttatctggaagttcttctgaagttggcagacaaatacaaaaagaaaatgtgggggtggctgtggacagaagctggagcccagtctgaacttgagaccgcgttggggattggagggtttgggtaccccgccatggccgccatcaatgcacgcaagatgaaatttgctctgctaaaaggctccttcagtgagcaaggcatcaacgagtttctcagggagctctcttttgggcgtggctccacggcacctgtaggaggcggggctttccctaccatcgttgagagagagccttgggacggcagggatggcgagcttcccgtggaggatgacattgacctcagtgatgtggagcttgatgacttagggaaagatgagttgtgagagccacaacagaggcttcagaccattttcttttcttgggagccagtggatttttccagcagtgaagggacattctctacactcagatgactctaccagtggccttttaaccaagaagtagtacttgattggtcatttgaaaacactgcaacagtgaacttttgcatctcaagaaaacattgaaaaattctatgaattgttgtagccggtgaattgagtcgt

SEQ ID NO: 102321 - DNA, 1338 bp, Artificial Sequence
  derived and/or modified sequence
atgtacccgtctacaaccatggccaacgcccctggcttggtcagctgtacattctttcttgctgtcaatggtttgtattcctcaagtgacgatgtcatagaactgactccttctaatttcaaccgtgaggttatccagtctgatagcctgtggttagtcgagttctacgctccctggtgcggacattgccagaggctgacgcccgagtggaaaaaggcagccacggctctgaaggacgttgtaaaagttggtgccgtcgacgccgacaagcaccactccctgggtggccagtatggagtgcaaggctttccaaccatcaagatctttggttctaataagaaccgacctgaggattatcagggcgggcggactggcgaggccattgtcgacgctgccctgtccgctctgagacaactcgtgaaggacaggctgggaggacgaagcggtggctacagttctggtaagcagggccgaagtgattctagctccaagaaggacgttatcgagctgacagatgattcattcgacaaaaacgttctggactccgaggatgtgtggatggtagagttttacgccccatggtgtggacactgcaaaaatttagagccagagtgggcggccgcagcttctgaagtcaaggaacagacaaagggcaaagtcaaactggcggcggttgacgcaactgtgaatcaggtccttgcgagcagatacgggatacgcggcttccctacaatcaaaatctttcagaagggcgagtctccggtcgactatgacggggggaggacccggtccgatatcgtgtctcgggcactggacctgttctccgataatgcgcccccccccgagttattagagattatcaacgaggatattgccaagagaacgtgcgaggagcatcagctgtgtgtggttgcggttcttcctcacattcttgataccggggcagcagggcggaatagctatcttgaagtcctccttaaactggctgataagtacaagaaaaagatgtggggctggctttggaccgaagcgggcgcccaatccgaattagagactgccttggggattggcgggttcggttacccagccatggctgccattaatgccagaaagatgaagtttgctctgcttaagggttccttttctgagcaggggatcaacgagttcctgcgggaattgtcattcggcagagggtccacagctcctgttggtggaggcgcattccctacaatcgttgagcgcgagccttgggacgggcgggatggggagctccctgttgaagacgacattgatctatccgacgtggagctcgacgatctgggcaaagacgagctctag

SEQ ID NO: 102322 - DNA, 1338 bp, Artificial Sequence
  derived and/or modified sequence
atgtaccccagcaccaccatggccaatgcccctggcctggtgtcctgcaccttcttcctggccgtgaatggcctgtacagcagcagtgatgatgtgattgagctgacccccagcaacttcaaccgggaggtgatccagagcgacagcctgtggctggtggagttctacgccccctggtgtggccactgccagaggctgaccccagagtggaagaaggccgccacagccctgaaggatgtggtgaaggtgggcgctgtggatgctgacaagcaccacagcctgggcggccagtatggagtgcagggcttccccaccatcaagatcttcggcagcaacaagaacagacctgaggactaccagggcggccgcactggagaggccatcgtggatgctgccctgagcgccctgcggcagctggtgaaggaccggctgggcggccgcagcggcggctacagcagcggcaagcagggccgcagtgacagcagcagcaagaaggatgtgattgagctgacagatgacagctttgacaagaatgtgctggacagtgaagatgtgtggatggtggagttctacgccccctggtgtggccactgcaagaacctggagcctgagtgggccgccgccgccagcgaggtgaaggagcagaccaagggcaaggtgaagctggccgctgtggatgccaccgtgaaccaggtgctggccagccgctatggcatccggggcttccccaccatcaagatcttccagaagggggagagccctgtggactatgatggcggccgcaccaggagtgacatcgtgtcccgggccctggacctcttcagtgacaatgcccctcctcctgagctgctggagatcatcaatgaagatattgccaagaggacctgtgaggagcaccagctgtgtgtggtggccgtgctgccccacatcctggacacaggagctgctggcaggaacagctacctggaggtgctgctgaagctggccgacaagtacaagaagaagatgtggggctggctgtggacagaggccggggcccagagcgagctggagacagccctgggcatcggcggcttcggctacccagccatggccgccatcaatgccaggaagatgaagtttgccctgctgaagggcagcttcagcgagcagggcatcaatgagttcctgcgggagctgagctttggccggggcagcacagcccctgtgggcggcggggccttccccaccatcgtggagcgggagccctgggatggaagagatggagagctgcctgtggaggatgacatcgacctgagtgatgtggagctggatgacctgggcaaggatgagctgtag

SEQ ID NO: 102323 - DNA, 1338 bp, Artificial Sequence
  derived and/or modified sequence
atgtaccccagcaccaccatggccaacgcccccggcctggtgagctgtaccttcttcttggctgtgaatggcctctacagctccagtgacgacgttattgagcttaccccgtccaacttcaaccgagaagttattcagagtgattcattatggctggtggagttttacgccccttggtgcgggcactgtcagcgcctgacacccgaatggaagaaggcagcgaccgcactgaaagatgtcgtaaaggtgggagcagtcgacgccgataagcaccattctctcggtgggcagtatggcgtgcaaggcttccctacgataaagatcttcggatccaacaagaaccgacccgaggattaccaaggtggtcgcacgggtgaggcgatagtggatgctgccctcagtgccctgaggcagctggtaaaggaccggctggggggcagaagcggaggctacagctccggcaagcagggtcgatcagatagctcgagtaaaaaagacgtcatagagcttacagatgactcattcgacaagaatgtgctggatagcgaagatgtgtggatggttgaattttatgctccttggtgcggtcattgtaagaatctggagccggaatgggctgcagctgcttctgaagtgaaggaacagactaagggcaaggtcaaattagctgctgtagatgcgacagttaatcaagtcctggcatctcgttacggcattcgcggttttcctaccatcaaaatattccagaaaggggagtcgccagtagattacgacgggggacgcacacgcagtgacatagtgtcccgtgcactggatctgtttagtgacaatgcaccccccccagaactgttggagataattaatgaagacatcgccaagcgtacatgcgaagaacatcaactgtgtgtggtggccgtcctcccccatatcttggacaccggcgctgccggaagaaactcttatctggaggttctcctgaaactagccgataagtacaaaaaaaaaatgtggggttggctgtggaccgaggcaggcgcccagtcagaactggagaccgcactgggtattggtggctttggttatcctgccatggctgccatcaacgcccgtaaaatgaagtttgccctgctgaagggctccttcagtgagcagggcatcaacgagtttttgagggagctgtctttcggacgggggagtaccgctccagtagggggtggcgccttcccaacaatagtggaacgtgagccctgggacggtcgggatggtgagctgcccgtagaggatgatatcgacctgagcgacgtcgaactagacgatctgggtaaggacgagctctag

SEQ ID NO: 102324 - DNA, 1338 bp, Artificial Sequence
  derived and/or modified sequence
atgtaccccagtactaccatggctaacgcccctggcctagtgtcatgcacattttttcttgccgttaatgggctgtacagttcttctgacgacgttatcgagctgactcccagcaatttcaatagggaagtcatccaaagtgattctttgtggctggtggaattctacgccccatggtgcggtcactgtcagcgtctgactcctgaatggaaaaaagcagctaccgcccttaaggatgtagtcaaagtgggggctgttgatgctgataaacatcacagcttgggaggccagtacggcgttcaaggcttccctactattaaaatatttggctccaataagaacagacccgaggattaccagggtgggagaactggggaagcaattgtggatgctgccttaagcgcgctgcgtcagttggtgaaggacaggctgggcggtcgctcgggcggatattcatcaggcaaacagggaaggtcggactcgtcaagcaagaaagacgtgatcgagttaacagatgacagtttcgacaaaaatgtactcgatagcgaagatgtgtggatggttgagttctatgctccgtggtgtgggcactgtaaaaacttagaaccagagtgggcagcagcggcatctgaagtcaaagagcaaactaagggcaaagtgaagctcgctgccgtggacgccacagtaaaccaagtgttggcttccaggtatggaatcagggggtttcctacaataaagatttttcagaaaggtgaatcccctgttgactatgatggtggtcggacgagaagcgatattgtttctagagccctggacttgttcagcgacaatgccccacccccagagctgctggaaataatcaacgaggatatcgcaaagaggacgtgtgaggagcatcagctgtgcgttgtcgccgtgttgcctcacattctagatactggcgcagcaggtagaaactcctacctggaagtcttactgaagctggcggacaagtacaagaagaagatgtggggctggctgtggaccgaggccggtgcacagtccgagttagaaaccgccctgggaatcgggggtttcggctaccccgcaatggctgccattaatgccagaaaaatgaagtttgcgctgctgaagggatctttctctgaacagggcatcaacgaattcctcagggagctgtcttttggacggggaagcactgcccctgtgggaggcggagcatttcctacgatcgtcgagagggagccttgggatgggagagacggggaactacccgtggaggatgacattgacctaagtgacgtagaactggacgacctcggaaaagatgagctctag

SEQ ID NO: 102325 - DNA, 1338 bp, Artificial Sequence
  derived and/or modified sequence
atgtaccccagcaccaccatggccaacgcccccggcctggtgagctgcaccttcttcctggccgtgaacggcctgtacagcagcagcgacgacgtgatcgagctgacccccagcaacttcaacagagaggtgatccagagcgacagcctgtggctggtggagttctacgccccctggtgcggccactgccagagactgacccccgagtggaagaaggccgccaccgccctgaaggacgtggtgaaggtgggcgccgtggacgccgacaagcaccacagcctgggcggccagtacggcgtgcagggcttccccaccatcaagatcttcggcagcaacaagaacagacccgaggactaccagggcggcagaaccggcgaggccatcgtggacgccgccctgagcgccctgagacagctggtgaaggacagactgggcggcagaagcggcggctacagcagcggcaagcagggcagaagcgacagcagcagcaagaaggacgtgatcgagctgaccgacgacagcttcgacaagaacgtgctggacagcgaggacgtgtggatggtggagttctacgccccctggtgcggccactgcaagaacctggagcccgagtgggccgccgccgccagcgaggtgaaggagcagaccaagggcaaggtgaagctggccgccgtggacgccaccgtgaaccaggtgctggccagcagatacggcatcagaggcttccccaccatcaagatcttccagaagggcgagagccccgtggactacgacggcggcagaaccagaagcgacatcgtgagcagagccctggacctgttcagcgacaacgcccccccccccgagctgctggagatcatcaacgaggacatcgccaagagaacctgcgaggagcaccagctgtgcgtggtggccgtgctgccccacatcctggacaccggcgccgccggcagaaacagctacctggaggtgctgctgaagctggccgacaagtacaagaagaagatgtggggctggctgtggaccgaggccggcgcccagagcgagctggagaccgccctgggcatcggcggcttcggctaccccgccatggccgccatcaacgccagaaagatgaagttcgccctgctgaagggcagcttcagcgagcagggcatcaacgagttcctgagagagctgagcttcggcagaggcagcaccgcccccgtgggcggcggcgccttccccaccatcgtggagagagagccctgggacggcagagacggcgagctgcccgtggaggacgacatcgacctgagcgacgtggagctggacgacctgggcaaggacgagctgtag

SEQ ID NO: 102326 - protein, 437 aa, Artificial Sequence
  derived and/or modified sequence
MILGLVSCTFFLAVNGLYSSSDDVIELTPSNFNREVIQSDSLWLVEFYAPWCGHCQRLTPEWKKAATALKDVVKVGAVDADKHHSLGGQYGVQGFPTIKIFGSNKNRPEDYQGGRTGEAIVDAALSALRQLVKDRLGGRSGGYSSGKQGRSDSSSKKDVIELTDDSFDKNVLDSEDVWMVEFYAPWCGHCKNLEPEWAAAASEVKEQTKGKVKLAAVDATVNQVLASRYGIRGFPTIKIFQKGESPVDYDGGRTRSDIVSRALDLFSDNAPPPELLEIINEDIAKRTCEEHQLCVVAVLPHILDTGAAGRNSYLEVLLKLADKYKKKMWGWLWTEAGAQSELETALGIGGFGYPAMAAINARKMKFALLKGSFSEQGINEFLRELSFGRGSTAPVGGGAFPTIVEREPWDGRDGELPVEDDIDLSDVELDDLGKDEL

SEQ ID NO: 102327 - DNA, 1314 bp, Artificial Sequence
  derived and/or modified sequence
atgatcttaggtctggtgtcttgtacctttttcctggccgtgaatggattgtactcaagttctgacgacgtcatagagttgactccctctaactttaatcgggaagtcatccaaagtgattccttgtggctggttgagttttatgccccctggtgcggccactgccagaggttaactcctgaatggaaaaaagccgccaccgccttaaaggatgttgtaaaggtgggcgccgtggacgccgataagcaccatagtctaggcggacagtacggggtgcagggttttcctacaatcaagatctttgggtcaaataagaataggccggaggactatcagggtggaaggaccggcgaggccatcgtggacgctgctctctccgcgctgcggcagctggtgaaagaccgcctgggtgggcggtccggcggatacagctcaggaaagcaaggcaggtccgatagcagctctaagaaggacgtgattgagttgactgacgactccttcgataagaatgtgcttgatagtgaagacgtctggatggtggagttctacgcaccctggtgtggacattgtaagaatttagaacccgagtgggcggcagccgcctccgaggttaaggaacagacaaagggcaaagtgaaactggcagcagtcgatgccaccgtaaatcaggtacttgccagcaggtacgggatcagaggcttccccactatcaaaatcttccagaagggggagagccctgttgattacgacggaggaagaacccggagtgacatcgtgagtagagctctagacctgtttagcgacaatgctccccctcccgagctgctggagatcattaacgaggatatcgccaagcgcacctgcgaggagcaccagctgtgcgtggtggcggtcttgccccatattctcgacacaggcgcggccggccgaaactcgtacctcgaagtcttactgaagctagctgacaaatacaagaagaagatgtggggctggctttggacggaggcaggcgcacagtcagagttagagaccgcattaggtattgggggattcggctatcccgcaatggcagcaataaatgcccgcaagatgaagtttgccctcctcaaaggcagtttcagcgagcagggcattaatgaattcctgcgggagctgtcatttgggaggggctccaccgcccctgttggtgggggagcattccccaccattgtggagcgcgaaccttgggacggtagagacggcgaactgcctgttgaggacgacattgacctgagtgatgtcgaattagacgatctgggtaaggacgaattgtag

SEQ ID NO: 102328 - DNA, 1314 bp, Artificial Sequence
  derived and/or modified sequence
atgatcctgggcctggtgtcctgcaccttcttcctggccgtgaatggcctgtacagcagcagtgatgatgtgattgagctgacccccagcaacttcaaccgggaggtgatccagagcgacagcctgtggctggtggagttctacgccccctggtgtggccactgccagaggctgaccccagagtggaagaaggccgccacagccctgaaggatgtggtgaaggtgggcgctgtggatgctgacaagcaccacagcctgggcggccagtatggagtgcagggcttccccaccatcaagatcttcggcagcaacaagaacagacctgaggactaccagggcggccgcactggagaggccatcgtggatgctgccctgagcgccctgcggcagctggtgaaggaccggctgggcggccgcagcggcggctacagcagcggcaagcagggccgcagtgacagcagcagcaagaaggatgtgattgagctgacagatgacagctttgacaagaatgtgctggacagtgaagatgtgtggatggtggagttctacgccccctggtgtggccactgcaagaacctggagcctgagtgggccgccgccgccagcgaggtgaaggagcagaccaagggcaaggtgaagctggccgctgtggatgccaccgtgaaccaggtgctggccagccgctatggcatccggggcttccccaccatcaagatcttccagaagggggagagccctgtggactatgatggcggccgcaccaggagtgacatcgtgtcccgggccctggacctcttcagtgacaatgcccctcctcctgagctgctggagatcatcaatgaagatattgccaagaggacctgtgaggagcaccagctgtgtgtggtggccgtgctgccccacatcctggacacaggagctgctggcaggaacagctacctggaggtgctgctgaagctggccgacaagtacaagaagaagatgtggggctggctgtggacagaggccggggcccagagcgagctggagacagccctgggcatcggcggcttcggctacccagccatggccgccatcaatgccaggaagatgaagtttgccctgctgaagggcagcttcagcgagcagggcatcaatgagttcctgcgggagctgagctttggccggggcagcacagcccctgtgggcggcggggccttccccaccatcgtggagcgggagccctgggatggaagagatggagagctgcctgtggaggatgacatcgacctgagtgatgtggagctggatgacctgggcaaggatgagctgtag

SEQ ID NO: 102329 - DNA, 1314 bp, Artificial Sequence
  derived and/or modified sequence
atgatcctgggcctggtgagctgcaccttcttcctggccgtgaacggactctactcttcctctgacgatgtcatagagttgactccatcgaatttcaacagagaagtgattcaatctgactctttgtggctagtggaattctatgcaccctggtgtggacactgtcagcgcttaacccccgaatggaagaaagcagctacagctctgaaagatgttgtgaaggtgggggccgtcgatgccgataagcaccactcactgggggggcaatacggtgtgcaaggcttccccactatcaaaatctttggtagcaacaagaaccggcccgaagattatcagggcggaagaaccggagaagccatcgtggacgcagcacttagcgcactcaggcagttggttaaggatcgactgggaggaaggtccgggggctattccagcggcaaacagggccgatccgatagtagcagtaagaaggatgtgatagagttgaccgacgacagcttcgacaaaaacgtccttgacagtgaggatgtctggatggtggaattttatgcaccgtggtgtggacactgcaaaaatttggagcctgagtgggccgccgctgcctcggaagtcaaggagcaaactaaagggaaagtgaaactggccgccgtggatgcaactgtcaaccaagtgctcgctagtcgatacggaatcagagggtttcctacaatcaagatctttcagaagggcgaatctccagttgattatgacggtggtcgcacaaggtcagacatcgtctcccgcgcattggacctcttttctgacaatgcacctcctcccgaactgcttgagattatcaacgaagacatcgctaagaggacatgcgaagagcaccaactgtgtgtagtggctgtgctaccacacattctagatacaggcgccgctggcagaaattcatacctagaggtgctactgaaattagcagacaagtacaagaagaagatgtggggatggctgtggaccgaggcaggagcacagagcgaattggagactgctctgggcatcggtggatttggatatccggcgatggctgcaatcaacgctcgcaaaatgaagttcgccctactgaagggttcattctctgaacagggaatcaacgagtttcttcgagaactctcgtttgggaggggctccacggctcccgtgggtgggggagcatttccaactattgtcgaaagggaaccctgggatgggcgagatggagagcttcctgtggaagatgatattgacctgtccgatgttgagctggatgacctcggtaaagatgaactatag

SEQ ID NO: 102330 - DNA, 1314 bp, Artificial Sequence
  derived and/or modified sequence
atgatcttagggctagtgagctgtacgttctttttggccgtgaacggtctctactcgagctcagatgacgttatcgagctaaccccctctaacttcaatagggaggtgatccaatcagactctctgtggctcgttgagttttacgcaccttggtgcgggcattgccagaggctgacccccgaatggaagaaggcagccacggcccttaaggacgtggttaaggtgggcgcagtggacgccgacaagcatcactctttaggtggacagtacggggtgcaggggttccccaccattaaaatcttcgggtcaaataagaatcgcccagaggactaccaggggggtcgaactggtgaagccatagtggatgcagctctcagcgccttgaggcagctggtcaaagataggctcggtggacgcagcggcggatattcatcaggaaagcagggcaggtccgatagttcctcaaaaaaggatgtcattgagctgaccgacgatagttttgataagaacgtactggactccgaggacgtctggatggtagaattctacgccccatggtgtgggcactgcaaaaatctcgagcccgagtgggctgccgcagcctctgaggtcaaggagcagacaaagggaaaggtcaaactggctgccgtcgatgccacggtaaatcaggtcctggcaagccgttatggaattcggggattcccgaccattaagatcttccagaaaggcgagtccccggtggactatgatggtggtagaacacggtccgatatcgtgagcagagcactggatctcttctccgacaacgcccctccacccgagctgctggaaattattaatgaagatatcgctaagaggacatgtgaggagcatcagctgtgtgtcgtggccgtgctgccacacattcttgatacaggcgcagcgggacgcaattcttatctggaagtgctgctgaaactcgccgacaaatataagaagaagatgtggggatggttatggacagaggctggtgctcaatcggagctggaaaccgctctgggcataggcggatttggatatcccgcaatggctgcaattaacgctcggaagatgaaattcgccttactgaaaggcagtttttccgagcaaggcattaacgagtttctcagggagttaagctttggacgcggatcaacggctcccgtgggtggaggcgcttttcctaccatcgtggagcgggaaccatgggacgggagggacggtgaactgccagtcgaggacgacatcgacctttccgatgtggaactggatgacctgggtaaggacgagttgtag

SEQ ID NO: 102331 - DNA, 2338 bp, Artificial Sequence
  derived and/or modified sequence
agcgccttccggcccgcccccgcgcggccgcccctcggaccaccggactggcctggggcgggacgtgggcgcgggggcgcggcgtgcggcacgctgcagggctgaagcggcggcggcggtggggactgcacgtagcccggcgctcggcatggctctcctggtgctcggtctggtgagctgtaccttctttctggcagtgaatggtctgtattcctctagtgatgatgtgatcgaattaactccatcgaatttcaaccgagaagttattcagagtgatagtttgtggcttgtagaattctatgctccatggtgtggtcactgtcaaagattaacaccagaatggaagaaagcagcaactgcattaaaagatgttgtcaaagttggtgcagttgatgcagataagcatcattccctaggaggtcagtatggtgttcagggatttcctaccattaagatttttggatccaacaaaaacagaccagaagattaccaaggtggcagaactggtgaagccattgtagatgctgcgctgagtgctctgcgccagctcgtgaaggatcgcctcgggggacggagcggaggatacagttctggaaaacaaggcagaagtgatagttcaagtaagaaggatgtgattgagctgacagacgacagctttgataagaatgttctggacagtgaagatgtttggatggttgagttctatgctccttggtgtggacactgcaaaaacctagagccagagtgggctgccgcagcttcagaagtaaaagagcagacgaaaggaaaagtgaaactggcagctgtggatgctacagtcaatcaggttctggcctcccgatacgggattagaggatttcctacaatcaagatatttcagaaaggcgagtctcctgtggattatgacggtgggcggacaagatccgacatcgtgtcccgggcccttgatttgttttctgataacgccccacctcctgagctgcttgagattatcaacgaggacattgccaagaggacgtgtgaggagcaccagctctgtgttgtggctgtgctgccccatatccttgatactggagctgcaggcagaaattcttatctggaagttcttctgaagttggcagacaaatacaaaaagaaaatgtgggggtggctgtggacagaagctggagcccagtctgaacttgagaccgcgttggggattggagggtttgggtaccccgccatggccgccatcaatgcacgcaagatgaaatttgctctgctaaaaggctccttcagtgagcaaggcatcaacgagtttctcagggagctctcttttgggcgtggctccacggcacctgtaggaggcggggctttccctaccatcgttgagagagagccttgggacggcagggatggcgagcttcccgtggaggatgacattgacctcagtgatgtggagcttgatgacttagggaaagatgagttgtgagagccacaacagaggcttcagaccattttcttttcttgggagccagtggatttttccagcagtgaagggacattctctacactcagatgactctaccagtggccttttaaccaagaagtagtacttgattggtcatttgaaaacactgcaacagtgaacttttgcatctcaagaaaacattgaaaaattctatgaattgttgtagccggtgaattgagtcgtattctgtcacataatattttgaagaaaacttggctgtcgaaacatttttctctctgactgctgcttgaatgttcttggaggctgtttcttatgtatgggttttttttaatgtgatcccttcatttgaatattaatggctttttccattaaagaataaaatattttggacaatgccgataaatgtatgaagttagtatccacatcataaattcagagtgatgtttagcagtaaatcaatattttgaagtgatacacagatgtctttcctccccacaaacttttttaaacaaaaaacaagacctcttttctttagatggtgccacctatgcccaccacaacagagattttacatggaaaccgggctcagtgagaactgatttcctgcccaatatttgtctttgggctgtctctagtgactaattattaaggaatctagctggttatacagttcaaggctttctatgttgttaatgaacctcaaaatagccgttaagacatgaaatacagcagcaggttaccaatgcgaacaggtagttcgcatttatgtaaaacattcagaaaatgaagttttgaatttgttggaacattcaaaggacttgagagcattttattgtaacttaaaaaaataaatacaactgtcactaa

SEQ ID NO: 102332 - DNA, 1805 bp, Artificial Sequence
  derived and/or modified sequence
acgctgcagggctgaagcggcggcggcggtggggactgcacgtagcccggcgctcggcatggctctcctggtgctcgcctgcttgtaacagcatgaagaggagaggactgacgttattgctgtccttgattggcaaagagaagtgaaagtacctaattctgccacagtctacctaatgatgctctgtggattatacccctgcattctccagcccttcggttagaaatttgggtctatctaattatatgatcttaggtctggtgagctgtaccttctttctggcagtgaatggtctgtattcctctagtgatgatgtgatcgaattaactccatcgaatttcaaccgagaagttattcagagtgatagtttgtggcttgtagaattctatgctccatggtgtggtcactgtcaaagattaacaccagaatggaagaaagcagcaactgcattaaaagatgttgtcaaagttggtgcagttgatgcagataagcatcattccctaggaggtcagtatggtgttcagggatttcctaccattaagatttttggatccaacaaaaacagaccagaagattaccaaggtggcagaactggtgaagccattgtagatgctgcgctgagtgctctgcgccagctcgtgaaggatcgcctcgggggacggagcggaggatacagttctggaaaacaaggcagaagtgatagttcaagtaagaaggatgtgattgagctgacagacgacagctttgataagaatgttctggacagtgaagatgtttggatggttgagttctatgctccttggtgtggacactgcaaaaacctagagccagagtgggctgccgcagcttcagaagtaaaagagcagacgaaaggaaaagtgaaactggcagctgtggatgctacagtcaatcaggttctggcctcccgatacgggattagaggatttcctacaatcaagatatttcagaaaggcgagtctcctgtggattatgacggtgggcggacaagatccgacatcgtgtcccgggcccttgatttgttttctgataacgccccacctcctgagctgcttgagattatcaacgaggacattgccaagaggacgtgtgaggagcaccagctctgtgttgtggctgtgctgccccatatccttgatactggagctgcaggcagaaattcttatctggaagttcttctgaagttggcagacaaatacaaaaagaaaatgtgggggtggctgtggacagaagctggagcccagtctgaacttgagaccgcgttggggattggagggtttgggtaccccgccatggccgccatcaatgcacgcaagatgaaatttgctctgctaaaaggctccttcagtgagcaaggcatcaacgagtttctcagggagctctcttttgggcgtggctccacggcacctgtaggaggcggggctttccctaccatcgttgagagagagccttgggacggcagggatggcgagcttcccgtggaggatgacattgacctcagtgatgtggagcttgatgacttagggaaagatgagttgtgagagccacaacagaggcttcagaccattttcttttcttgggagccagtggatttttccagcagtgaagggacattctctacactcagatgactctaccagtggccttttaaccaagaagtagtacttgattggtcatttgaaaacactgcaacagtgaacttttgcatctcaagaaaacattgaaaaattctatgaattgttgtagccggtgaattgagtcgtattctgtcacataatattttgaag

SEQ ID NO: 102333 - DNA, 1314 bp, Artificial Sequence
  derived and/or modified sequence
atgatcctgggcctggtgagctgcaccttcttcctggccgtgaacggcctgtacagcagcagcgacgacgtgatcgagctgacccccagcaacttcaacagagaggtgatccagagcgacagcctgtggctggtggagttctacgccccctggtgcggccactgccagagactgacccccgagtggaagaaggccgccaccgccctgaaggacgtggtgaaggtgggcgccgtggacgccgacaagcaccacagcctgggcggccagtacggcgtgcagggcttccccaccatcaagatcttcggcagcaacaagaacagacccgaggactaccagggcggcagaaccggcgaggccatcgtggacgccgccctgagcgccctgagacagctggtgaaggacagactgggcggcagaagcggcggctacagcagcggcaagcagggcagaagcgacagcagcagcaagaaggacgtgatcgagctgaccgacgacagcttcgacaagaacgtgctggacagcgaggacgtgtggatggtggagttctacgccccctggtgcggccactgcaagaacctggagcccgagtgggccgccgccgccagcgaggtgaaggagcagaccaagggcaaggtgaagctggccgccgtggacgccaccgtgaaccaggtgctggccagcagatacggcatcagaggcttccccaccatcaagatcttccagaagggcgagagccccgtggactacgacggcggcagaaccagaagcgacatcgtgagcagagccctggacctgttcagcgacaacgcccccccccccgagctgctggagatcatcaacgaggacatcgccaagagaacctgcgaggagcaccagctgtgcgtggtggccgtgctgccccacatcctggacaccggcgccgccggcagaaacagctacctggaggtgctgctgaagctggccgacaagtacaagaagaagatgtggggctggctgtggaccgaggccggcgcccagagcgagctggagaccgccctgggcatcggcggcttcggctaccccgccatggccgccatcaacgccagaaagatgaagttcgccctgctgaagggcagcttcagcgagcagggcatcaacgagttcctgagagagctgagcttcggcagaggcagcaccgcccccgtgggcggcggcgccttccccaccatcgtggagagagagccctgggacggcagagacggcgagctgcccgtggaggacgacatcgacctgagcgacgtggagctggacgacctgggcaaggacgagctgtag

SEQ ID NO: 102334 - protein, 270 aa, Artificial Sequence
  derived and/or modified sequence
MAMEMRLPVARKPLSERLGRDTKKHLVVPGDTITTDTGFMRGHGTYMGEEKLIASVAGSVERVNKLICVKALKTRYIGEVGDIVVGRITEVQQKRWKVETNSRLDSVLLLSSMNLPGGELRRRSAEDELAMRGFLQEGDLISLGQGVLVQVSPSLVKRQKTHFHDLPCGASVILGNNGFIWIYPTPEHKEEEAGGFIANLEPVSLADREVISRLRNCIISLVTQRMMLYDTSILYCYEASLPHQIKDILKPEIMEEIVMETRQRLLEQEG

SEQ ID NO: 102335 - protein, 267 aa, Artificial Sequence
  derived and/or modified sequence
MAMEMRLPVARKPLSERLGRDTKKHLVVPGDTITTDTGFMRGHGTYMGEEKLIASVAGSVERVNKLICVKALKTRYIGEVGDIVVGRITEVQQKRWKVETNSRLDSVLLLSSMNLPGGELRRRSAEDELAMRGFLQEGDLISGVLVQVSPSLVKRQKTHFHDLPCGASVILGNNGFIWIYPTPEHKEEEAGGFIANLEPVSLADREVISRLRNCIISLVTQRMMLYDTSILYCYEASLPHQIKDILKPEIMEEIVMETRQRLLEQEG

SEQ ID NO: 102336 - DNA, 813 bp, Artificial Sequence
  derived and/or modified sequence
atggccatggagatgagactgcccgtggccagaaagcccctgagcgagagactgggcagagacaccaagaagcacctggtggtgcccggcgacaccatcaccaccgacaccggcttcatgagaggccacggcacctacatgggcgaggagaagctgatcgccagcgtggccggcagcgtggagagagtgaacaagctgatctgcgtgaaggccctgaagaccagatacatcggcgaggtgggcgacatcgtggtgggcagaatcaccgaggtgcagcagaagagatggaaggtggagaccaacagcagactggacagcgtgctgctgctgagcagcatgaacctgcccggcggcgagctgagaagaagaagcgccgaggacgagctggccatgagaggcttcctgcaggagggcgacctgatcagcctgggccagggcgtgctggtgcaggtgagccccagcctggtgaagagacagaagacccacttccacgacctgccctgcggcgccagcgtgatcctgggcaacaacggcttcatctggatctaccccacccccgagcacaaggaggaggaggccggcggcttcatcgccaacctggagcccgtgagcctggccgacagagaggtgatcagcagactgagaaactgcatcatcagcctggtgacccagagaatgatgctgtacgacaccagcatcctgtactgctacgaggccagcctgccccaccagatcaaggacatcctgaagcccgagatcatggaggagatcgtgatggagaccagacagagactgctggagcaggagggctag

SEQ ID NO: 102337 - DNA, 804 bp, Artificial Sequence
  derived and/or modified sequence
atggccatggagatgagactgcccgtggccagaaagcccctgagcgagagactgggcagagacaccaagaagcacctggtggtgcccggcgacaccatcaccaccgacaccggcttcatgagaggccacggcacctacatgggcgaggagaagctgatcgccagcgtggccggcagcgtggagagagtgaacaagctgatctgcgtgaaggccctgaagaccagatacatcggcgaggtgggcgacatcgtggtgggcagaatcaccgaggtgcagcagaagagatggaaggtggagaccaacagcagactggacagcgtgctgctgctgagcagcatgaacctgcccggcggcgagctgagaagaagaagcgccgaggacgagctggccatgagaggcttcctgcaggagggcgacctgatcagcggcgtgctggtgcaggtgagccccagcctggtgaagagacagaagacccacttccacgacctgccctgcggcgccagcgtgatcctgggcaacaacggcttcatctggatctaccccacccccgagcacaaggaggaggaggccggcggcttcatcgccaacctggagcccgtgagcctggccgacagagaggtgatcagcagactgagaaactgcatcatcagcctggtgacccagagaatgatgctgtacgacaccagcatcctgtactgctacgaggccagcctgccccaccagatcaaggacatcctgaagcccgagatcatggaggagatcgtgatggagaccagacagagactgctggagcaggagggctag

SEQ ID NO: 102338 - DNA, 813 bp, Artificial Sequence
  derived and/or modified sequence
atggccatggaaatgcgtctgccagtggctcggaagccgctctcagagaggttgggcagagacacaaagaagcaccttgtggttccaggggataccatcaccacagatacagggttcatgcgggggcacggaacttacatgggcgaggaaaagctcatagcttccgtggcggggagtgttgagcgagtcaacaaactgatctgtgttaaagccctcaagacaaggtacataggcgaagtaggggacatcgtggtgggaaggataacagaagtccagcagaagcggtggaaggtggaaactaattcaagattagattctgtgttactgctgtctagcatgaatctccctggaggagaactccgacgccggtccgctgaggatgagttggccatgcgtgggtttctacaggaaggggacctgatttccctggggcagggagtgttggtgcaggtgtcacccagtttagtgaaacgtcaaaaaacacattttcacgacctcccttgcggagcctccgtgattttaggtaataacggcttcatatggatctatccgacacctgagcataaggaagaagaagctggcggcttcatcgcaaacctggagcccgtgtccctcgcagaccgcgaagtcattagtcgtctgaggaattgtataatctctctagtgacacagcggatgatgctgtacgatacaagtatactttattgctatgaggcgagcctgccacaccagattaaagatatcttaaaacccgagataatggaagaaattgtaatggaaacacgccagcgcttgctggagcaggagggatag

SEQ ID NO: 102339 - DNA, 804 bp, Artificial Sequence
  derived and/or modified sequence
atggctatggaaatgcgcctgcctgttgcaagaaaacccttatctgagagattaggcagggacaccaaaaagcacctcgtggtgcccggcgatactatcacaaccgataccggttttatgagaggtcatggcacttacatgggggaagagaagctcatcgcaagcgtcgccggatctgtggaacgcgtaaacaaacttatctgtgtaaaagctttaaaaacccggtatattggtgaggtcggtgatatcgtggtcggtcggattaccgaagtgcagcaaaagagatggaaagtcgaaactaactcccgcctcgactctgtgctactgttaagttccatgaatcttcccggtggcgaactgagaagaaggtccgctgaggacgaactggccatgagggggtttctccaagagggcgatctgatctcaggcgtgttagtgcaggtctctccaagcttggtcaaaagacagaagactcattttcacgatctgccatgtggggcgtccgtgatactcgggaataatggttttatctggatttacccaactcctgagcacaaggaggaagaggcgggaggtttcatagctaatcttgaaccagtgtcactggctgaccgggaggtgatatccaggctgcggaactgcatcatctcgctcgtgactcagaggatgatgctgtatgacacctcgatcctgtactgctatgaggcgtctttaccccatcagatcaaggacattctcaaaccagagatcatggaagaaatcgttatggagactcgacagagactcttggagcaggaaggatag

SEQ ID NO: 102340 - DNA, 813 bp, Artificial Sequence
  derived and/or modified sequence
atggccatggagatgaggctgcctgtggccaggaagcccctgtctgagcggctgggccgggacaccaagaagcacctggtggtgcctggggacaccatcaccacagacaccggcttcatgaggggccacggcacctacatgggagaggagaagctgattgcctctgtggccggctctgtggagcgggtgaacaagctgatctgtgtgaaggccctgaagacccgctacatcggggaggtgggggacatcgtggtgggccgcatcacagaggtgcagcagaagcgctggaaggtggagaccaacagccggctggacagcgtgctgctgctgagctccatgaacctgcccggcggggagctgcggcggcgctctgcagaagatgagctggccatgaggggcttcctgcaggagggggacctgatcagcctgggccagggcgtgctggtgcaggtgagccccagcctggtgaagaggcagaagacccacttccatgacctgccctgtggggccagcgtcatcctgggcaacaacggcttcatctggatctaccccaccccagagcacaaggaggaggaggccggcggcttcatcgccaacctggagcctgtgtccctggccgaccgggaggtgatcagccggctgaggaactgcatcatcagcctggtgacccagaggatgatgctgtatgacaccagcatcctgtactgctatgaggccagcctgccccaccagatcaaggacatcctgaagccagagatcatggaggagatcgtgatggagacccggcagaggctgctggagcaggagggctag

SEQ ID NO: 102341 - DNA, 804 bp, Artificial Sequence
  derived and/or modified sequence
atggccatggagatgaggctgcctgtggccaggaagcccctgtctgagcggctgggccgggacaccaagaagcacctggtggtgcctggggacaccatcaccacagacaccggcttcatgaggggccacggcacctacatgggagaggagaagctgattgcctctgtggccggctctgtggagcgggtgaacaagctgatctgtgtgaaggccctgaagacccgctacatcggggaggtgggggacatcgtggtgggccgcatcacagaggtgcagcagaagcgctggaaggtggagaccaacagccggctggacagcgtgctgctgctgagctccatgaacctgcccggcggggagctgcggcggcgctctgcagaagatgagctggccatgaggggcttcctgcaggagggggacctgatcagcggcgtgctggtgcaggtgagccccagcctggtgaagaggcagaagacccacttccatgacctgccctgtggggccagcgtcatcctgggcaacaacggcttcatctggatctaccccaccccagagcacaaggaggaggaggccggcggcttcatcgccaacctggagcctgtgtccctggccgaccgggaggtgatcagccggctgaggaactgcatcatcagcctggtgacccagaggatgatgctgtatgacaccagcatcctgtactgctatgaggccagcctgccccaccagatcaaggacatcctgaagccagagatcatggaggagatcgtgatggagacccggcagaggctgctggagcaggagggctag

SEQ ID NO: 102342 - DNA, 813 bp, Artificial Sequence
  derived and/or modified sequence
atggccatggagatgcggctgcccgtggcccggaagcccctgagcgaaagattgggcagagacactaaaaagcacctagtcgtgcctggagacacaataaccaccgacaccggcttcatgcggggacacggcacctacatgggcgaagaaaagttgattgccagcgttgccggctccgtggagagggttaataaactgatatgcgtaaaggccctgaaaactaggtatatcggagaggtgggtgatattgtggttggccggataaccgaggtgcagcaaaagagatggaaagtggaaaccaacagcagattagacagcgtgttgttgctgtcctcgatgaatttacccggcggagagctgaggcgacgatctgctgaggacgaattggccatgagaggattcctgcaagagggcgatctgatctccctgggccaaggggtcctggtacaggtgtccccttccttggtgaaacgacaaaagacacatttccatgatttgccatgtggcgcctcagtcatcctaggaaacaacggatttatctggatatatcccaccccagagcataaggaagaagaggcaggtggtttcatcgcaaatctcgaacctgtgagtttggctgaccgagaagttatctcccggctcagaaattgcataattagtttggtgacacaacgcatgatgctgtatgacacatccatcctttactgttatgaagcttccctgcctcatcaaataaaggatatcctcaagcctgaaattatggaggaaattgttatggaaacacgccagaggctcctcgaacaggagggttag

SEQ ID NO: 102343 - DNA, 804 bp, Artificial Sequence
  derived and/or modified sequence
atggccatggagatgcggctgcccgtggcccggaagcccctgagcgagcggctgggacgcgacacaaagaagcacctggttgtgcccggggacaccataacaactgatacaggttttatgcggggacacggtacctacatgggggaggaaaaacttatcgcttcagttgcgggctctgtggaaagggttaacaagcttatttgtgtgaaggctctcaaaacgaggtatattggcgaggtgggcgacatcgtggtcgggaggatcacagaggttcagcaaaagagatggaaagttgagaccaattccaggctggactctgtgttacttctcagttccatgaatctgcctggaggggaactacgcagaaggtccgcagaagacgaacttgctatgcgggggttcttgcaagagggcgaccttattagcggcgtgctcgtccaggtttcaccttctctcgtcaagcggcagaagactcacttccatgacctgccttgcggcgcttccgtcattctcggaaacaatggctttatctggatatatcctacacctgaacataaggaggaggaggcgggcgggtttattgcaaatctcgagccagtatcccttgctgaccgtgaggtgataagccgcctgaggaattgcataattagcctcgtgacccagcggatgatgctttatgacaccagcatcctttactgctacgaagcaagcttaccacaccagatcaaagatattctgaagccggaaattatggaagagattgtgatggaaactcgtcaacgcctgctggagcaggaggggtag

SEQ ID NO: 102344 - DNA, 813 bp, Artificial Sequence
  derived and/or modified sequence
atggccatggagatgcggctgcccgttgcacggaagccgctgtcagaacgccttgggcgagataccaagaaacatctcgtggtccccggtgatacgattacaactgacactggcttcatgagaggacatggtacttatatgggagaagagaagctgattgccagtgttgcaggctcagtggagcgcgtcaacaaactgatttgtgttaaagccttgaaaactcgatacattggggaagtcggggacatagtagtcgggagaattaccgaggtccagcagaagagatggaaggtggagactaactctcggctcgactcagtcctgcttctttcctccatgaatctgcctggtggggagctacggaggcggagtgctgaggatgagctggcgatgcggggtttccttcaggaaggagatctgatttccctgggccagggagtcctggtgcaagtgtcaccaagcctcgttaaaaggcagaaaactcatttccatgacctgccatgcggcgcatccgtgatattgggcaacaacggctttatttggatttatcccacacctgaacacaaggaggaagaggccggtggttttatcgccaacctggagccagtgagtctcgccgatagagaggtgatctctagattgcgcaactgtataatatccttagtgacccagcggatgatgctctacgacacctcgattctatattgctacgaagcaagtctgccccatcagatcaaggacatactgaaacctgaaattatggaagagattgtcatggaaactaggcagcgcctactcgagcaggaagggtag

SEQ ID NO: 102345 - DNA, 804 bp, Artificial Sequence
  derived and/or modified sequence
atggccatggagatgcgcctgcccgtcgcacggaagcccctgtccgagcgcctgggccgtgacaccaagaagcacctcgtagttcccggtgataccatcactactgatactgggttcatgagaggtcatggtacctacatgggcgaggaaaagttaattgcatccgtggcaggcagtgtcgagcgggtgaacaagctcatctgtgttaaagcacttaaaactagatatatcggggaagtgggggatattgtggtcgggagaatcactgaggtgcaacagaaaaggtggaaagtggagactaatagcaggctcgactctgtactgctcctgtcgagtatgaacctgcccggaggcgaactgaggcgccgttcagccgaagacgagctggcgatgagaggattcctccaagaaggcgacctaatcagcggcgttcttgtgcaggtgagcccatcgctggtaaagcgtcaaaaaacacacttccatgatctaccatgtggcgctagcgtcatacttggaaacaatgggttcatatggatctaccctacccccgagcataaagaggaagaggcgggaggctttattgctaatctggaacccgtatccttggcggatcgcgaggtcatcagtcgtcttcggaactgcataatctctcttgttactcagcgaatgatgctgtacgacacatcaattctgtattgttatgaggcctccctgccgcaccagatcaaagacatcctcaagcccgagatcatggaggagattgtgatggaaacacgacagcgtctgctggagcaggaagggtag

SEQ ID NO: 102346 - DNA, 813 bp, Artificial Sequence
  derived and/or modified sequence
atggcgatggagatgaggcttccagtggctcgcaagcctcttagcgagagactgggccgcgacactaagaaacatctagtggtgccgggggatacaatcactacggacacaggattcatgcggggccatggaacgtatatgggagaagagaagctcattgcatctgttgctggctctgtggagagagtaaacaagttgatctgtgtgaaagctttgaaaaccagatacattggtgaagtaggagacatcgtagtgggacgaatcacagaggttcaacagaagaggtggaaggtggagaccaactccaggctggattcggtcttgctgctctcgtccatgaaccttcctggaggagagctgaggagaagatctgcagaagatgagcttgcaatgagaggtttcttacaggaaggggaccttatcagtctaggtcagggggttttggtccaggtttccccctccctggtgaaacggcagaagacccactttcatgatttgccatgtggtgcctcagtgattctcggtaacaacggcttcatctggatttacccaacacctgagcacaaagaagaggaagcagggggcttcattgcaaacctggagcctgtctctcttgctgatcgagaggtgatatcccggcttcggaactgcatcatctcgctggtaactcagaggatgatgctgtatgataccagcatcctgtactgctatgaagcatcccttccacatcagatcaaagacatcttaaagccagaaataatggaggagattgtgatggaaacacgccagaggcttttggaacaggagggataa

SEQ ID NO: 102347 - DNA, 1110 bp, Artificial Sequence
  derived and/or modified sequence
gcgcaactcattggcgccaagatggcgatggagatgaggcttccagtggctcgcaagcctcttagcgagagactgggccgcgacactaagaaacatctagtggtgccgggggatacaatcactacggacacaggattcatgcggggccatggaacgtatatgggagaagagaagctcattgcatctgttgctggctctgtggagagagtaaacaagttgatctgtgtgaaagctttgaaaaccagatacattggtgaagtaggagacatcgtagtgggacgaatcacagaggttcaacagaagaggtggaaggtggagaccaactccaggctggattcggtcttgctgctctcgtccatgaaccttcctggaggagagctgaggagaagatctgcagaagatgagcttgcaatgagaggtttcttacaggaaggggaccttatcagtggggttttggtccaggtttccccctccctggtgaaacggcagaagacccactttcatgatttgccatgtggtgcctcagtgattctcggtaacaacggcttcatctggatttacccaacacctgagcacaaagaagaggaagcagggggcttcattgcaaacctggagcctgtctctcttgctgatcgagaggtgatatcccggcttcggaactgcatcatctcgctggtaactcagaggatgatgctgtatgataccagcatcctgtactgctatgaagcatcccttccacatcagatcaaagacatcttaaagccagaaataatggaggagattgtgatggaaacacgccagaggcttttggaacaggagggataaggaggtgctccagaagcacgggactgtggaccttgcaggagtgaagactgtgatgtgtggtccccatatgtggctcagcaaagactcgagagatcatccctttgtctgcattgacggccctgtgacggcctccagcccacaggcctgctttctcctgtcctaacaccaagcctgggtggcagatgaacagtgcttccttgggttgccagctgagtcccggtattagggaatagtttcagctctttcaaagtgcacagtgttacagtcgaatgggctcccatcctg

SEQ ID NO: 102348 - protein, 263 aa, Artificial Sequence
  derived and/or modified sequence
MAMEMRLPVARKPLSERLGRDTKKHLVVPGDTITTDTGFMRGHGTYMGEEKLIASVAGSVERVNKLICVKALKTRYIGEVGDIVVGRITERRRSAEDELAMRGFLQEGDLISAEVQAVFSDGAVSLHTRSLKYGKLGQGVLVQVSPSLVKRQKTHFHDLPCGASVILGNNGFIWIYPTPEHKEEEAGGFIANLEPVSLADREVISRLRNCIISLVTQRMMLYDTSILYCYEASLPHQIKDILKPEIMEEIVMETRQRLLEQEG

SEQ ID NO: 102349 - DNA, 792 bp, Artificial Sequence
  derived and/or modified sequence
atggccatggagatgagactgcccgtggccagaaagcccctgagcgagagactgggcagagacaccaagaagcacctggtggtgcccggcgacaccatcaccaccgacaccggcttcatgagaggccacggcacctacatgggcgaggagaagctgatcgccagcgtggccggcagcgtggagagagtgaacaagctgatctgcgtgaaggccctgaagaccagatacatcggcgaggtgggcgacatcgtggtgggcagaatcaccgagagaagaagaagcgccgaggacgagctggccatgagaggcttcctgcaggagggcgacctgatcagcgccgaggtgcaggccgtgttcagcgacggcgccgtgagcctgcacaccagaagcctgaagtacggcaagctgggccagggcgtgctggtgcaggtgagccccagcctggtgaagagacagaagacccacttccacgacctgccctgcggcgccagcgtgatcctgggcaacaacggcttcatctggatctaccccacccccgagcacaaggaggaggaggccggcggcttcatcgccaacctggagcccgtgagcctggccgacagagaggtgatcagcagactgagaaactgcatcatcagcctggtgacccagagaatgatgctgtacgacaccagcatcctgtactgctacgaggccagcctgccccaccagatcaaggacatcctgaagcccgagatcatggaggagatcgtgatggagaccagacagagactgctggagcaggagggctag

SEQ ID NO: 102350 - DNA, 792 bp, Artificial Sequence
  derived and/or modified sequence
atggcaatggaaatgagactgccagtcgcccgaaaacccctttcggaacgcctcggcagggatacaaagaaacacttggtggtgcctggagatacaatcactacggatactgggtttatgaggggccacggaacatacatgggtgaggagaaacttattgctagcgtagcgggctctgtcgaacgtgtgaacaagctgatttgtgtgaaggcactcaagacgcgatacatcggagaggtgggtgacattgtggtcggcagaattacagagaggaggcggagcgcggaggacgaactggctatgaggggctttctgcaggagggggatctgatatcggccgaggtccaggccgttttctctgatggtgcagtctcccttcatacgagatctctcaaatatggcaaactgggacaaggcgtcctcgtccaggtgtcaccatcactcgtcaaacgccagaagactcactttcacgacctgccctgcggggcctcagttatcctgggaaacaatggttttatatggatttatccaacgcctgagcacaaagaagaagaggccggaggattcatcgcaaacctcgagccggtttcactggcggatagggaggtcatatcccgtctgcggaactgcatcatcagtctggtcacacagcgcatgatgttgtatgatacgagtatactgtactgttacgaagcctccctgccccatcagattaaagacattttgaagccagaaatcatggaagagattgtgatggaaaccaggcagcggctcctggaacaagaaggctag

SEQ ID NO: 102351 - DNA, 1885 bp, Artificial Sequence
  derived and/or modified sequence
gccaagatggcgatggagatgaggcttccagtggctcgcaagcctcttagcgagagactgggccgcgacactaagaaacatctagtggtgccgggggatacaatcactacggacacaggattcatgcggggccatggaacgtatatgggagaagagaagctcattgcatctgttgctggctctgtggagagagtaaacaagttgatctgtgtgaaagctttgaaaaccagatacattggtgaagtaggagacatcgtagtgggacgaatcacagagaggagaagatctgcagaagatgagcttgcaatgagaggtttcttacaggaaggggaccttatcagtgctgaggtccaggcagtgttctctgacggagctgtctctttgcacacgaggagcctgaaatatggaaaactaggtcagggggttttggtccaggtttccccctccctggtgaaacggcagaagacccactttcatgatttgccatgtggtgcctcagtgattctcggtaacaacggcttcatctggatttacccaacacctgagcacaaagaagaggaagcagggggcttcattgcaaacctggagcctgtctctcttgctgatcgagaggtgatatcccggcttcggaactgcatcatctcgctggtaactcagaggatgatgctgtatgataccagcatcctgtactgctatgaagcatcccttccacatcagatcaaagacatcttaaagccagaaataatggaggagattgtgatggaaacacgccagaggcttttggaacaggagggataaggaggtgctccagaagcacgggactgtggaccttgcaggagtgaagactgtgatgtgtggtccccatatgtggctcagcaaagactcgagagatcatccctttgtctgcattgacggccctgtgacggcctccagcccacaggcctgctttctcctgtcctaacaccaagcctgggtggcagatgaacagtgcttccttgggttgccagctgagtcccggtattagggaatagtttcagctctttcaaagtgcacagtgttacagtcgaatgggctcccatcctggaataatatggagaatcctttgtcttccactcactgtcattcacaaggcacagtgccccatgaaattgccccaatagaaaacatggcatccctgacctccaaatggtctgttttggcctccattcctatatcctttaaatgactgagaatgcagctggtaaagttggaagaataaagttaaccaagcaggccaggcacggtggctcacgcctataatcccagcacttagggaggccaaggcgggcagatcacctgaggtcaatagttcgagaccagcctggccaacaaggtgaaaccccatctctactaaaaatacaaaaaattagccaggtgtggtggtgtgcacctgtagtcccagctatttgggaggctgaggtgggagaatcacttgaacctgggaggcggaggttgcagtgagctgaaatcgcgtaccacactccagcctgggtgacagagcgagactgtgtttcaaagaaaaaaaaaaacaagcagccttttgcttggttggaatctgattttctgttgcgtgttccttgtagccatagatgtgattatgtccacaccgggctgccttaatctgtcctgcttggagagtgacttgtaagatgctgaattattcatgataatacagtgaatgttctgggtccatgtactcagataaacatgaagaaaataagcaaagaaaaatggagactgggaaagcaaagctgttttcatcctataattgaagtagtgtggagcattaacttgtggatgattcagagttaaaagataaaaagacgccagagttctcgctgaagaa

SEQ ID NO: 102352 - DNA, 792 bp, Artificial Sequence
  derived and/or modified sequence
atggccatggagatgaggctgcctgtggccaggaagcccctgtctgagcggctgggccgggacaccaagaagcacctggtggtgcctggggacaccatcaccacagacaccggcttcatgaggggccacggcacctacatgggagaggagaagctgattgcctctgtggccggctctgtggagcgggtgaacaagctgatctgtgtgaaggccctgaagacccgctacatcggggaggtgggggacatcgtggtgggccgcatcacagaaagaagaagatctgcagaagatgagctggccatgaggggcttcctgcaggagggggacctgatctctgctgaggtgcaggccgtgttcagtgatggagctgtgtccctgcacaccaggagcctgaagtatggcaagctgggccagggcgtgctggtgcaggtgagccccagcctggtgaagaggcagaagacccacttccatgacctgccctgtggggccagcgtcatcctgggcaacaacggcttcatctggatctaccccaccccagagcacaaggaggaggaggccggcggcttcatcgccaacctggagcctgtgtccctggccgaccgggaggtgatcagccggctgaggaactgcatcatcagcctggtgacccagaggatgatgctgtatgacaccagcatcctgtactgctatgaggccagcctgccccaccagatcaaggacatcctgaagccagagatcatggaggagatcgtgatggagacccggcagaggctgctggagcaggagggctag

SEQ ID NO: 102353 - DNA, 792 bp, Artificial Sequence
  derived and/or modified sequence
atggccatggagatgcggctgcccgtggcccggaagcccctgagcgaacggctcggccgggacaccaagaaacatctcgtggttcccggcgacaccattaccactgataccggcttcatgaggggccatggcacctacatgggcgaggagaaactcatcgcaagcgtggccggctccgtcgaaagggtgaataaattaatctgtgttaaggccttgaaaacacgatacattggtgaggttggggacattgtagtggggcgtattacagaacgacgccgcagtgccgaggacgaacttgctatgaggggatttctgcaagaaggcgacctaatttccgcagaagtgcaggccgttttctctgacggcgcagtgtcgctccacacacggtctcttaaatacggcaagctgggccaaggggtgctggtacaagttagtccctccctggtgaagagacagaaaacccatttccacgatttgccttgtggagcatcagtgattcttgggaataatggctttatatggatctacccaacacccgaacacaaggaggaggaagctggagggtttattgctaatctcgaacccgtatcattagccgatcgagaggtgatctctcgattgaggaactgcattatctctctggtcacgcagcggatgatgttgtacgacacgtcaatcttgtattgctacgaggctagtttgccccatcagatcaaagatatcctgaagccagagataatggaggagatcgttatggaaactagacagagacttctggagcaagaagggtag

SEQ ID NO: 102354 - DNA, 792 bp, Artificial Sequence
  derived and/or modified sequence
atggccatggagatgagactgccagtcgcacgcaagccactttcagagagactgggacgcgacaccaaaaaacatctggtcgtgcccggagacacaattacaaccgataccggttttatgagagggcacggcacctacatgggagaggagaagctgatagctagcgttgccggaagcgtcgagagagtcaataaactgatctgcgttaaagccctaaaaacacgctacattggcgaggtgggcgatatcgtggtcgggagaatcacagagcgacgtcgttctgctgaggacgagctcgccatgcgaggcttcctccaggaaggtgacctaatctcagccgaagttcaagccgtctttagcgacggcgcagttagtctgcacactagatccctgaagtatgggaagcttgggcaaggagtattggtacaagtgagcccgtctctggttaaacgtcagaaaacacacttccacgaccttccatgtggggctagcgtgattcttggtaataatggcttcatttggatctatcccacaccagagcataaggaggaagaggccggaggtttcatcgctaatctggagcccgtaagcctggccgaccgtgaggtgatcagtagattgcgcaattgcatcatttctcttgttacgcagcgcatgatgctctacgatacgtctatcctttattgttacgaggcatctttaccccatcaaatcaaggatatcctaaaacctgagattatggaggagatagtcatggaaacacgccagcggctgctggagcaggaaggctag

SEQ ID NO: 102355 - protein, 188 aa, Artificial Sequence
  derived and/or modified sequence
MEAALLGLCNWSTLGVCAALKLPQISAVLAARSARGLSLPSLLLELAGFLVFLRYQCYYGYPPLTYLEYPILIAQDVILLLCIFHFNGNVKQATPYIAVLVSSWFILALQKWIIDLAMNLCTFISAASKFAQLQCLWKTRDSGTVSALTWSLSSYTCAILLRFVIMLALNIWVTVTVLRYRKTAIKAE

SEQ ID NO: 102356 - DNA, 567 bp, Artificial Sequence
  derived and/or modified sequence
atggaggccgccctgctgggcctgtgcaactggagcaccctgggcgtgtgcgccgccctgaagctgccccagatcagcgccgtgctggccgccagaagcgccagaggcctgagcctgcccagcctgctgctggagctggccggcttcctggtgttcctgagataccagtgctactacggctacccccccctgacctacctggagtaccccatcctgatcgcccaggacgtgatcctgctgctgtgcatcttccacttcaacggcaacgtgaagcaggccaccccctacatcgccgtgctggtgagcagctggttcatcctggccctgcagaagtggatcatcgacctggccatgaacctgtgcaccttcatcagcgccgccagcaagttcgcccagctgcagtgcctgtggaagaccagagacagcggcaccgtgagcgccctgacctggagcctgagcagctacacctgcgccatcctgctgagattcgtgatcatgctggccctgaacatctgggtgaccgtgaccgtgctgagatacagaaagaccgccatcaaggccgagtag

SEQ ID NO: 102357 - DNA, 567 bp, Artificial Sequence
  derived and/or modified sequence
atggaagctgcccttttggggctgtgtaactggagcacattgggggtgtgtgcggcacttaagttaccgcaaatctccgcagtccttgccgcgcgcagcgcgcgggggctgagtcttccttctctgttgcttgaattggcaggatttctggtgttcctccgatatcagtgttattacggatatcccccactcacctacctcgagtaccccattttaattgcgcaggatgtcattcttctgttgtgcatcttccattttaatggaaatgttaagcaggccaccccctacattgccgtcctggtgtccagctggtttatactcgcactgcaaaagtggataatcgacctcgcaatgaatctctgtacttttatcagcgcggcatccaagtttgcacagctccagtgcctgtggaagacgagagacagcggaaccgtgagcgcgctcacatggagtctgagctcttatacttgcgctatcctgcttcgctttgttatcatgttggccctgaatatctgggtaacagtgactgtcctccgttaccgcaagacagcgataaaagctgaatag

SEQ ID NO: 102358 - DNA, 567 bp, Artificial Sequence
  derived and/or modified sequence
atggaggccgccctgctgggcctgtgcaactggagcaccctgggcgtgtgtgccgccctgaagctgccccagatctctgctgtgctggccgcccggagcgcccggggcctgagcctgcccagcctgctgctggagctggccggcttcctggtgttcctgcgctaccagtgctactacggctacccacccctgacctacctggagtaccccatcctgattgcccaggacgtcatcctgctgctgtgcatcttccacttcaatggaaatgtgaagcaggccaccccctacatcgctgtgctggtgtcctcctggttcatcctggccctgcagaagtggatcatcgacctggccatgaacctgtgcaccttcatctctgctgccagcaagtttgcccagctgcagtgcctgtggaagacccgggacagcggcaccgtgtctgccctgacctggagcctgagcagctacacctgtgccatcctgctgcgctttgtgatcatgctggccctgaacatctgggtgacagtgacagtgctgcgctacaggaagacagccatcaaggccgagtag

SEQ ID NO: 102359 - DNA, 567 bp, Artificial Sequence
  derived and/or modified sequence
atggaggccgccctgctgggcctgtgcaactggagcaccctgggcgtgtgtgctgcactgaaactgccccagatatctgctgtgctggcggccagatccgcccgcgggctatcactccccagtctgcttttggaactggctggtttcttggtgtttctgcgatatcaatgctactatggttatccccccctcacgtatctggaataccctatccttatcgcacaggatgtgattctcctactgtgcatttttcactttaacgggaatgtgaaacaagcgacaccatacatcgccgttctcgtgtcatcttggttcatccttgcgctacaaaagtggattatagatctggcaatgaacctgtgtacctttatctcggcagcttcgaagtttgcccagctgcagtgtttgtggaaaacacgcgattcggggaccgtgtccgcactgacctggtccctttccagctatacttgtgcgattctcctccgcttcgtgatcatgcttgctcttaacatctgggtgactgtgacagtgcttagataccggaagaccgccatcaaagcagagtag

SEQ ID NO: 102360 - DNA, 1031 bp, Artificial Sequence
  derived and/or modified sequence
agagctgcgccgccgaggctgagcggtcccttctcgctgcggccgcccaggtgcccgcgcccgtggcgctatggaggcggcgctgctggggctgtgtaactggagcacgctgggcgtgtgcgccgcgctgaagctgccgcagatctccgctgtgctagcggcgcgcagcgcgcggggcctcagccttccgagtttacttctggagctggcaggattcctggtgtttctgcggtaccagtgttactatgggtatccgccgctgacctacctggagtaccccatcctcatcgcgcaagatgtcatcctcctgctctgtatctttcattttaacgggaacgtgaagcaggccactccttacatcgctgtattggtgtcttcttggttcatccttgccctgcagaagtggatcatagacctggccatgaatctatgtactttcatcagcgcggccagtaagtttgcacagctccagtgtctgtggaagacgagagactcaggaactgtgagtgcgctgacttggagcctctcttcctatacctgtgcaattcttctacgttttgtgatcatgctggctttaaatatatgggtaacagtgacagtacttcgctaccggaagaccgctataaaggctgaatgatggatacattattccttcacacagtggattttgagtaactgaaccaaaggaaaaagaagctctttgctaaattaaggtcttttataaatttagtaaatcagtttataatctttaaagccaaaggtttttttagacttgaaagaaagagccacttaaattcttgtttaaaaataccaatttgcctcctccttcctcacttcgttaggttatggtagtgctcagacatctgcagtgttgaggccagtcactgttggaagtcatccaagaagcccattttgaggccattttgagccttactcttaagttctctatgaagaactacattgatttgttggctttcagaatcttttaggaaataaatcctctccaggacaaaaatgaacatgaatggagt

SEQ ID NO: 102361 - DNA, 567 bp, Artificial Sequence
  derived and/or modified sequence
atggaggctgctctgctcggactttgtaactggtcaaccctgggcgtgtgtgccgcactgaaactaccccaaatctccgcggtgctggccgcacgtagcgcacggggactgagcctgccttccttgctgctggagttggcaggtttcctggtgttccttaggtaccaatgttactacgggtatccacctctgacctatctagaatatccaatactgattgctcaggatgtaattttacttctgtgtattttccatttcaacgggaatgtcaagcaggctacaccctatatagccgttctagtcagcagctggttcatccttgcactgcagaaatggatcatagacctcgccatgaacctttgcacgttcatcagcgcagcctctaagtttgcccagctgcaatgcctgtggaagacacgcgattccgggacagtgagcgcactaacctggagtttgtcgtcatacacctgtgctattctccttaggtttgtgataatgctggcactcaatatctgggtcacagtcactgtgctaagataccgcaagaccgcgatcaaggccgagtag

SEQ ID NO: 102362 - protein, 172 aa, Artificial Sequence
  derived and/or modified sequence
MAQRLGEWARGPSDATGLYRAVLLRSAAMYSEIQRERADIGGLMARPEYREWNPELIKPKKLLNPVKASRSHQELHRELLMNHRRGLGVDSKPELQRVLEHRRRNQLIKKKKEELEAKRLQCPFEQELLRRQQRLNQLEKPPEKEEDHAPEFIKVRENLRRIATLTSEEREL

SEQ ID NO: 102363 - DNA, 3367 bp, Artificial Sequence
  derived and/or modified sequence
ctgcctcaggaagcttggcttcccctcccatggggaagtgctggaatccactcttgcctgaccctcccataagaaacaagggaaattcctttacgtgagccgccttgctcagaacaaagcttggcgtgtttcttattcctcatcaatctgacaaaatgggtatttatttgtgcctctcaagcgtgtggcttggacatgatgttccgcatcgtggaagtggccgtgcaccaagtggaatatctgttactatagtaacagttcctttttattgataccagaataaacaggaatgcaaaggctgtctcacttgttggcacatttcagcagcctccgttcccaggggtttaagaaccgccctctagaggcagccctccttgctagtctgggacttcccggtggagtgaggaacccagcaacacgctcctgacttcccttcccaaggactcgacctgagaaccgccatgtactcggagatccagagggagcgggcagacattgggggcctgatggcccggccagaatacagagagtggaatccggagctcatcaagcccaagaagctgctgaaccccgtgaaggcctctcggagtcaccaggagctccaccgggagctgctcatgaaccacagaaggggccttggtgtggacagcaagccagagctgcagcgtgtcctagagcaccgccggcggaaccagctcatcaagaagaagaaggaggagctggaagccaagcggctgcagtgcccctttgagcaggagctgctgagacggcagcagaggctgaaccagctggaaaaaccaccagagaaggaagaggatcacgcccccgagtttattaaagtcagggaaaacctgcggagaattgccacactgaccagcgaagagagagagctgtagggccagctgccgggctcaggccactgcccaccctggcctggacagcctccttcagcccttctgtacctggcagccctgggccccaggccctgggacgtctgtgatgttcccacctgcttctgtagaaatgtgtcaccccagagggcctggctctccctgggaggctggggcccctaagctcctaggttttccttccaagcacccagccctcctgctccaagagggataacctgcacccctccctgcaaggggttcagagcccagcacaggagctttctctggcagaattgaggaggaagaggtggccctctgacttgacaagccttctgttctgcccaggccttcccaccaggaatctccgaggctccccagggccccgcttctccgtacaccccagctcctaggtctcagagaactcccccacctgtggttttacctgcagccagcagagcttagcttcaaggacacctgccttcaaagccactgaggggaggaagggcagggcagactgcagatggccttgttgctggcatcccggccaggtgggcggggactaacaaagacagctgtttagggtcttctcccctcacccatgctttcatcatcccctccgcacagcctccccgtccaggccttctaaccacacctacccagggctgccgcattcctgcactcagaagtctgcagcggtgcctcacaaacttgattgtgcataaaaatcactggggatcttgttaatacagcttctaactcaatagatctgggagatcctgcatttctaacaagctcccaggtaaggcggaggctgctggtgtgaggaccatgctgtgagcagcagggcgagagtgcccagggctgatatatattggaaatatcacccctgaagccatcgctggcccccacctcctgtggactgatgccccagggattcccaccccacttctgcaaccccaggtatccttcattatccaccccatcccagactcccaccccagggattgcccgtgaagactttggcctagcaaattgtgttggttatgtgagtgttgttttaatcagagatgtacatgattgccaatctgcatttcttaccagtgtgaccacactgttacgatgcaattctagccaaaaaaaaaaaaaaaaaaaaaaaaattttttttttttactttttcctagtcttatggaaagcaaatatacaatgattttcagtaggcttctggaatagaaacagtggtttgaagaccccactgccacctttatggactggcccctttgagtctgaatccccggcctctgtcacctgagacccaacccctagctgggccaactccagtgaattcacccatttttcttcttcagaaggcctttcctgtgtgagacccacatattttaaccttttgctcctatcccatttttaaagaattagagaataaaccaggcctgtttcttttcccctgaaatccctgcctctggcttcctaaacccatcatctaaggtgacagagcagtgctggaatagcatctcctttcactttcccaaaactgccacagatagctgccactggcatgctctttgattcctggaagcaaacgtgggactgtcggaggaaagggattgttctggtcttactcataactgggtggtttgagggtgactgaagtcgtgcttttcctgtgtgtgctgccagcacagggctgtaaatgcagatattgcgcctgtgtgcgtgtgtataagtcaagctccaagaggctcctgaatgtgactggcgtgctgagaatgtgtttacgctgtttaatgtctgccaggtgagggttacactgaagatgcacaatccctaaaataaagatcaccacttccccaaagaagcagccctcgggtccatgtgttgttcagacatgtgaagagaagcaagacagagggtctcagatggacgagggctctccaagggaatgcctggggattcacccagtggtccccagaggtgctccatggaggcaacaagtcattccatgaagccccagaggtagaagggacctcaagcaccacgccctccagggcagccgtgcagacgaccttggttcacttttcaggggtcgtcccaactctgtatctccagccactccaactgtggaggctgtaaatccagattttcactgttccagtctcctttgcagcttaggatggctatgtgatcaggtgtggccaatgaaattgaagaggaagtctacctgggcttctgggaaagcttttccaataaaagacacaggcatggctaacacctccctgggcctcttcttcctaccttgattgagggtgtgatgcctggagccacagcagccactttgctaccatgacaaaaaggccaagagaatcacagagtcattgaccctatcattatttcaccaagccaataccagccgccatccttctccagaattcttgtaaataaaataaatccctctttgtttaaa

SEQ ID NO: 102364 - DNA, 1432 bp, Artificial Sequence
  derived and/or modified sequence
ttcccccggcggcgtctcctcgcccgcccctccggccgccgccgtaacttgaccctcagcggggtttgggacttggggccgcgtcaccgtcgcggaggcgcttcggctccggactacgctcctgctgtgcgctcgcggggccagcagtgctggctctgcagtaggaggcgcgggggcatggcgcagaggctgggcgagtgggcccgggggccctccgatgccaccgggctctaccgggctgtgctgctccggtcggccgccatgtactcggagatccagagggagcgggcagacattgggggcctgatggcccggccagaatacagagagtggaatccggagctcatcaagcccaagaagctgctgaaccccgtgaaggcctctcggagtcaccaggagctccaccgggagctgctcatgaaccacagaaggggccttggtgtggacagcaagccagagctgcagcgtgtcctagagcaccgccggcggaaccagctcatcaagaagaagaaggaggagctggaagccaagcggctgcagtgcccctttgagcaggagctgctgagacggcagcagaggctgaaccagctggaaaaaccaccagagaaggaagaggatcacgcccccgagtttattaaagtcagggaaaacctgcggagaattgccacactgaccagcgaagagagagagctgtagggccagctgccgggctcaggccactgcccaccctggcctggacagcctccttcagcccttctgtacctggcagccctgggccccaggccctgggacgtctgtgatgttcccacctgcttctgtagaaatgtgtcaccccagagggcctggctctccctgggaggctggggcccctaagctcctaggttttccttccaagcacccagccctcctgctccaagagggataacctgcacccctccctgcaaggggttcagagcccagcacaggagctttctctggcagaattgaggaggaagaggtggccctctgacttgacaagccttctgttctgcccaggccttcccaccaggaatctccgaggctccccagggccccgcttctccgtacaccccagctcctaggtctcagagaactcccccacctgtggttttacctgcagccagcagagcttagcttcaaggacacctgccttcaaagccactgaggggaggaagggcagggcagactgcagatggccttgttgctggcatcccggccaggtgggcggggactaacaaagacagctgtttagggtcttctcccctcacccatgctttcatcatcccctccgcacagcctccccgtccaggccttctaaccacacctacccagggctgccgcattcctgcactcagaagtctgcagcggtgcctcacaaacttgattgtgcataaaaatcactggggatcttgtt

SEQ ID NO: 102365 - DNA, 2159 bp, Artificial Sequence
  derived and/or modified sequence
gctagtctgggacttcccggtggagtgaggaacccagcaacacgctcctgacttcccttcccaaggactcgacctgagaaccgccatgtactcggagatccagagggagcgggcagacattgggggcctgatggcccggccagaatacagagagtggaatccggagctcatcaagcccaagaagctgctgaaccccgtgaaggcctctcggagtcaccaggagctccaccgggagctgctcatgaaccacagaaggggccttggtgtggacagcaagccagagctgcagcgtgtcctagagcaccgccggcggaaccagctcatcaagaagaagaaggaggagctggaagccaagcggctgcagtgcccctttgagcaggagctgctgagacggcagcagaggctgaaccaggtgggtgatgggcacccagcagggaccacgcatcctccagggctgtcctccagggaggagctctgctgtggccacagctagtaagagggaagaggatcagcagacagagcactggactaagagtccactcctggcctgagtcctccctctgccattcactttgctaggtccttagggcgagtggcttccctgaacctcagcttcctcactggcccagtgtactgcatgctgattctgatttcattcttataactgtcttgtgagccaggtggcattcccattttagagatggggaagctgaggcccagagggggtgagtgatttgaaccaggctgcacaaggagaactcagtctcatgctctgtgccccagctaccaggctgatagcaaaactcatccccaggttggttctgtttccccactgagtgggcccttggtccaaactccacaggttttcagagtaggaatccccctagctccacccacttcactctctgcttctccctccttcagctggaaaaaccaccagagaaggaagaggatcacgcccccgagtttattaaagtcagggaaaacctgcggagaattgccacactgaccagcgaagagagagagctgtagggccagctgccgggctcaggccactgcccaccctggcctggacagcctccttcagcccttctgtacctggcagccctgggccccaggccctgggacgtctgtgatgttcccacctgcttctgtagaaatgtgtcaccccagagggcctggctctccctgggaggctggggcccctaagctcctaggttttccttccaagcacccagccctcctgctccaagagggataacctgcacccctccctgcaaggggttcagagcccagcacaggagctttctctggcagaattgaggaggaagaggtggccctctgacttgacaagccttctgttctgcccaggccttcccaccaggaatctccgaggctccccagggccccgcttctccgtacaccccagctcctaggtctcagagaactcccccacctgtggttttacctgcagccagcagagcttagcttcaaggacacctgccttcaaagccactgaggggaggaagggcagggcagactgcagatggccttgttgctggcatcccggccaggtgggcggggactaacaaagacagctgtttagggtcttctcccctcacccatgctttcatcatcccctccgcacagcctccccgtccaggccttctaaccacacctacccagggctgccgcattcctgcactcagaagtctgcagcggtgcctcacaaacttgattgtgcataaaaatcactggggatcttgttaatacagcttctaactcaatagatctgggagatcctgcatttctaacaagctcccaggtaaggcggaggctgctggtgtgaggaccatgctgtgagcagcagggcgagagtgcccagggctgatatatattggaaatatcacccctgaagccatcgctggcccccacctcctgtggactgatgccccagggattcccaccccacttctgcaaccccaggtatccttcattatccaccccatcccagactcccaccccagggattgcccgtgaagactttggcctagcaaattgtgttggttatgtgagtgttgttttaatcagagatgtacatgattgccaatctgcatttcttaccagtgtgaccacactgttacgatgcaattctagcc

SEQ ID NO: 102366 - DNA, 519 bp, Artificial Sequence
  derived and/or modified sequence
atggcccagcgccttggggagtgggctcgcggaccctctgacgcaaccggcctttatagagcagtgctcctgcgctctgcggctatgtactccgagatccaacgtgagcgcgcagacataggagggttgatggcacgccctgagtaccgggagtggaacccggaactcataaaacctaagaagttgctgaatccggtgaaagcgtctcgatctcaccaggagctgcatagggagctgctcatgaatcaccgccgggggctgggagtcgattccaaacccgaactgcagcgcgtgctggaacatagaaggagaaatcagctgattaaaaagaagaaagaggagctggaggctaaaagactccagtgcccctttgaacaggagctcctgagaagacagcagagactgaatcagctggagaagccccctgagaaggaggaggaccacgcgcctgagttcattaaggtgcgggaaaatttgagacgcattgctacgctgaccagcgaggagcgcgaactctag

SEQ ID NO: 102367 - DNA, 519 bp, Artificial Sequence
  derived and/or modified sequence
atggcccagaggctgggggagtgggcccggggccccagtgatgccaccggcctgtacagagctgtgctgctgcggtctgctgccatgtacagcgagatccagcgggagagagctgacatcggcggcctgatggcccggcctgagtaccgggagtggaaccctgagctgatcaagcccaagaagctgctgaaccctgtgaaggccagccgcagccaccaggagctgcaccgggagctgctgatgaaccaccggcggggcctgggcgtggacagcaagccagagctgcagagggtgctggagcacagaagaagaaaccagctgatcaagaagaagaaggaggagctggaggccaagaggctgcagtgcccctttgagcaggagctgctgcggcggcagcagaggctgaaccagctggagaagcccccagagaaggaggaggaccacgcccctgagttcatcaaggtgcgggagaacctgcggcgcatcgccaccctgaccagcgaggagcgggagctgtag

SEQ ID NO: 102368 - DNA, 519 bp, Artificial Sequence
  derived and/or modified sequence
atggcccagcggctgggcgagtgggcccggggccccagcgacgccacagggctttacagagccgtgctcttacgatccgctgctatgtacagcgaaatccaaagagagagggctgatattggtggtctcatggcaaggcccgagtatcgggaatggaaccccgagctgataaagccaaagaagctgctgaacccagttaaggcgtctcgctctcatcaagagctgcatagagagctcctgatgaatcataggcgtggcctaggggtcgattcaaagccagagctgcagagagtcttggagcatcggagacgtaatcagctcatcaaaaagaaaaaagaggagctcgaagccaagcgcctccagtgtccctttgagcaagaattattaaggcggcagcagcgcctgaatcagcttgagaagccccccgagaaggaggaggaccacgcacctgaatttattaaagtgcgcgagaacttgcgaagaatcgcaaccttaacctccgaagagcgcgaactctag

SEQ ID NO: 102369 - DNA, 519 bp, Artificial Sequence
  derived and/or modified sequence
atggcccagcggctgggagagtgggcacgaggcccttcagatgccactgggctctatcgcgctgtgctcctccggtcagcagccatgtacagcgagattcagagagagagggctgacatcggagggctcatggcaagacccgagtacagggagtggaaccccgagctcattaaacctaagaagttactaaatccagtcaaggcttcccgatcacaccaggaactccatagagaattactcatgaatcacaggaggggtttaggagtggactctaagcctgaactgcagagggtgcttgaacacagacggagaaaccaactaattaaaaagaaaaaagaggaacttgaggcaaagcgcttgcaatgtcctttcgaacaagagcttctccggagacagcaaagattaaaccagttagagaagccgccagagaaggaagaagatcacgcacccgaatttatcaaagttcgcgagaacctgcgaagaatcgcaaccctgactagcgaggaaagggaactttag

SEQ ID NO: 102370 - DNA, 519 bp, Artificial Sequence
  derived and/or modified sequence
atggcccagagactgggcgagtgggccagaggccccagcgacgccaccggcctgtacagagccgtgctgctgagaagcgccgccatgtacagcgagatccagagagagagagccgacatcggcggcctgatggccagacccgagtacagagagtggaaccccgagctgatcaagcccaagaagctgctgaaccccgtgaaggccagcagaagccaccaggagctgcacagagagctgctgatgaaccacagaagaggcctgggcgtggacagcaagcccgagctgcagagagtgctggagcacagaagaagaaaccagctgatcaagaagaagaaggaggagctggaggccaagagactgcagtgccccttcgagcaggagctgctgagaagacagcagagactgaaccagctggagaagccccccgagaaggaggaggaccacgcccccgagttcatcaaggtgagagagaacctgagaagaatcgccaccctgaccagcgaggagagagagctgtag

SEQ ID NO: 102371 - protein, 144 aa, Artificial Sequence
  derived and/or modified sequence
MYSEIQRERADIGGLMARPEYREWNPELIKPKKLLNPVKASRSHQELHRELLMNHRRGLGVDSKPELQRVLEHRRRNQLIKKKKEELEAKRLQCPFEQELLRRQQRLNQLEKPPEKEEDHAPEFIKVRENLRRIATLTSEEREL

SEQ ID NO: 102372 - protein, 135 aa, Artificial Sequence
  derived and/or modified sequence
MYSEIQRERADIGGLMARPEYREWNPELIKPKKLLNPVKASRSHQELHRELLMNHRRGLGVDSKPELQRVLEHRRRNQLIKKKKEELEAKRLQCPFEQELLRRQQRLNQVGDGHPAGTTHPPGLSSREELCCGHS

SEQ ID NO: 102373 - protein, 105 aa, Artificial Sequence
  derived and/or modified sequence
MYSEIQRERADIGGLMARPEYREWNPELIKPKKLLNPVKASRSHQELHRELLMNHRRGLGVDSKPELQRVLEHRRRNQLIKKKKEELEAKRLQCPFEQELLRRQQ

SEQ ID NO: 102374 - protein, 175 aa, Artificial Sequence
  derived and/or modified sequence
MGAAQGKKKTYSPQARFHSENEKQRRNGSAAMYSEIQRERADIGGLMARPEYREWNPELIKPKKLLNPVKASRSHQELHRELLMNHRRGLGVDSKPELQRVLEHRRRNQLIKKKKEELEAKRLQCPFEQELLRRQQRLNQLEKPPEKEEDHAPEFIKVRENLRRIATLTSEEREL

SEQ ID NO: 102375 - DNA, 3465 bp, Artificial Sequence
  derived and/or modified sequence
ctgcctcaggaagcttggcttcccctcccatggggaagtgctggaatccactcttgcctgaccctcccataagaaacaagggaaattcctttacgtgagccgccttgctcagaacaaagcttggcgtgtttcttattcctcatcaatctgacaaaatgggtatttatttgtgcctctcaagcgtgtggcttggacatgatgttccgcatcgtggaagtggccgtgcaccaagtggaatatctgttactatagtaacagttcctttttattgataccagaataaacaggaatgcaaaggctgtctcacttgttggcacatttcagcagcctccgttcccaggggtttaagaaccgccctctagaggcagccctccttgctagtctgggacttcccggtggagtgaggaacccagcaacacgctcctgacttcccttcccaaggactcgacctgagaaggacacagcagtctctgaatttcatgctctcctctttgatgtgaagaaaatgaaaagctgaacagttgtggaactgtggatagagttagacaataaggccgccatgtactcggagatccagagggagcgggcagacattgggggcctgatggcccggccagaatacagagagtggaatccggagctcatcaagcccaagaagctgctgaaccccgtgaaggcctctcggagtcaccaggagctccaccgggagctgctcatgaaccacagaaggggccttggtgtggacagcaagccagagctgcagcgtgtcctagagcaccgccggcggaaccagctcatcaagaagaagaaggaggagctggaagccaagcggctgcagtgcccctttgagcaggagctgctgagacggcagcagaggctgaaccagctggaaaaaccaccagagaaggaagaggatcacgcccccgagtttattaaagtcagggaaaacctgcggagaattgccacactgaccagcgaagagagagagctgtagggccagctgccgggctcaggccactgcccaccctggcctggacagcctccttcagcccttctgtacctggcagccctgggccccaggccctgggacgtctgtgatgttcccacctgcttctgtagaaatgtgtcaccccagagggcctggctctccctgggaggctggggcccctaagctcctaggttttccttccaagcacccagccctcctgctccaagagggataacctgcacccctccctgcaaggggttcagagcccagcacaggagctttctctggcagaattgaggaggaagaggtggccctctgacttgacaagccttctgttctgcccaggccttcccaccaggaatctccgaggctccccagggccccgcttctccgtacaccccagctcctaggtctcagagaactcccccacctgtggttttacctgcagccagcagagcttagcttcaaggacacctgccttcaaagccactgaggggaggaagggcagggcagactgcagatggccttgttgctggcatcccggccaggtgggcggggactaacaaagacagctgtttagggtcttctcccctcacccatgctttcatcatcccctccgcacagcctccccgtccaggccttctaaccacacctacccagggctgccgcattcctgcactcagaagtctgcagcggtgcctcacaaacttgattgtgcataaaaatcactggggatcttgttaatacagcttctaactcaatagatctgggagatcctgcatttctaacaagctcccaggtaaggcggaggctgctggtgtgaggaccatgctgtgagcagcagggcgagagtgcccagggctgatatatattggaaatatcacccctgaagccatcgctggcccccacctcctgtggactgatgccccagggattcccaccccacttctgcaaccccaggtatccttcattatccaccccatcccagactcccaccccagggattgcccgtgaagactttggcctagcaaattgtgttggttatgtgagtgttgttttaatcagagatgtacatgattgccaatctgcatttcttaccagtgtgaccacactgttacgatgcaattctagccaaaaaaaaaaaaaaaaaaaaaaaaattttttttttttactttttcctagtcttatggaaagcaaatatacaatgattttcagtaggcttctggaatagaaacagtggtttgaagaccccactgccacctttatggactggcccctttgagtctgaatccccggcctctgtcacctgagacccaacccctagctgggccaactccagtgaattcacccatttttcttcttcagaaggcctttcctgtgtgagacccacatattttaaccttttgctcctatcccatttttaaagaattagagaataaaccaggcctgtttcttttcccctgaaatccctgcctctggcttcctaaacccatcatctaaggtgacagagcagtgctggaatagcatctcctttcactttcccaaaactgccacagatagctgccactggcatgctctttgattcctggaagcaaacgtgggactgtcggaggaaagggattgttctggtcttactcataactgggtggtttgagggtgactgaagtcgtgcttttcctgtgtgtgctgccagcacagggctgtaaatgcagatattgcgcctgtgtgcgtgtgtataagtcaagctccaagaggctcctgaatgtgactggcgtgctgagaatgtgtttacgctgtttaatgtctgccaggtgagggttacactgaagatgcacaatccctaaaataaagatcaccacttccccaaagaagcagccctcgggtccatgtgttgttcagacatgtgaagagaagcaagacagagggtctcagatggacgagggctctccaagggaatgcctggggattcacccagtggtccccagaggtgctccatggaggcaacaagtcattccatgaagccccagaggtagaagggacctcaagcaccacgccctccagggcagccgtgcagacgaccttggttcacttttcaggggtcgtcccaactctgtatctccagccactccaactgtggaggctgtaaatccagattttcactgttccagtctcctttgcagcttaggatggctatgtgatcaggtgtggccaatgaaattgaagaggaagtctacctgggcttctgggaaagcttttccaataaaagacacaggcatggctaacacctccctgggcctcttcttcctaccttgattgagggtgtgatgcctggagccacagcagccactttgctaccatgacaaaaaggccaagagaatcacagagtcattgaccctatcattatttcaccaagccaataccagccgccatccttctccagaattcttgtaaataaaataaatccctctttgtttaaa

SEQ ID NO: 102376 - DNA, 580 bp, Artificial Sequence
  derived and/or modified sequence
agttgaatgaaggagtctgctctcagagtatctgctgtgggagagccccggaccccaagcatcttcaaaggtctattattaatggggctgtccagctgaagctgacatccgcacgcagccctcccagagctctgcacctcagccagcccacggcctccaccgtctggccctgtcggctgagtggtgcccagcaagaaaacatactctcctcaggccagatttcatagtgaaaatgagaagcagagacgaaatggctcagccgccatgtactcggagatccagagggagcgggcagacattgggggcctgatggcccggccagaatacagagagtggaatccggagctcatcaagcccaagaagctgctgaaccccgtgaaggcctctcggagtcaccaggagctccaccgggagctgctcatgaaccacagaaggggccttggtgtggacagcaagccagagctgcagcgtgtcctagagcaccgccggcggaaccagctcatcaagaagaagaaggaggagctggaagccaagcggctgcagtgcccctttgagcaggagctgctgagacggcagcaga

SEQ ID NO: 102377 - DNA, 2271 bp, Artificial Sequence
  derived and/or modified sequence
agttgaatgaaggagtctgctctcagagtatctgctgtgggagagccccggaccccaagcatcttcaaaggtctattattaatggggctgtccagctgaagctgacatccgcacgcagccctcccagagctctgcacctcagccagcccacggcctccaccgtctggccctgtcggctgagtggtgcccagcaaggtgagaaggccaagtcctgcccgctgggccaggcagaggtcacccgccgcgcctgagctaccggtgtgtgatgagaggactgccccacgtcttccctcatttcccagctgcctcagtttcccttcctgagagaggcagggttctgggaggtgaggagctgcagggacccaagaagggcatagaagccgcctggggacactggcccctctgtcaggatcaatcgccctaagcctgtctgaggcgctccgggcttaggagcagctgtgaaagccgcctttgtgcctgggagaatgagccgcaagaggacagggggccctcgccccgggagccccttgggtcctggctcctgagatcaacgccagcagggaggaccccagcctggcccctgcagcccacccaggcctggtgcccacttcgtgccatgggagcagcccaggggaagaagaaaacatactctcctcaggccagatttcatagtgaaaatgagaagcagagacgaaatggctcagccgccatgtactcggagatccagagggagcgggcagacattgggggcctgatggcccggccagaatacagagagtggaatccggagctcatcaagcccaagaagctgctgaaccccgtgaaggcctctcggagtcaccaggagctccaccgggagctgctcatgaaccacagaaggggccttggtgtggacagcaagccagagctgcagcgtgtcctagagcaccgccggcggaaccagctcatcaagaagaagaaggaggagctggaagccaagcggctgcagtgcccctttgagcaggagctgctgagacggcagcagaggctgaaccagctggaaaaaccaccagagaaggaagaggatcacgcccccgagtttattaaagtcagggaaaacctgcggagaattgccacactgaccagcgaagagagagagctgtagggccagctgccgggctcaggccactgcccaccctggcctggacagcctccttcagcccttctgtacctggcagccctgggccccaggccctgggacgtctgtgatgttcccacctgcttctgtagaaatgtgtcaccccagagggcctggctctccctgggaggctggggcccctaagctcctaggttttccttccaagcacccagccctcctgctccaagagggataacctgcacccctccctgcaaggggttcagagcccagcacaggagctttctctggcagaattgaggaggaagaggtggccctctgacttgacaagccttctgttctgcccaggccttcccaccaggaatctccgaggctccccagggccccgcttctccgtacaccccagctcctaggtctcagagaactcccccacctgtggttttacctgcagccagcagagcttagcttcaaggacacctgccttcaaagccactgaggggaggaagggcagggcagactgcagatggccttgttgctggcatcccggccaggtgggcggggactaacaaagacagctgtttagggtcttctcccctcacccatgctttcatcatcccctccgcacagcctccccgtccaggccttctaaccacacctacccagggctgccgcattcctgcactcagaagtctgcagcggtgcctcacaaacttgattgtgcataaaaatcactggggatcttgttaatacagcttctaactcaatagatctgggagatcctgcatttctaacaagctcccaggtaaggcggaggctgctggtgtgaggaccatgctgtgagcagcagggcgagagtgcccagggctgatatatattggaaatatcacccctgaagccatcgctggcccccacctcctgtggactgatgccccagggattcccaccccacttctgcaaccccaggtatccttcattatccaccccatcccagactcccaccccagggattgcccgtgaagactttggcctagcaaattgtgttggttatgtgagtgttgttttaatcagagatgtacatgattgccaatctgcatttcttaccagtgtgaccacactgttacgatgcaattctagcc

SEQ ID NO: 102378 - DNA, 528 bp, Artificial Sequence
  derived and/or modified sequence
atgggcgcagcccaggggaagaagaagacatatagccctcaagctcgattccactcagaaaacgaaaagcaaagaaggaacgggagtgccgctatgtattcggaaatccagagggagcgtgctgacataggaggattgatggcacggcctgaatacagggagtggaaccccgagctgatcaagccaaagaagctgttgaatcccgtgaaggcgtcccgttctcaccaggaacttcatagggaactgcttatgaatcataggcgaggtctgggcgttgatagcaaaccagagctccagagggtcctggaacataggagaaggaaccaactaatcaagaagaagaaagaggaactggaggccaagcggctccagtgccctttcgagcaggaactcctgcggcgacagcagcggctgaaccaactcgaaaaaccacccgaaaaggaggaggatcacgcaccggagttcatcaaggtaagagagaacctgcggaggatcgcaacactgactagtgaggaaagggagctgtag

SEQ ID NO: 102379 - DNA, 528 bp, Artificial Sequence
  derived and/or modified sequence
atgggcgccgcccagggcaagaagaagacctacagcccccaggcccgcttccacagtgaaaatgagaagcagaggagaaatggatctgctgccatgtacagcgagatccagcgggagagagctgacattggaggcctgatggcccggcctgagtaccgggagtggaaccctgagctgatcaagcccaagaagctgctgaaccctgtgaaggccagccgcagccaccaggagctgcaccgggagctgctgatgaaccacagaagaggcctgggcgtggacagcaagccagagctgcagagggtgctggagcacagaagaagaaaccagctgatcaagaagaagaaggaggagctggaggccaagaggctgcagtgcccctttgagcaggagctgctgcggcggcagcagaggctgaaccagctggagaagcccccagagaaggaggaggaccacgcccctgagttcatcaaggtgcgggagaacctgcggagaattgccaccctgaccagcgaggagcgggagctgtag

SEQ ID NO: 102380 - DNA, 528 bp, Artificial Sequence
  derived and/or modified sequence
atgggcgccgcccagggcaagaagaagacctacagcccccaggcccgttttcactcagagaatgaaaaacagcgcagaaatggaagcgccgcaatgtactccgagatccagagagagagagcggatatcgggggcctgatggcgcgcccagaatatcgagaatggaatcctgagctaattaaacccaaaaagctgttaaaccctgtgaaagcatctcgatctcaccaggagctccatcgcgaactccttatgaatcaccgcaggggactcggggttgatagcaaacctgaactccagagggtccttgaacaccggaggcgcaatcagctgataaagaaaaagaaagaggaactggaggccaaacgattgcagtgccccttcgaacaggagttgctgcggaggcagcagagacttaaccagctcgaaaaacctccagagaaggaagaggaccatgcacctgagttcattaaggtgcgtgagaatctaaggcggatcgcaactctcacctccgaggagagagaactgtag

SEQ ID NO: 102381 - DNA, 528 bp, Artificial Sequence
  derived and/or modified sequence
atgggggcagcccaggggaaaaagaaaacatattctccccaggcccgtttccactcagaaaatgaaaagcagcgcagaaatggatccgccgctatgtatagtgaaatacagagggaaagagctgacataggtgggcttatggcaagacccgaatatcgtgagtggaatcccgagctcatcaaaccaaagaagttgcttaatccagttaaagcctcccgctcgcaccaggagctgcacagggaacttttgatgaatcacagacgcggtttgggggtggactccaaacctgaattacaacgggttttggaacatcggagacgcaatcaattaattaagaaaaaaaaagaggagctggaggcaaaaaggctgcagtgcccatttgagcaggagctactcaggagacagcagcggctgaatcaactcgaaaaacccccagaaaaggaagaagatcacgcaccagaattcatcaaggtgagggaaaatcttaggcgcatcgcgacactgactagcgaagagagagaactctag

SEQ ID NO: 102382 - DNA, 528 bp, Artificial Sequence
  derived and/or modified sequence
atgggcgccgcccagggcaagaagaagacctacagcccccaggccagattccacagcgagaacgagaagcagagaagaaacggcagcgccgccatgtacagcgagatccagagagagagagccgacatcggcggcctgatggccagacccgagtacagagagtggaaccccgagctgatcaagcccaagaagctgctgaaccccgtgaaggccagcagaagccaccaggagctgcacagagagctgctgatgaaccacagaagaggcctgggcgtggacagcaagcccgagctgcagagagtgctggagcacagaagaagaaaccagctgatcaagaagaagaaggaggagctggaggccaagagactgcagtgccccttcgagcaggagctgctgagaagacagcagagactgaaccagctggagaagccccccgagaaggaggaggaccacgcccccgagttcatcaaggtgagagagaacctgagaagaatcgccaccctgaccagcgaggagagagagctgtag

SEQ ID NO: 102383 - DNA, 2143 bp, Artificial Sequence
  derived and/or modified sequence
tgctttttttttttttcccgaacgaccgcagcagggtcacaagggagatgtccgcccccagtcgtagcctcggacggtttctgagcgttggtgtttggcacgcgccaccctctcttgctttggttccgccatgccgatgtaccaggtaaaaccttatcacgggcgcggcgcgcctctccgtgtggagcttcccacctgcatgtaccggctctctaacgtgcaaggcaggagcggcggcccagcgcccggcgttggccacctacagtctttggtagatgagtggctggatagctacaagcaagaccaggatgcaggatttctggagcttgttaactttttcatctgatcttgtggatgtaaaggactcgggggactatcctctgacagctccaggtctatcctggaagaagttccagggcagcttctgtgagtttgtggggacattggtctgtcggtgccagtacatcctcctccatgatgacttccctatggacaacctcatctccctgctcactggcttctcagactcacaagtctgcgccttctgtcacactagcaccctggctgctatgaaactgatgacctccctggtaagagttgccctccaactgagtctgcacgaagatatcaatcagcgtcagtatgaggctgaaagaaacaaggggccagggcagagggcacctgagcggctggagagcctgttggagaaacacaaagagctgcattaatactacattgtcaaagacaaagacgaacatgagacatgcgatatgagttttaaaaggagagaagagcaaaaaaacaatacagctatccaaggagcaagtgctgagcttgtgaaaaaacagcttctattttattaaataatagtgttcctgcagggatgtctgaagtactctgcaaggctaattaggacagatcaatgtacacttacctctccagaaggctgaaaggtgtgtagtgactatgtgtcattaaaaatttacttgaccatgggcaacagatgtccatgaaagaatgaccctggtgagtgctctaagttttcattttactcatgtcatcctcaatgcatcataaatgccatagacaccattactatcacgtaggctcatagcagctgatgtgctgtatatgcttgagagggtggtatcaattaactatattatctataaagccatacttgcaattactaccacttcacaatttatcattaacgcatttggcagatttttttttctccaaagtaacatttatttaaaggtttatcaaaattcttagaacagcatttattataatgtgatttttgataattgactaaatcagtggctcttaaaaacaccctcatctcagtcccgctcagtatacaccacagtgccatttggggaaaagaaatacatattagaaatgttcatttcagacctcgtcatggaagatcatatattaatgtaatcaggtggtacgtttacatgctcattagtaatccatcattagtccaaatgctcactattaggaataaatgtacaacgagttattcagaatacccagaaagagtatttcttatttaaacattcaggacaagctgactgaaataagtgcacaccttgaatttgaactttcaaggcacatcactaaagtcaatcagttatgtcaggacactcttctataataatctcaattataaaattcctgcctctccctaacacaggagttggagggagttccaatatctgaatctttctaattcactgtaactgcaaaaaaatcttgatgaagtgtgtatttaaatttcatgccttaatacatagcatgccactaaaaccacattagttatgctttatgctgcttaatcatacgtcaaaatctgtaaaatctgctcttgcatgctaaggtaatttaactgcaattaatcaattaagaaaaataaaatgtaataaatgccaaataatgtaacttcttttaaacagaccactatctacacatttattccccaaatacttattagctgacaccatataaggaaaacataataaaaagtagacttcactgagcctttctcccattagtagcttgctctaaacttacaaatgttttagagaattctttggcatgatctgactttccaactaaaatgtgagcaacttga

SEQ ID NO: 102384 - DNA, 855 bp, Artificial Sequence
  derived and/or modified sequence
tccgcccccagtcgtagcctcggacggtttctgagcgttggtgtttggcacgcgccaccctctcttgctttggttccgccatgccgatgtaccagtctttggtagatgagtggctggatagctacaagcaagaccaggatgcaggatttctggagcttgttaactttttcatctgatcttgtggatgtaaaggactcgggggactatcctctgacagctccaggtctatcctggaagaagttccagggcagcttctgtgagtttgtggggacattggtctgtcggtgccagtacatcctcctccatgatgacttccctatggacaacctcatctccctgctcactggcttctcagactcacaagtctgcgccttctgtcacactagcaccctggctgctatgaaactgatgacctccctggtaagagttgccctccaactgagtctgcacgaagatatcaatcagcgtcagtatgaggctgaaagaaacaaggggccagggcagagggcacctgagcggctggagagcctgttggagaaacacaaagagctgcattaatactacattgtcaaagacaaagacgaacatgagacatgcgatatgagttttaaaaggagagaagagcaaaaaaacaatacagctatccaaggagcaagtgctgagcttgtgaaaaaacagcttctattttattaaataatagtgttcctgcagggatgtctgaagtactctgcaaggctaattaggacagatcaatgtacacttacctctccagaaggctgaaaggtgtgtagtgactatgtgtcattaaaaatttacttgaccatgggcaacagatgtccatgaaagaatgaccct

SEQ ID NO: 102385 - DNA, 3884 bp, Artificial Sequence
  derived and/or modified sequence
cgcgcttttctggaatctttcgcccccggaagggcagcggcgggcgcctgtgtggaaggtggggtggccagagacacccgagggacctgagctggatcgccatacctaccctgtggtcctcatcttcctggcctcatagctcctcctctccaagcatgtcttccccgttgcaaagagctgtgggagataccaagagggccttgtctgcatcttctagttcctctgccagtctaccctttgatgacagggactcaaaccatacctcagaggggaatggcgactctttgttagctgatgaagacactgactttgaagacagcttgaatcgcaatgtgaagaagagagcagcaaaacgaccaccgaaaacaacaccggtggcaaaacatccaaagaaagggtcccgagtggtacatcgtcatagccggaaacagtcagagccaccagccaatgatcttttcaatgctgtgaaagccgccaaaagtgacatgcagtctttggtagatgagtggctggatagctacaagcaagaccaggatgcaggatttctggagcttgttaactttttcatccaatcttgcggatgtaaaggcattgtgacccctgagatgttcaagaagatgtccaactcagagatcatccagcacctaacagagcagtttaatgaggactcgggggactaccctctcatagctccaggtccatcctggaagaagttccagggcagcttctgtgaatttgtgaggacattggtctgtcagtgccagtacagcctcctctatgatggcttccctatggacgacctcatctccctgctcactggcctctcagactcacaagtccgcgccttccgtcacactagcaccctggctgctatgaaactgatgacctccctggtaaaagttgccctccaactgagtgtgcaccaagataacaatcagcgtcagtatgaggctgaaagaaacaaggggccagggcagagggcacctgagcggctggagagcctgttggagaaacgcaaagagctccaagagcatcaagaggagattgaggggatgatgaatgccctcttcaggggtgtctttgttcatcggtacagggatgtccttcctgagatccgtgctatctgcattgaggaaattgggtgttggatgcaaagctacagcacgtctttcctcaccgacagctatttaaaatatattggttggactctgcatgataagcaccgagaagtccgcctgaagtgtgtgaaggccctgaaagggctgtacggtaaccgggacctgaccacacgcctggagctcttcaccagccgcttcaaggaccggatggtttccatggtcatggacagagagtatgatgtggcagtggaggctgtcagattactgatacttatccttaagaacatggaaggggtgctgacggacgcggattgtgagagcgtctacccagttgtgtatgcctctcatcgaggcctggcctctgccgcaggcgaatttctgtactggaaactcttctaccctgagtgcgagataagaatgatgggtggaagagagcaacgccagagcccaggcgcccagaggactttcttccagcttctgctgtccttctttgtggagagcgagctccatgaccacgctgcttacttagtagacagtctgtgggactgtgcaggggctcggctgaaggactgggagggtctgacaagcctgctgctggagaaggaccagaacctgggtgatgtgcaggagagcacactgatagaaatccttgtgtccagtgcccggcaagcttcagaggggcacccgcctgtgggccgggtcactgggaggaagggcttaacctctaaggagcgcaagacccaagccgatgacagggtgaagttgactgagcacctcatccccctgctgccccagctcctggccaagttctcagctgatgcagagaaggtcactcccctgctccagcttctcagctgctttgacctccacatctactgcactgggcgcttggagaagcacctggagctgttcctgcagcaactccaggaggtggtggtgaagcatgcagagccagcggtgcttgaggctggggcgcatgccctctacctgctctgtaatcccgaattcactttcttcagccgggcggactttgcccgcagccagctagtagatttgctgactgaccgcttccagcaggagcttgaagagctgttacagtcgtccttcctagatgaggatgaggtatataatctggcagccactctgaaacgcctctctgccttctacaacactcatgacctgactcgctgggagctctatgagccatgttgccaactcctgcagaaggctgtggacacaggagaggttcctcaccaggttatcctgccagccttgactcttgtctatttttccattctctggacactaacccacatttctaaatcagatgcttcccagaagcagctgtcgagtttgagggacagaatggtggccttctgtgaactctgccagagttgcctctcagatgtggatactgagatccaggagcaggcttttgtcttattaagtgatctacttctcatctttagccctcagatgattgttgggggccgtgatttccttaggccacttgtcttttttcctgaagctactctccagtctgagctagccagcttcctcatggaccacgtcttcatccagccgggagacctgggcagtggtgattcccaggaggatcatttacagatagagcggctacaccagcggcgccgcctcctagccgggttctgcaagctgttgctttatggggtgctggagatggatgcagcctcagatgttttcaaacactacaacaagttctacaatgactatggtgacattatcaaggaaacattaactagagcaaggcagattgaccgaagtcattgttcccgaatcctgctgctgagcctcaagcagctgtacacagaactgctgcaggagcatgggccccagggcctgaatgagcttcctgccttcatcgagatgagggacctggcccggaggtttgccttgagttttggaccccagcagctgcagaaccgtgacctcgtggtcatgctacacaaggaaggcatccagttctccttgtctgagcttcctccagctggctcctccaatcagcctccaaatctggcattcctggagctcctttcagagttttccccccgactcttccatcaggacaagcagcttttactgtcctatctagaaaagtgcctgcagcatgtctcccaggcacctggccatccctggggcccagtcaccacctactgccactccctcagccctgtggagaacacagcagagaccagccctcaggtcctccccagctccaagaggaggcgcgttgaagggcctgccaagcctaacagagaggacgtctcctcgtcccaggaagaaagtctgcagctgaacagcatcccgcccacgcccaccctcacctccacagctgtgaagagcaggcagcccctgtgggggttgaaagagatggaggaagaagatggctcagagttggattttgcccagggcagtcagcccgtcgcaggcaccgagaggtcaaggttcttgggtccacaatatttccagactccacacaacccttcaggtcctggcctgggcaaccagctgatgcgactcagccttatggaagaggacgaggaagaagagttagaaatccaggatgagtcaaatgaagaacggcaggatacagacatgcaagcaagtagctactcttccaccagtgagcgcgggctggacctcttagattctacagagctggatattgagattactgagagtcttccgttactaggtaagtcaccgcatccttataactccaggtga

SEQ ID NO: 102386 - protein, 205 aa, Artificial Sequence
  derived and/or modified sequence
MIFSMLRKLPKVTCRDVLPEIRAICIEEIGCWMQSYSTSFLTDSYLKYIGWTLHDKHREVRVKCVKALKGLYGNRDLTARLELFTGRFKDWMVSMIVDREYSVAVEAVRLLILILKLFYPECEIRTMGGREQRQSPGAQRTFFQLLLSFFVESKLHDHAAYLVDNLWDCAGTQLKDWEGLTSLLLEKDQSTCHMEPGPGTFHLLG

SEQ ID NO: 102387 - protein, 125 aa, Artificial Sequence
  derived and/or modified sequence
MQHREVRVKCVKALKGLYGNRDLTARLELFTGRFKDWMVSMIVDREYSVAVEAVRLLILILKLFYPECEIRTMGGREQRQSPGAQRTFFQLLLSFFVESKVTYTERTLAVVHRTYKWAGVGGSRL

SEQ ID NO: 102388 - protein, 79 aa, Artificial Sequence
  derived and/or modified sequence
MGGREQRQSPGAQRTFFQLLLSFFVESKLHDHAAYLVDNLWDCAGTQLKDWEGLTSLLLEKDQSTCHMEPGPGTFHLLG

SEQ ID NO: 102389 - protein, 151 aa, Artificial Sequence
  derived and/or modified sequence
MQHREVRVKCVKALKGLYGNRDLTARLELFTGCFKDWMVSMIMDREYSVAVEAVRLLILILKLFYPECEIRTMGGREQRQSPGAQRTFFQLLLSFFVESKLHDHAAYLVDNLWDCAGTQLKDWEGLTSLLLEKDQSTCHMEPGPGTFHLLG

SEQ ID NO: 102390 - protein, 150 aa, Artificial Sequence
  derived and/or modified sequence
MSGWIATSKTRMQDFWSLLTFSSDLVDVKDSGDYPLTAPGLSWKKFQGSFCEFVGTLVCRCQYILLHDDFPMDNLISLLTGFSDSQVCAFCHTSTLAAMKLMTSLVRVALQLSLHEDINQRQYEAERNKGPGQRAPERLESLLEKHKELH

SEQ ID NO: 102391 - protein, 188 aa, Artificial Sequence
  derived and/or modified sequence
MSSPLQRAVGDTKRALSASSSSSASLPFDDRDSNHTSEGNGDSLLADEDTDFEDSLNRNVKKRAAKRPPKTTPVAKHPKKGSRVVHRHSRKQSEPPANDLFNAVKAAKSDMQDSGDYPLIAPGPSWKKFQGSFCEFVRTLVCQCQYSLLYDGFPMDDLISLLTGLSDSQVRAFRHTSTLAAMKLMTSL

SEQ ID NO: 102392 - DNA, 453 bp, Artificial Sequence
  derived and/or modified sequence
atgagcggctggatcgccaccagcaagaccagaatgcaggacttctggagcctgctgaccttcagcagcgacctggtggacgtgaaggacagcggcgactaccccctgaccgcccccggcctgagctggaagaagttccagggcagcttctgcgagttcgtgggcaccctggtgtgcagatgccagtacatcctgctgcacgacgacttccccatggacaacctgatcagcctgctgaccggcttcagcgacagccaggtgtgcgccttctgccacaccagcaccctggccgccatgaagctgatgaccagcctggtgagagtggccctgcagctgagcctgcacgaggacatcaaccagagacagtacgaggccgagagaaacaagggccccggccagagagcccccgagagactggagagcctgctggagaagcacaaggagctgcactag

SEQ ID NO: 102393 - DNA, 453 bp, Artificial Sequence
  derived and/or modified sequence
atgtccggttggatcgctacttcaaaaactaggatgcaagacttctggtctctgttaaccttctcctccgatcttgttgacgttaaggactctggcgactacccgcttactgcccccgggctgtcgtggaagaagttccaggggtctttctgcgagtttgtcggaaccctcgtgtgtcggtgtcagtatattctgctgcacgacgacttcccaatggacaaccttatctcccttttgactggcttctccgacagccaggtatgcgctttttgtcatacttctactctggcagccatgaagctaatgacatcgctagtcagggtcgctcttcaactgtccctgcatgaagacatcaatcagcgacagtatgaagccgaacgcaacaaggggccagggcaacgagcgccggaacgcttagagtccttgctggaaaagcacaaggagctgcattag

SEQ ID NO: 102394 - DNA, 453 bp, Artificial Sequence
  derived and/or modified sequence
atgtctgggtggatcgcaacatcaaagactcgcatgcaggatttctggtctctgcttactttcagtagcgatcttgtcgacgtcaaggattcaggagactaccccctgaccgctcccgggctgtcctggaagaaattccagggatcattctgcgagttcgtaggcacgctggtttgtcgctgccaatatatactgttgcacgacgactttcctatggacaacttgataagcctgctcacagggttctcagacagccaggtttgcgcgttctgtcacacaagtaccctcgccgctatgaagctcatgaccagtctggtccgagtggccctgcagctcagtctgcacgaggacatcaaccagcgacagtatgaggcagagagaaacaagggacccggccagagggcacccgagaggctggagagcctgctcgaaaaacacaaggagctgcattag

SEQ ID NO: 102395 - DNA, 453 bp, Artificial Sequence
  derived and/or modified sequence
atgagcggctggatcgccaccagcaagaccaggatgcaggacttctggagcctgctgaccttcagcagtgacctggtggatgtgaaggacagcggggactaccccctgacagcccctggcctgtcctggaagaagttccagggcagcttctgtgaatttgtgggcaccctggtgtgccgctgccagtacatcctgctgcatgatgacttccccatggacaacctgatcagcctgctgaccggcttcagtgacagccaggtgtgtgccttctgccacaccagcaccctggccgccatgaagctgatgaccagcctggtgcgggtggccctgcagctgagcctgcacgaggacatcaaccagaggcagtatgaagctgagagaaataaaggacctggccagagggcccctgagcggctggagagcctgctggagaagcacaaggagctgcactag

SEQ ID NO: 102396 - DNA, 453 bp, Artificial Sequence
  derived and/or modified sequence
atgagcggctggatcgccaccagcaagacccggatgcaggacttctggtcgctgctgactttctcatcggatctcgtagacgtgaaagactccggcgactaccctctgacagccccgggactgtcctggaaaaagttccagggctcattctgcgaattcgtgggaactctcgtgtgtcgctgccagtacatactgttacacgacgatttccccatggataatctgatatcattattgactggcttttctgactcccaggtgtgtgcattctgtcatactagtactctggcggctatgaagttaatgacctccttggtgagagtggccctgcagttgagcttacatgaggacattaatcagcgccaatacgaggctgagaggaataagggccccggccagcgggcccctgagaggctcgagtccctcctagaaaagcataaggaactacactag

SEQ ID NO: 102397 - DNA, 453 bp, Artificial Sequence
  derived and/or modified sequence
atgagcggctggatcgccaccagcaagacccggatgcaggacttctggtcactgctgacatttagcagcgatttggtggacgttaaggacagcggggattatcctctcacggcacctgggttgtcctggaagaaatttcaggggagcttctgcgaatttgttggtaccctagtatgtagatgtcagtacatcctgttgcacgatgatttccctatggacaatctgatctccctgctcacaggcttttccgacagccaggtgtgtgcgttctgtcatactagtaccttggcagcgatgaaacttatgacctcattagtgcgcgttgccctgcagttgtcgttgcatgaggacatcaatcagcggcagtacgaagcagagcggaataaaggcccagggcagcgcgctcccgagcgccttgaatcactactggagaagcataaggagcttcattag

SEQ ID NO: 102398 - DNA, 453 bp, Artificial Sequence
  derived and/or modified sequence
atgtccggatggatcgcgacgtctaagactcgcatgcaagacttctggagccttctaacattttcttctgacctggtggacgtcaaggactccggagactaccccctcaccgcacctggccttagctggaagaaattccagggatcattctgcgaattcgtgggtactctcgtatgccggtgccaatatatcttattgcatgatgactttcctatggataacttaatctctttacttaccggctttagcgactcccaggtctgtgccttttgtcacacatcaactctggctgctatgaaattgatgacctcactcgtcagagttgctcttcagctctcactccacgaggatatcaatcaaagacagtacgaagccgagcgaaacaaaggccctggccagagagccccagagcgcctggaatcgctgctggagaagcataaggagctgcattag

SEQ ID NO: 102399 - DNA, 453 bp, Artificial Sequence
  derived and/or modified sequence
atgagcggatggattgccacaagcaagacgaggatgcaggacttctggtctctcctgacattcagctcagacctggtggacgtgaaagactccggggattatcctctcactgctcctggcctgtcgtggaagaagtttcagggctcgttttgcgaatttgtgggcaccctggtgtgcaggtgtcagtatattctcctgcacgacgattttcctatggataaccttatctccctcttaacgggtttctccgatagtcaagtatgtgccttttgtcacacgagcactttggctgcgatgaagcttatgacctcccttgtgcgggtcgctcttcagttgagtttgcacgaggatatcaaccagcgacagtatgaagccgagagaaacaagggccctggacaaagagcccctgaacgcctggaaagtctgctggaaaaacacaaagagctgcattag

SEQ ID NO: 102400 - DNA, 567 bp, Artificial Sequence
  derived and/or modified sequence
atgagcagccccctgcagagagccgtgggcgacaccaagagagccctgagcgccagcagcagcagcagcgccagcctgcccttcgacgacagagacagcaaccacaccagcgagggcaacggcgacagcctgctggccgacgaggacaccgacttcgaggacagcctgaacagaaacgtgaagaagagagccgccaagagaccccccaagaccacccccgtggccaagcaccccaagaagggcagcagagtggtgcacagacacagcagaaagcagagcgagccccccgccaacgacctgttcaacgccgtgaaggccgccaagagcgacatgcaggacagcggcgactaccccctgatcgcccccggccccagctggaagaagttccagggcagcttctgcgagttcgtgagaaccctggtgtgccagtgccagtacagcctgctgtacgacggcttccccatggacgacctgatcagcctgctgaccggcctgagcgacagccaggtgagagccttcagacacaccagcaccctggccgccatgaagctgatgaccagcctgtag

SEQ ID NO: 102401 - DNA, 567 bp, Artificial Sequence
  derived and/or modified sequence
atgagtagccccttgcagagggctgtaggggatacgaaacgcgccctgtcggccagctcttctagctctgcatccctgccttttgacgacagggatagcaaccatacgagtgaaggcaatggtgatagcctccttgcagacgaggataccgactttgaggacagccttaatagaaacgtgaaaaagcgcgcagccaaacgaccgcccaagaccacgcctgtggcgaaacatcctaaaaaggggtctagggtagtacacaggcactcacgcaaacaatccgagccgccagccaacgacctctttaatgccgtcaaagcagcaaaaagcgacatgcaagacagtggcgactaccccctgattgcacctgggccatcctggaaaaagttccagggctcattttgcgagtttgttcgtaccctcgtctgccagtgccagtatagcttactgtacgacggtttccctatggatgacctgatcagcctcctgaccggcttatctgattcccaagttagggcattccggcacacaagtaccctggcagccatgaagctgatgacatccctgtag

SEQ ID NO: 102402 - DNA, 567 bp, Artificial Sequence
  derived and/or modified sequence
atgagcagccccctgcagagagctgtgggggacaccaagagggccctgagcgccagcagcagcagcagcgccagcctgccctttgatgaccgggacagcaaccacaccagcgagggcaatggagacagcctgctggctgatgaggacacagactttgaggacagcctgaacagaaatgtgaagaagagagctgccaagaggcctcccaagaccacccctgtggccaagcaccccaagaagggcagccgggtggtgcaccgccacagcaggaagcagagcgagcccccagccaatgacctcttcaatgctgtgaaggccgccaagagtgacatgcaggacagcggggactaccccctcatcgcccctggccccagctggaagaagttccagggcagcttctgtgaatttgtgaggaccctggtgtgccagtgccagtacagcctgctgtatgatggcttccccatggatgacctgatcagcctgctgaccggcctgagtgacagccaggtgcgggccttccgccacaccagcaccctggccgccatgaagctgatgaccagcctgtag

SEQ ID NO: 102403 - DNA, 567 bp, Artificial Sequence
  derived and/or modified sequence
atgagcagccccctgcagcgggccgtgggcgacaccaagcgggccctgagcgcttcttccagctcgagcgcgtccctcccgttcgacgatagagatagcaaccacacttcagaggggaacggagattcactgctcgcggatgaggacacagactttgaagatagcctgaataggaatgtgaagaagcgggcagcaaagcggccacccaaaaccacccccgtggccaagcatcccaagaagggcagccgggtggtgcaccgtcactcaagaaagcagagtgagccacctgccaatgacctgtttaacgcagtgaaggccgctaaatcagacatgcaggattctggagattatccattgattgcccctggcccctcttggaagaaattccagggatcattctgtgaattcgtccgtacactggtgtgccagtgccagtattccctgctatatgacggttttcccatggacgaccttatttctctgctgacaggcctcagtgacagccaggtgagagcttttaggcatacgagcacactggcggcaatgaagctcatgacctctctatag

SEQ ID NO: 102404 - DNA, 567 bp, Artificial Sequence
  derived and/or modified sequence
atgagctcaccgctgcagagagcggtcggagacacaaagcgtgccctgagcgcatcatccagcagtagcgcgtctctcccattcgacgatcgggattctaatcacacctctgagggaaacggagactccctgctagccgatgaagacaccgacttcgaagacagtctgaatcgcaatgtgaaaaagagagctgcaaaaaggccaccaaaaaccactccagtcgccaaacaccctaaaaaaggctccagggtggtgcaccggcacagcaggaaacagagcgagcctccagcaaacgacctcttcaatgctgtgaaggccgctaagtcggatatgcaggattctggtgattaccctctaatcgcaccaggccctagctggaaaaagttccaggggtccttctgcgagtttgtgcgtactcttgtttgccaatgtcaatacagcctgctgtacgacggcttccccatggacgacctgatctcactgctcacaggactctcagacagtcaggtcagggcttttagacacacatcaactcttgcggcaatgaagttaatgacatctctgtag

SEQ ID NO: 102405 - DNA, 699 bp, Artificial Sequence
  derived and/or modified sequence
gcccccggaagggcagcggcgggcgcctgtgtggaaggtggggtggccagagacacccgagggacctgagctggatcgccatacctaccctgtggtcctcatcttcctggcctcatagctcctcctctccaagcatgtcttccccgttgcaaagagctgtgggagataccaagagggccttgtctgcatcttctagttcctctgccagtctaccctttgatgacagggactcaaaccatacctcagaggggaatggcgactctttgttagctgatgaagacactgactttgaagacagcttgaatcgcaatgtgaagaagagagcagcaaaacgaccaccgaaaacaacaccggtggcaaaacatccaaagaaagggtcccgagtggtacatcgtcatagccggaaacagtcagagccaccagccaatgatcttttcaatgctgtgaaagccgccaaaagtgacatgcaggactcgggggactaccctctcatagctccaggtccatcctggaagaagttccagggcagcttctgtgaatttgtgaggacattggtctgtcagtgccagtacagcctcctctatgatggcttccctatggacgacctcatctccctgctcactggcctctcagactcacaagtccgcgccttccgtcacactagcaccctggctgctatgaaactgatgacctccctgg

SEQ ID NO: 102406 - protein, 277 aa, Artificial Sequence
  derived and/or modified sequence
MDSELKEEIPVHEEFILCGGAETQVLKCGPWTDLFHDQSVKRPKLLIFIIPDSNAQEIKDIYGLNGQIEHKLAFLRTHVPKDMKLVLIGHSIGSYFTLQMLKRVPELPVIRAFLLFPTIERMSESPNGRIATPLLCWFRYVLYVTGYLLLKPCPETIKSLLIRRGLQVMNLENEFSPLNILEPFCLANAAYLGGQEMMEVVKRDDETIKEHLCKLTFYYGTIDPWCPKEYYEDIKKDFPEGDIRLCEKNIPHAFITHFNQEMADMIADSLKDDLSKM

SEQ ID NO: 102407 - DNA, 1179 bp, Artificial Sequence
  derived and/or modified sequence
acttccggtctcgtgccgccttcccaggaccctcagggagagcgggcagccttccaggtggacagaaatggactcagaactcaaggaagaaattcctgtgcatgaggaattcattttgtgtggtggagccgaaacccaggttctaaaatgtgggccctggacagacctctttcatgatcaaagtgtcaaaaggcctaagctgcttattttcattattcctgattcaaacgctcaagaaattaaggacatttatggactaaatggacaaatagagcacaaactagctttcctgagaactcatgtgccaaaggacatgaaacttgtgctcattggccattcaataggcagctatttcacacttcagatgctgaagcgagtccctgagctcccggtaattcgtgcctttctgctctttccaacaattgaacgaatgtctgagtcacccaatggcagaattgccactccacttttgtgctggtttcgatatgttctctatgttactggctacttattattgaaaccgtgtcctgagacaatcaagtccttgctaatcagaaggggccttcaagtaatgaacctagagaatgaattttcaccattgaatatattagaaccattctgccttgctaatgctgcctaccttgggggccaagaaatgatggaggtggtgaagagagatgacgaaaccataaaggagcatttatgtaagcttacattttattatggtactatagatccttggtgtccaaaagagtactatgaagacattaagaaggattttccagaaggagacattcgactctgtgagaaaaacatacctcatgctttcatcacccattttaaccaggaaatggcagacatgattgctgactccctaaaggatgacttgtccaaaatgtaaattggcctgaggaacaagcccccactgccagtacatggaggcagtcagtgtactagacttagtaggtaaatgtttaattttgaagactgatattagaaatgaagaaagtgagaacctttgtcttacaaaccaactctccgctcgccatgttataggctgaagtaaacacagttgatgaatcattccataggtttaaccatacattttccaagactcagggaacacagtgatctacacagagtcttgtgtttgcacaagatgcccagtggcaccatatg

SEQ ID NO: 102408 - DNA, 834 bp, Artificial Sequence
  derived and/or modified sequence
atggacagcgagctgaaggaggagatccccgtgcacgaggagttcatcctgtgcggcggcgccgagacccaggtgctgaagtgcggcccctggaccgacctgttccacgaccagagcgtgaagagacccaagctgctgatcttcatcatccccgacagcaacgcccaggagatcaaggacatctacggcctgaacggccagatcgagcacaagctggccttcctgagaacccacgtgcccaaggacatgaagctggtgctgatcggccacagcatcggcagctacttcaccctgcagatgctgaagagagtgcccgagctgcccgtgatcagagccttcctgctgttccccaccatcgagagaatgagcgagagccccaacggcagaatcgccacccccctgctgtgctggttcagatacgtgctgtacgtgaccggctacctgctgctgaagccctgccccgagaccatcaagagcctgctgatcagaagaggcctgcaggtgatgaacctggagaacgagttcagccccctgaacatcctggagcccttctgcctggccaacgccgcctacctgggcggccaggagatgatggaggtggtgaagagagacgacgagaccatcaaggagcacctgtgcaagctgaccttctactacggcaccatcgacccctggtgccccaaggagtactacgaggacatcaagaaggacttccccgagggcgacatcagactgtgcgagaagaacatcccccacgccttcatcacccacttcaaccaggagatggccgacatgatcgccgacagcctgaaggacgacctgagcaagatgtag

SEQ ID NO: 102409 - DNA, 834 bp, Artificial Sequence
  derived and/or modified sequence
atggattctgagctgaaggaggagattcccgtccacgaggaattcatcctgtgcggaggggctgaaacccaggtgttgaaatgtggcccctggacagacttgttccatgaccagtcagtgaagcgccccaagctacttatatttatcattcccgattccaatgcccaggagatcaaggatatctacggactaaatggccagattgaacataaactggcttttctgcgtacccacgtgcccaaagacatgaaactggtactgatcggacactctatcggtagctactttaccttgcaaatgctgaagcgggtgcctgaactgccagtaatccgagcctttcttctgttcccaacaatagagcggatgagcgagagccctaacggacgtatagccacgcctctgctatgctggtttagatatgtactctatgtgactggttatttgctgctgaagccttgtccagagaccatcaaaagtcttctgatcaggaggggcctgcaggtgatgaacctggaaaacgagttctctccactcaatatcctggagcccttctgcctggctaatgcagcctacctgggtggacaggagatgatggaggtcgtgaagcgggacgacgaaacaataaaggaacacctctgtaagctaactttctattatggcactattgatccatggtgccccaaggagtactacgaggatatcaagaaggacttccccgagggagacatacgcctgtgcgagaaaaatatccctcacgcctttattacccatttcaaccaggaaatggcagatatgattgcagactctctcaaggatgatcttagtaagatgtag

SEQ ID NO: 102410 - DNA, 834 bp, Artificial Sequence
  derived and/or modified sequence
atggattctgagctgaaggaggagatccctgtgcatgaggagttcatcctgtgtggcggcgctgagacccaggtgctgaagtgtggcccctggacagacctcttccatgaccagagcgtgaagaggcccaagctgctgatcttcatcatcccagacagcaatgcccaggagatcaaggacatctacggcctgaatggccagatcgagcacaagctggccttcctgcggacccacgtgcccaaggacatgaagctggtgctgattggccacagcatcggcagctacttcaccctgcagatgctgaagagggtgcctgagctgcccgtcatccgggccttcctgctcttccccaccattgaaagaatgtctgagagccccaacggccgcatcgccacccccctgctgtgctggttccgctacgtgctgtatgtgacaggctacctgctgctgaagccctgcccagagaccatcaagagcctgctgatcagaagaggcctgcaggtgatgaacctggagaatgagttcagccccctgaacatcctggagcccttctgcctggccaatgctgcctacctgggcggccaggagatgatggaggtggtgaagagagatgatgagaccatcaaggagcacctgtgcaagctgaccttctactacggcaccatcgacccctggtgccccaaggagtactatgaggacatcaagaaggacttccctgagggggacatccggctgtgtgagaagaacatcccccacgccttcatcacccacttcaaccaggagatggctgacatgattgctgacagcctgaaggatgacctgagcaagatgtag

SEQ ID NO: 102411 - DNA, 834 bp, Artificial Sequence
  derived and/or modified sequence
atggacagcgagctgaaggaggagatccccgtgcacgaggagttcattctgtgtggtggcgcggaaacccaggtacttaaatgcggaccttggacggatctctttcacgaccagagtgtcaaaaggcctaaattgctgatttttatcattccagatagtaacgctcaggaaattaaggacatctacggattaaacggccagattgaacataagctcgcgttcctccgaacccatgttcctaaagatatgaaattggttttgattgggcattctattgggtcctacttcactctccaaatgctgaaacgcgtgcctgaacttcctgttattcgagcgtttctgctctttccaacaattgagaggatgtccgagtcccccaatgggcgaatagcgacccctctgctgtgttggtttcggtacgtgctttatgtgaccgggtacctcctgctgaaaccctgtcccgagaccattaaaagccttttgatccgcagaggactgcaggtgatgaatctggaaaatgaatttagccccctaaatattttggaacccttctgtttggccaacgccgcgtatttgggtgggcaggaaatgatggaagttgtcaagcgggacgacgagacaatcaaggagcatctgtgcaaactgacattttattatggaactatcgacccctggtgtccaaaggagtactacgaggatattaaaaaggactttccagagggggatatcagactgtgtgagaaaaacatacctcacgccttcatcacgcactttaatcaggagatggccgatatgattgccgatagtttaaaggacgacctgagtaaaatgtag

SEQ ID NO: 102412 - DNA, 834 bp, Artificial Sequence
  derived and/or modified sequence
atggattctgaactgaaggaagaaattccggtgcacgaagaattcatcctctgtgggggtgctgaaactcaggtgctgaaatgcggaccttggacggatttattccacgatcagagcgtgaagaggccgaaactgctaatctttatcattccagactcaaacgcccaggagattaaggatatctatggtttaaatggccagattgagcacaaactcgcttttttgcgcacacatgtgccaaaagacatgaagctggtgctgattggacacagtatcggcagctatttcactctccaaatgctgaagagagtgcccgagttgccagtgatcagagcctttttattattccctactatcgaaagaatgtccgagagtcccaatggacgaattgctacaccactgctctgttggtttaggtacgttttgtatgtcacaggatatctgctcctgaaaccctgccccgaaactattaaatcacttctgataagacgcggtctgcaggtgatgaacctcgaaaacgagttttcccccctgaatatcctcgagcccttttgcctggcaaatgcggcttacctcggaggccaggagatgatggaagttgtaaagcgggacgacgagactattaaggagcacctgtgtaagcttacattctattacgggaccattgacccctggtgtcccaaagagtactacgaggacattaagaaggacttcccggagggggatatacgactatgcgagaagaacattccccatgccttcattactcattttaaccaagaaatggccgatatgatagctgactccttaaaggacgacctgagtaaaatgtag

SEQ ID NO: 102413 - DNA, 588 bp, Artificial Sequence
  derived and/or modified sequence
atgaagctggtgctgatcggccacagcatcggcagctacttcaccctgcagatgctgaagagagtgcccgagctgcccgtgatcagagccttcctgctgttccccaccatcgagagaatgagcgagagccccaacggcagaatcgccacccccctgctgtgctggttcagatacgtgctgtacgtgaccggctacctgctgctgaagccctgccccgagaccatcaagagcctgctgatcagaagaggcctgcaggtgatgaacctggagaacgagttcagccccctgaacatcctggagcccttctgcctggccaacgccgcctacctgggcggccaggagatgatggaggtggtgaagagagacgacgagaccatcaaggagcacctgtgcaagctgaccttctactacggcaccatcgacccctggtgccccaaggagtactacgaggacatcaagaaggacttccccgagggcgacatcagactgtgcgagaagaacatcccccacgccttcatcacccacttcaaccaggagatggccgacatgatcgccgacagcctgaaggacgacctgagcaagatgtag

SEQ ID NO: 102414 - DNA, 588 bp, Artificial Sequence
  derived and/or modified sequence
atgaaactggtgctcattggccatagcattggctcttacttcacgctccagatgttaaaacgagtgcctgagctgcccgtcattcgggctttcctcctgtttcccaccattgaaaggatgtccgaaagccccaacggcagaatcgccacacctctcctatgctggtttagatacgtcctatatgtgacagggtacctactgttgaagccctgcccagagacaatcaagtctctccttattagaagaggtttacaggtcatgaacctagagaacgaattctctccattgaacatactggaacccttctgtctggccaacgccgcttacctgggaggacaggaaatgatggaagttgtcaagcgcgatgacgaaacaattaaggagcatctctgcaagctcaccttttactatggcacgatagacccctggtgccctaaagaatactatgaggatatcaagaaagacttcccagaaggggatattaggttatgcgagaagaacatcccccatgccttcataacacacttcaatcaggaaatggctgatatgatcgcagattcactgaaggatgaccttagcaaaatgtag

SEQ ID NO: 102415 - DNA, 588 bp, Artificial Sequence
  derived and/or modified sequence
atgaagctggtgctgattggccacagcatcggcagctacttcaccctgcagatgctgaagagggtgcctgagctgcccgtcatccgggccttcctgctcttccccaccattgaaagaatgtctgagagccccaacggccgcatcgccacccccctgctgtgctggttccgctacgtgctgtatgtgacaggctacctgctgctgaagccctgcccagagaccatcaagagcctgctgatcagaagaggcctgcaggtgatgaacctggagaatgagttcagccccctgaacatcctggagcccttctgcctggccaatgctgcctacctgggcggccaggagatgatggaggtggtgaagagagatgatgagaccatcaaggagcacctgtgcaagctgaccttctactacggcaccatcgacccctggtgccccaaggagtactatgaggacatcaagaaggacttccctgagggggacatccggctgtgtgagaagaacatcccccacgccttcatcacccacttcaaccaggagatggctgacatgattgctgacagcctgaaggatgacctgagcaagatgtag

SEQ ID NO: 102416 - DNA, 588 bp, Artificial Sequence
  derived and/or modified sequence
atgaagctggtgctgatcggccacagcatcggcagctacttcaccttgcagatgctcaaaagggttcctgagctcccagtgatcagagcatttttgctctttcccaccattgaaagaatgtcagaaagtcctaacggacgcatagccacccccctgctgtgctggttcagatacgtgctttacgtgacaggctaccttttgctgaaaccttgcccagagacaataaagtctctcctgatcaggcgcgggctgcaggttatgaatctggagaacgagttttcaccactcaacattctcgagcctttttgtctagccaacgccgcctatttgggggggcaagaaatgatggaagtggtgaagcgggatgatgaaacaattaaggagcatctgtgcaagctcaccttctattatgggaccatcgatccctggtgtcccaaagagtattacgaagacattaagaaggactttccggaaggagacattagactgtgcgagaagaacataccgcacgcctttatcactcacttcaaccaagagatggctgacatgattgctgatagcctcaaggacgatctttcaaagatgtag

SEQ ID NO: 102417 - DNA, 588 bp, Artificial Sequence
  derived and/or modified sequence
atgaagctggtcctcatcggacatagcatcggcagctactttaccttgcagatgctgaagagggttcctgagctgccagttattagggccttccttctatttccgactattgagcgaatgtccgagagtcctaacggtcggatcgctacccctctgctctgttggtttcgctatgtgctctacgttacaggctacctgctccttaagccatgtccagagactatcaagagtttactcatcaggcgaggccttcaagttatgaatctggaaaacgaattcagtccgctgaatatcctggagccattttgtcttgctaatgccgcatatctgggcggacaggagatgatggaggtagttaagagggatgacgagactatcaaagagcatctgtgtaaacttaccttctactacggaacaatcgacccgtggtgcccaaaagagtactatgaagacattaaaaaagacttccccgaaggagatattcgtctgtgtgagaagaatataccacatgcctttatcacccacttcaatcaggagatggcggacatgatcgccgacagcctgaaggatgaccttagcaaaatgtag

SEQ ID NO: 102418 - protein, 166 aa, Artificial Sequence
  derived and/or modified sequence
MDSELKEEIPVHEEFILCGGAETQVLKCGPWTDLFHDQSVKRPKLLIFIIPGNPGFSAFYVPFAKALYSLTNRRFPVWTISHAGHALAPKDKKILTTSEDSNAQEIKDIYGLNGQIEHKLAFLRTHVPKDMKLVLIGHSIGSYFTLQMLKRVPELPLMLPTLGAKK

SEQ ID NO: 102419 - DNA, 933 bp, Artificial Sequence
  derived and/or modified sequence
ctcagggagagcgggcagccttccaggtggacagaaatggactcagaactcaaggaagaaattcctgtgcatgaggaattcattttgtgtggtggagccgaaacccaggttctaaaatgtgggccctggacagacctctttcatgatcaaagtgtcaaaaggcctaagctgcttattttcattattcctggtaacccaggtttttctgccttttatgtgccatttgcaaaggctttatactctttgacaaacagacgctttccagtttggactatcagtcatgctgggcatgcgttggctcccaaagacaagaagattcttacaacatcagaggattcaaacgctcaagaaattaaggacatttatggactaaatggacaaatagagcacaaactagctttcctgagaactcatgtgccaaaggacatgaaacttgtgctcattggccattcaataggcagctatttcacacttcagatgctgaagcgagtccctgagctcccgctaatgctgcctaccttgggggccaagaaatgatggaggtggtgaagagagatgacgaaaccataaaggagcatttatgtaagcttacattttattatggtactatagatccttggtgtccaaaagagtactatgaagacattaagaaggattttccagaaggagacattcgactctgtgagaaaaacatacctcatgctttcatcacccattttaaccaggaaatggcagacatgattgctgactccctaaaggatgacttgtccaaaatgtaaattggcctgaggaacaagcccccactgccagtacatggaggcagtcagtgtactagacttagtaggtaaatgtttaattttgaagactgatattagaaatgaagaaagtgagaacctttgtcttacaaaccaactctccgctcgccatgttata

SEQ ID NO: 102420 - DNA, 501 bp, Artificial Sequence
  derived and/or modified sequence
atggacagcgagctgaaggaggagatccccgtgcacgaggagttcatcctgtgcggcggcgccgagacccaggtgctgaagtgcggcccctggaccgacctgttccacgaccagagcgtgaagagacccaagctgctgatcttcatcatccccggcaaccccggcttcagcgccttctacgtgcccttcgccaaggccctgtacagcctgaccaacagaagattccccgtgtggaccatcagccacgccggccacgccctggcccccaaggacaagaagatcctgaccaccagcgaggacagcaacgcccaggagatcaaggacatctacggcctgaacggccagatcgagcacaagctggccttcctgagaacccacgtgcccaaggacatgaagctggtgctgatcggccacagcatcggcagctacttcaccctgcagatgctgaagagagtgcccgagctgcccctgatgctgcccaccctgggcgccaagaagtag

SEQ ID NO: 102421 - DNA, 501 bp, Artificial Sequence
  derived and/or modified sequence
atggactctgaactgaaagaagaaattcctgtgcatgaggagtttatcctgtgcgggggcgctgaaacacaggtgctaaaatgcggaccatggacggacctgtttcacgaccaatctgtcaaacgccccaagctgctcatctttataatacccggcaaccccggtttcagtgccttctacgtccccttcgctaaagctctctactcccttactaatcggcgattccctgtgtggacaatcagccatgccggccacgcgttagcccccaaggataagaaaatcctcaccacatcagaagattccaacgcacaagagattaaggacatctacggcctcaatggtcagatcgaacacaaattggcctttcttcgcacccatgtacccaaggacatgaagctagtcctgatcggtcattcaattggatcctacttcaccctccaaatgctaaagagagtgcctgaactgcctctaatgctgccgaccctaggggccaagaaatag

SEQ ID NO: 102422 - DNA, 501 bp, Artificial Sequence
  derived and/or modified sequence
atggattctgagctgaaggaggagatccctgtgcatgaggagttcatcctgtgtggcggcgctgagacccaggtgctgaagtgtggcccctggacagacctcttccatgaccagagcgtgaagaggcccaagctgctgatcttcatcatccctggcaaccctggcttcagcgccttctacgtgccctttgccaaggccctgtacagcctgaccaacagacgcttccctgtgtggaccatcagccatgctggccacgccctggcccccaaggacaagaagatcctgaccaccagcgaggacagcaatgcccaggagatcaaggacatctacggcctgaatggccagatcgagcacaagctggccttcctgcggacccacgtgcccaaggacatgaagctggtgctgattggccacagcatcggcagctacttcaccctgcagatgctgaagagggtgcctgagctgcccctgatgctgcccaccctgggcgccaagaagtag

SEQ ID NO: 102423 - DNA, 501 bp, Artificial Sequence
  derived and/or modified sequence
atggacagcgagctgaaggaggagatccccgtgcacgaggagttcatcctctgcggaggtgctgagacccaagtgctgaagtgtgggccttggactgacctattccatgaccagtcagtcaagcgcccaaagctactgatttttataattccaggaaaccctggattttcagccttttatgttcccttcgcaaaggctctgtacagccttaccaaccgtagatttcccgtatggacaatttcccatgctggccatgcactggcaccgaaagataagaagatcctgacaacctcagaggacagcaacgcccaagaaataaaggacatatacggcctgaacgggcaaattgagcataagcttgcctttctgcgcacccatgttccgaaggacatgaaactcgttctcatcggtcatagcataggcagttacttcacactgcagatgttaaagagagtgcctgaacttccgctgatgctgcctactcttggcgctaaaaaatag

SEQ ID NO: 102424 - DNA, 501 bp, Artificial Sequence
  derived and/or modified sequence
atggactcagaattgaaggaggagatacctgtgcacgaggaattcatattgtgcgggggagcggaaacccaagtgctgaagtgcggtccgtggaccgacttgtttcacgatcagtccgttaagaggcccaaactcctgattttcatcattcccggtaatcctggcttcagtgcattttacgtcccatttgccaaggcactgtatagtcttacaaaccgccgatttccggtgtggaccattagtcatgctgggcatgctcttgctcccaaggacaaaaagattctgacaacttccgaagattccaacgctcaggaaattaaagatatatacggcctgaacggtcagatcgagcataaactagccttcctaagaacccatgtgcctaaggatatgaagctagtactgatcgggcatagtataggatcatatttcaccctacaaatgctcaaacgggtgcctgagctccccctgatgcttccaacgctgggggcaaagaagtag

SEQ ID NO: 102425 - protein, 414 aa, Artificial Sequence
  derived and/or modified sequence
MNLQRYWGEIPISSSQTNRSSFDLLPREFRLVEVHDPPLHQPSANKPKPPTMLDIPSEPCSLTIHTIQLIQHNRRLRNLIATAQAQNQQQTEGVKTEESEPLPSCPGSPPLPDDLLPLDCKNPNAPFQIRHSDPESDFYRGKGEPVTELSWHSCRQLLYQAVATILAHAGFDCANESVLETLTDVAHEYCLKFTKLLRFAVDREARLGQTPFPDVMEQVFHEVGIGSVLSLQKFWQHRIKDYHSYMLQISKQLSEEYERIVNPEKATEDAKPVKIKEEPVSDITFPVSEELEADLASGDQSLPMGVLGAQSERFPSNLEVEASPQASSAEVNASPLWNLAHVKMEPQESEEGNVSGHGVLGSDVFEEPMSGMSEAGIPQSPDDSDSSYGSHSTDSLMGSSPVFNQRCKKRMRKI

SEQ ID NO: 102426 - DNA, 1245 bp, Artificial Sequence
  derived and/or modified sequence
atgaacctgcagagatactggggcgagatccccatcagcagcagccagaccaacagaagcagcttcgacctgctgcccagagagttcagactggtggaggtgcacgacccccccctgcaccagcccagcgccaacaagcccaagccccccaccatgctggacatccccagcgagccctgcagcctgaccatccacaccatccagctgatccagcacaacagaagactgagaaacctgatcgccaccgcccaggcccagaaccagcagcagaccgagggcgtgaagaccgaggagagcgagcccctgcccagctgccccggcagcccccccctgcccgacgacctgctgcccctggactgcaagaaccccaacgcccccttccagatcagacacagcgaccccgagagcgacttctacagaggcaagggcgagcccgtgaccgagctgagctggcacagctgcagacagctgctgtaccaggccgtggccaccatcctggcccacgccggcttcgactgcgccaacgagagcgtgctggagaccctgaccgacgtggcccacgagtactgcctgaagttcaccaagctgctgagattcgccgtggacagagaggccagactgggccagacccccttccccgacgtgatggagcaggtgttccacgaggtgggcatcggcagcgtgctgagcctgcagaagttctggcagcacagaatcaaggactaccacagctacatgctgcagatcagcaagcagctgagcgaggagtacgagagaatcgtgaaccccgagaaggccaccgaggacgccaagcccgtgaagatcaaggaggagcccgtgagcgacatcaccttccccgtgagcgaggagctggaggccgacctggccagcggcgaccagagcctgcccatgggcgtgctgggcgcccagagcgagagattccccagcaacctggaggtggaggccagcccccaggccagcagcgccgaggtgaacgccagccccctgtggaacctggcccacgtgaagatggagccccaggagagcgaggagggcaacgtgagcggccacggcgtgctgggcagcgacgtgttcgaggagcccatgagcggcatgagcgaggccggcatcccccagagccccgacgacagcgacagcagctacggcagccacagcaccgacagcctgatgggcagcagccccgtgttcaaccagagatgcaagaagagaatgagaaagatctag

SEQ ID NO: 102427 - DNA, 1245 bp, Artificial Sequence
  derived and/or modified sequence
atgaatttgcagcgatactggggagaaatccccattagctcctcccaaactaatcgctccagctttgatctcctccctagagagtttaggctcgttgaagtgcacgacccccctctccatcagccgagtgcaaacaagcctaaacctccaaccatgctggatatacctagtgagccttgttcgctgacgatacatacgatacaactaatccaacataaccgacggctgaggaaccttattgctactgctcaggcgcagaaccagcagcagaccgagggcgtgaagacagaggagtctgaaccgctccccagctgtcctggatctccaccgctacctgacgatctgctgcctttagactgtaaaaaccccaacgcacccttccaaatccgtcatagtgaccctgagtcagatttttatagaggcaaaggtgaaccagttaccgagctaagttggcattcatgcagacagttgttatatcaggccgtggccaccatcctggctcacgctgggttcgactgtgcgaatgaaagtgtcctggagacattgacagatgtagcgcacgaatactgccttaagttcactaaacttctccgctttgcagtagatcgtgaggccaggcttgggcagaccccttttcctgacgtgatggaacaggtgtttcacgaagtaggaatcggatcagtcctttcactacaaaaattctggcagcatcgtattaaagactatcactcttacatgttgcaaattagcaaacaactttcggaagaatatgagcggattgtgaaccccgaaaaggcaaccgaagatgcaaagcccgtgaaaatcaaggaggagcccgtctcagatattacatttcccgtgtctgaggagctcgaggccgacttggccagtggggatcaatctttacccatgggcgttctcggagcgcaatccgagcgctttcctagcaacctcgaagtcgaagcttcccctcaggccagcagcgccgaagtgaatgccagtccgttgtggaaccttgcccatgtgaagatggagccccaggagagcgaggagggaaatgtaagcgggcatggtgtactagggtctgacgtgtttgaggaacccatgtctggcatgtcagaagcgggtatacctcaaagtcctgatgattccgactcgtcttatggttctcattcaaccgattcattgatgggttcatctccagtgtttaaccagagatgcaagaaacgcatgagaaagatctag

SEQ ID NO: 102428 - DNA, 1245 bp, Artificial Sequence
  derived and/or modified sequence
atgaacctgcagcgctactggggcgagatccccatcagcagcagccagaccaacagaagcagctttgacctgctgccccgggagttccggctggtggaggtgcatgacccccccctgcaccagcccagcgccaacaagcccaagccacccaccatgctggacatccccagcgagccctgcagcctgaccatccacaccatccagctgatccagcacaacagaaggctgaggaacctgattgccacagcccaggcccagaaccagcagcagacagaaggagtgaagacagaggagagcgagcccctgcccagctgccccggcagcccccccctgcctgatgacctgctgcccctggactgcaagaaccccaatgcccccttccagatccgccacagcgaccctgagagtgacttctaccggggcaagggggagcctgtgacagagctgtcctggcacagctgccggcagctgctgtaccaggccgtggccaccatcctggcccatgctggctttgactgtgccaatgaatctgtgctggagaccctgacagatgtggcccacgagtactgcctgaagttcaccaagctgctgcgctttgctgtggaccgggaggcccggctgggccagacccccttcccagatgtgatggagcaggtgttccacgaggtgggcatcggctctgtgctgagcctgcagaagttctggcagcaccgcatcaaggactaccacagctacatgctgcagatcagcaagcagctgtctgaggagtatgagcgcatcgtgaaccctgagaaggccacagaagatgccaagcctgtgaagatcaaggaggagcctgtgtctgacatcaccttccctgtgtctgaggagctggaggccgacctggccagcggggaccagagcctgcccatgggcgtgctgggcgcccagagcgagcgcttccccagcaacctggaggtggaggccagcccccaggccagcagcgctgaggtgaatgccagccccctgtggaacctggcccacgtgaagatggagccccaggagagcgaggagggcaatgtgtctggccatggagtgctgggcagtgatgtgtttgaggagcccatgagcggcatgtctgaggccggcatcccccagagcccagatgacagcgacagcagctatggcagccacagcacagacagcctgatgggcagcagccctgtgttcaaccagcgctgcaagaagaggatgaggaagatctag

SEQ ID NO: 102429 - DNA, 1245 bp, Artificial Sequence
  derived and/or modified sequence
atgaacctgcagcggtactggggcgagatccccatcagcagcagccaaacgaataggtcatcatttgatctgctgccgagagagttccgtttagtggaggtgcacgacccccctcttcatcaaccatccgctaataagcccaaaccaccgacaatgctggatattcccagcgaaccctgttctctgaccatccacactattcagctaattcagcacaatcgtcggctaagaaaccttattgcaacggcccaagcacaaaaccagcaacagactgaaggagtcaagaccgaggaatccgaacctcttccttcctgccccgggtccccacccctgcccgatgatctcctgccgctcgactgtaagaaccctaacgctccatttcaaattcggcactctgatcccgaatctgatttctaccgcggaaagggagaaccggtcacagagctctcttggcactcatgccgacagctactgtatcaggcagtggctacgattctcgcacacgccgggttcgactgcgccaatgaatccgttcttgagaccctaaccgatgtggctcatgaatattgtctgaagtttactaaactactgcgctttgccgtagacagagaagctcggctcggtcagacgcctttccctgacgtcatggagcaggtctttcacgaggtcggcatcggatctgtcctgagcctgcagaagttctggcagcacaggattaaggattaccactcatacatgttacagatttctaagcagctgagcgaagagtatgagcgtatagtgaacccagaaaaggccacagaggatgccaagccagtgaagataaaggaagagccagtctcggatatcacctttcctgtatctgaggaactggaagcagacttggctagcggagaccagagtctgcctatgggcgtcctgggggcccagtctgagaggtttccctccaacctggaagtggaagcttcaccacaggcatcgagcgcagaggttaacgcctcacctctctggaacctggctcatgtgaaaatggaaccacaggagtctgaagaaggaaacgtcagcggacacggggtgctgggttctgatgtgtttgaggagccgatgtctggcatgtccgaagccggaattccacagagcccagatgatagtgacagctcatacgggagccacagtaccgatagtctcatgggtagtagccccgtgtttaatcagcgatgtaagaaaagaatgaggaagatctag

SEQ ID NO: 102430 - DNA, 1245 bp, Artificial Sequence
  derived and/or modified sequence
atgaacctgcagcgctactggggcgagattcccatcagcagctcccagaccaacagatctagcttcgatctgctgcctcgcgagtttcgactggttgaagttcacgatccccctctccatcagccaagtgctaataaacccaagccccctactatgctggacataccaagtgaaccgtgttctttgacaatccataccattcagctgatccaacataatagaaggctgaggaacctgatcgccaccgcccaagcacaaaaccagcagcagacagagggtgtaaagacggaggagtccgaacctctgccatcctgccctggctctccacctctccctgatgacctgctacccttggactgcaagaatcccaatgccccatttcagattcgacattctgatccagagagtgacttttatcggggaaagggagagccagttaccgaactcagttggcactcttgtaggcaattgctgtatcaggccgtggccactattttggcacacgcaggcttcgactgcgcaaacgagagtgtgttggaaacactgacagatgtggctcacgagtactgtttgaaatttaccaagctactcaggttcgcagtagatcgcgaggctagacttgggcagacaccctttccggacgtcatggaacaggtctttcacgaggtgggaatcgggagtgtgctctctcttcagaagttttggcagcataggatcaaagattaccactcctacatgctgcagatctctaaacagctgagcgaggaatatgagagaatcgttaaccccgagaaagcaacagaggacgccaaacctgtgaagatcaaagaagaaccagtgtctgatatcacatttcccgtttcggaggaactcgaggccgatctggcctccggtgatcagtcccttcccatgggtgtgctgggtgcccagtcagagagatttcccagcaatctggaggttgaggccagtcctcaggcaagctctgcagaggttaacgccagccctctgtggaatctcgcccatgtgaagatggagccccaggaatccgaggaaggaaatgtgtctggccatggcgtgctgggaagcgatgttttcgaagaacctatgtccggcatgtcagaagcaggcattccccagagcccagacgactctgactccagttatggcagccactccacagatagcttgatgggaagctcccctgtcttcaatcagcgctgcaaaaagcgaatgcgcaagatctag

SEQ ID NO: 102431 - DNA, 4488 bp, Artificial Sequence
  derived and/or modified sequence
cggcgatggtgaagttgctccttcacgacctggagcgttgcgaagtggtgctaacatgagaaggtcataatatgagaaaaacaaaacggttatcgggatgctgtgcagaacggggacatatttagaggttacaacgggatcgtaatgacttcctgttgcatagcttgattgagaagaagcgcttccggcggtcttagatcactaatcaacaaaccagctttcggggtctgacgcgatccttgcctcaggcctctcgaggtccagacagccgcccagcccgctctgcgacgcagcagtgaatagtgtggtacctccttgtctcggttcaggtccagacctccccgtcttccggctgccctgaacgtcaggcgacctcaggaccctgtgattggcgcctgcgccggcggaccgtgaccgaggaaacccctggagggacttgggcattccttgggctccgtgcctgttcttcgtgctcctttcgggcaaggatctcacattatcagtctttgaccgacacagaatgcctggcatttgataaatgtttgttgaacttgaagagacatatggacaatgaatctgcaaagatactggggagagataccaatatcatcaagccagaccaacagaagttccttcgatttgctcccacgggagttccgtctggtggaagtccatgacccacccctgcaccaaccctcagccaacaagccgaagccccccactatgctggacatcccctcagagccatgtagtctcaccatccatacgattcagttgattcagcacaaccgacgtcttcgcaaccttattgccacagctcaggcccagaatcagcagcagacagaaggtgtaaaaactgaagagagtgaacctcttccctcgtgccctgggtcacctcctctccctgatgacctcctgcctttagattgtaagaatcccaatgcaccattccagatccggcacagtgacccagagagtgacttttatcgtgggaaaggggaacctgtgactgaactcagctggcactcctgtcggcagctcctctaccaggcagtggccacaatcctggcccacgcgggctttgactgtgctaatgagagtgtcctggagaccctaactgatgtggcacatgagtattgccttaagtttaccaagttgctgcgttttgctgtggaccgggaggcccggctgggacagactccttttcctgatgtgatggagcaggtattccatgaagtgggtattggcagtgtgctctccctccagaagttctggcagcaccgcatcaaggactatcacagttacatgctacagattagtaagcaactctctgaagaatatgaaaggattgtcaatcctgagaaggccacagaggacgctaaacctgtgaagatcaaggaggaacctgtgagcgacatcacttttcctgtcagtgaggagctggaggctgaccttgcttctggagaccagtcactgcctatgggagtgcttggggctcagagcgaacgcttcccatctaacctggaggttgaagcttcaccacaggcttcaagtgcagaggtaaatgcttctcctctttggaatctggcccatgtgaaaatggagcctcaagaaagtgaagaaggcaatgtctctgggcatggtgtgctgggcagtgatgtcttcgaggagcctatgtcaggcatgagtgaagctgggattcctcagagccctgatgactcagatagcagctatggttcccactccactgacagcctcatggggtcctcccctgttttcaaccagcgctgcaagaagaggatgaggaaaatataaaaggaaaagagggagatgttttgtccagacctactagacccaacagaaaaggtttttgtattagaatctgtttccttaaaaattgatttgactcctgttcttaaacacaagtggtttttcctaattccagaggaactggacgtcaccaaacaaggttgcattttacttttgcatccagtttttatagttttccacaaccaagccacccttcacagataaaatatgatgctggcatggcaatcagaccaaagcactgtccccaattgttgtcttaactatgactagacatgttatacagccatttatcttgtacaactgagaagaatcatactttgacctaccttgtagagatgtgaggatttagatgtttgctaacttcaaaactgtgcttgaatagactaataatatatgctcatatcagatgtcagttttcatttaacttgattcatttttggctcaggtcattgggaacccattactaatacctaacaggaaatagctaaacacaacacaccttatctattagtcaccttcttaaaactgtttttgctacttttgaagtgtcttatttataagatcagaggtctgacaccttttttgcttagacagctctctatctcatccatttattttcttctctagacttactccatctctcctcatccttttgcctttgttatttctgctcggactcacatactttcaccatatacatattttcaattgtttctttccttttctcctttgtgagcaaagcaaacaagtactgtccaaggacagccttgtgcatatttcatttgttgcatttgcttggtcatcagaggacagcagtccattaagcacactttgctgcttctactgtaaaggcagcctttaaaacatagcaatatgcacctttcaactttacatcatgtcctgaacaacatcactgtggttactcatccatcagactatctgtatatataagtactgaatcagtatttattaagtaaatgatgtagcactgtagtgattaggaatcattagcaaatgtgttgcttcatgccttggtgatggatgccagcatgttaaactgctgaagtttgattttctgatgcaaaatatatcttgtaaaatttagaccactcctttaatgcagaccaaaataaggcacagctttaattcattattgaatgccttaaatgtcccaggtattgagaataaatgaatatgatacaaatgaggttatagtttaacatataattttaaatttgccaattgtaactctttagcacatttctctaaaccctttctgtcacagtcttttttttaatttatttatttatttatttatttttgagatggagtcttgctctgtcacccaggctggagtgcaatggtgcaatttcgactcactgcaacctctgcctcccaggttcaagcgattctcctgcctcagccacctgagtagctgggattacacgcacatgccaccacacccagctaatttttgcatttttagtagagatgaggtttcaccgtgttggccaggctggtctcaaaactcctgacctcaagtgatctgcccgcctcgggctcccaaagtgctgggattacaggcgtgagccactgcacctggcctctgttgcagtcttatcttcattttcctttgtttataatgaaagtggcgattaggcagttagtttccataaagtggccgtatgggaatttagttcattcatccagcaaacattgagtaccaattatttgctaggtcctgtgcaaggaatacaaaaatgattaagacttcttccttacccttttggagcttgaagcataaggaagacaagttattctgtaaggaagataaagcattcaaaagtactacagagaaaaaccaagtatgcttgagttttgcgaatgttctcctcttaaagaatagcttcaaattttgagaccagtggttcccactaagtatagaacattaaaattaatactttataataaaacacttttattgctgcagaatgttaaactgcataacaggcaccagatggtcaagacgagggaaatatgagaaggcaaatgatgtgaggattagtatcttgagattcacctggtctggaattatgtcataggctactatgcatcagaatcacatggagggctttctaaaacagactgctcagcccacccccagggtttctgagttcataggttataagaggtaagttgaacaattccccagatgatgctgatgctcctggtccacaatgtgagaaccactaagttggagtactgactcatagagataaaattctttgaaagaaatgtactgttttaagatactgtaaaatgtggaggcagggcaaacgtttataagggctgttatgtatgaaatgtgcctctgacccaaatccacggactttgcgaaaatcaccaaggagactttgcattaagttcagagtacaatacaaactgggcctagctctgtatttagtcagtatgtgcacgtgggaaactttagtaaaatatcacctccttattgagacaagtttggacatctggccttaagcctctgttgaacaggagaagtgaagctgtttgcaattatataattttctaatttgaaatcatgacaagcagtcttagaacaaagttaaaattaaaaagtctttatccaagtcaccaatg

SEQ ID NO: 102432 - protein, 412 aa, Artificial Sequence
  derived and/or modified sequence
MLRYWGEIPISSSQTNRSSFDLLPREFRLVEVHDPPLHQPSANKPKPPTMLDIPSEPCSLTIHTIQLIQHNRRLRNLIATAQAQNQQQTEGVKTEESEPLPSCPGSPPLPDDLLPLDCKNPNAPFQIRHSDPESDFYRGKGEPVTELSWHSCRQLLYQAVATILAHAGFDCANESVLETLTDVAHEYCLKFTKLLRFAVDREARLGQTPFPDVMEQVFHEVGIGSVLSLQKFWQHRIKDYHSYMLQISKQLSEEYERIVNPEKATEDAKPVKIKEEPVSDITFPVSEELEADLASGDQSLPMGVLGAQSERFPSNLEVEASPQASSAEVNASPLWNLAHVKMEPQESEEGNVSGHGVLGSDVFEEPMSGMSEAGIPQSPDDSDSSYGSHSTDSLMGSSPVFNQRCKKRMRKI

SEQ ID NO: 102433 - DNA, 1239 bp, Artificial Sequence
  derived and/or modified sequence
atgctgagatactggggcgagatccccatcagcagcagccagaccaacagaagcagcttcgacctgctgcccagagagttcagactggtggaggtgcacgacccccccctgcaccagcccagcgccaacaagcccaagccccccaccatgctggacatccccagcgagccctgcagcctgaccatccacaccatccagctgatccagcacaacagaagactgagaaacctgatcgccaccgcccaggcccagaaccagcagcagaccgagggcgtgaagaccgaggagagcgagcccctgcccagctgccccggcagcccccccctgcccgacgacctgctgcccctggactgcaagaaccccaacgcccccttccagatcagacacagcgaccccgagagcgacttctacagaggcaagggcgagcccgtgaccgagctgagctggcacagctgcagacagctgctgtaccaggccgtggccaccatcctggcccacgccggcttcgactgcgccaacgagagcgtgctggagaccctgaccgacgtggcccacgagtactgcctgaagttcaccaagctgctgagattcgccgtggacagagaggccagactgggccagacccccttccccgacgtgatggagcaggtgttccacgaggtgggcatcggcagcgtgctgagcctgcagaagttctggcagcacagaatcaaggactaccacagctacatgctgcagatcagcaagcagctgagcgaggagtacgagagaatcgtgaaccccgagaaggccaccgaggacgccaagcccgtgaagatcaaggaggagcccgtgagcgacatcaccttccccgtgagcgaggagctggaggccgacctggccagcggcgaccagagcctgcccatgggcgtgctgggcgcccagagcgagagattccccagcaacctggaggtggaggccagcccccaggccagcagcgccgaggtgaacgccagccccctgtggaacctggcccacgtgaagatggagccccaggagagcgaggagggcaacgtgagcggccacggcgtgctgggcagcgacgtgttcgaggagcccatgagcggcatgagcgaggccggcatcccccagagccccgacgacagcgacagcagctacggcagccacagcaccgacagcctgatgggcagcagccccgtgttcaaccagagatgcaagaagagaatgagaaagatctag

SEQ ID NO: 102434 - DNA, 1239 bp, Artificial Sequence
  derived and/or modified sequence
atgctacggtattggggggagatcccaatttcttcctcccaaaccaacagatccagctttgatttgctgccgcgggagtttcgtctggtggaggtgcacgaccctcccttacaccaaccgtcagcaaacaagcctaaaccacctaccatgctggatatccccagcgagccttgtagcttgactatacacactatacagctcatccagcataatagacgtctgcggaacttgattgccaccgcccaagcccaaaatcagcagcaaacagaaggcgttaagaccgaagagtccgaacccctgccttcatgccctggctctcctcccctccctgatgacctgttgcctcttgattgcaagaatccaaatgcaccctttcaaatccggcattcagatcctgaatccgatttctaccgtgggaaaggagagcctgtgacagagcttagctggcacagttgtaggcagttgctctatcaagcagttgcaaccattctggcgcatgccgggttcgattgcgctaacgaatccgtgcttgaaaccctcaccgacgttgcacatgagtattgcctcaaattcaccaaacttttgcgatttgctgtcgaccgagaggctcggctaggccagacaccatttcccgatgtgatggagcaagtcttccacgaagtggggataggtagtgttctgagcttgcagaagttctggcagcatcgcattaaagactatcattcatatatgttacagatttccaagcaactgagcgaagaatacgagcgcatcgttaatccagagaaagccacagaggatgcaaagcctgtcaaaattaaggaagagcctgtgtccgacatcacattccccgtatctgaagagctggaagctgatcttgcctctggcgaccaatctctgccaatgggggtactcggcgctcagagcgagaggttcccctctaatttggaggtcgaggcatctccccaagcaagttccgctgaggtaaacgcatcaccactgtggaacctcgcgcacgtgaaaatggagccccaggagtccgaggagggcaacgtgagcgggcatggagtcttggggagtgatgtattcgaggaacccatgagcggtatgtctgaggccggcataccccagagcccggatgatagtgatagcagctacggcagccatagtactgattctcttatggggagcagtcctgtcttcaatcagagatgtaaaaagcgcatgagaaagatctag

SEQ ID NO: 102435 - DNA, 1239 bp, Artificial Sequence
  derived and/or modified sequence
atgctgagatactggggggaaatccccatcagctcctcccaaacaaatagatcctcttttgacttgttgccgcgagaattcagactcgtagaggttcatgacccacccctgcatcagcctagtgctaataagccgaagccacccaccatgcttgatataccctccgaaccttgctccctgaccattcataccatacaactaatccagcataacagacgactccgtaacctgatcgctaccgcccaagctcagaaccagcagcagactgagggcgtgaagaccgaggagtcagagccgctaccatcttgtcctggctcacccccgttgccggacgacctgctgccattggactgcaagaaccccaacgcacctttccagatccgccattccgatccggaatccgacttttatcgaggcaagggtgagcccgtgaccgagctcagttggcacagctgtcggcagctgctctaccaggccgtggccacaatcctggcccacgcaggcttcgattgtgctaatgagtcggtgctggagaccctgacagacgtagcgcacgagtactgtttaaagtttaccaaactccttaggtttgctgtggacagggaggcccggctcggccagaccccattccctgatgtcatggaacaggtcttccatgaagtcgggattggcagtgtcctgtcgctccagaaattctggcagcaccgcataaaggactatcatagctacatgcttcagatatccaaacagctctctgaagagtatgagcgtattgtgaatcccgaaaaagccaccgaggatgccaaaccagtgaaaattaaggaagaaccggtgtccgatataacctttccggttagtgaggaactggaagccgacctggccagtggagatcaatcactgcctatgggagtcctcggcgcacaatcagagcgttttccatccaacctcgaggttgaggcaagtccccaggcttctagcgctgaggtgaacgcctcgccactgtggaacttagcacatgttaaaatggagccacaagaaagcgaggaggggaatgtaagtggacatggagtgttggggagcgatgtcttcgaggaacctatgagtggcatgagcgaggcagggatcccacagtcgcctgacgactccgactcctcttacggctctcattcaacagatagtcttatgggcagttcccctgtgtttaatcagcgatgtaaaaagcgaatgagaaaaatttag

SEQ ID NO: 102436 - DNA, 1239 bp, Artificial Sequence
  derived and/or modified sequence
atgttaaggtattggggcgaaatcccaatcagctcaagtcagaccaatcggtcctcattcgatctactccccagggagttccgactggtcgaggtccacgacccaccactgcatcagcctagcgccaataagccgaaacctcctactatgctcgatatccctagtgagccttgtagcttgacaattcacacaatccaacttatccagcataaccgcagactgagaaacctgatcgcgaccgcccaggcacagaaccaacagcaaaccgagggcgtgaagacagaagaatctgagcctctaccatcctgcccaggatctcccccattgccggacgatctgttgccattagactgcaagaatccaaacgccccatttcagatacgccatagtgatcccgagtccgacttctaccggggaaagggcgaaccagtgactgagctgtcttggcacagttgcagacagttactctaccaggccgtggccactatcctagcacacgctggattcgattgtgcaaacgaatcggttcttgaaacactgactgacgtcgcccatgaatactgtttaaagtttactaaactcctgaggttcgccgtcgacagagaggcccgtctgggccaaacacctttcccggacgtgatggagcaggtgtttcatgaagtgggaattggctccgtcctttcccttcagaagttctggcaacatcggataaaggactaccactcctatatgctccagattagtaagcagctgtccgaggaatatgagagaatcgttaaccccgaaaaggccactgaggatgctaaacccgtcaaaattaaggaggagcccgtctccgacatcacattcccagttagcgaggagctcgaggcggatctcgcgtccggcgatcagtcgctgcccatgggggtgctaggagcgcagtctgagcggttcccctctaacctggaagtcgaggcatctccgcaggccagcagcgcagaagtgaatgcatcccctctgtggaatctcgcgcatgtcaaaatggagcctcaggagtcagaagagggaaatgtgagcggccatggcgtcctgggctcggacgtttttgaggagcccatgtccggcatgtccgaggccgggattccacagagccccgatgacagtgactcatcatacggcagccacagtaccgactcactaatgggatcgagcccagtcttcaaccagagatgtaaaaagcggatgaggaaaatttag

SEQ ID NO: 102437 - DNA, 1239 bp, Artificial Sequence
  derived and/or modified sequence
atgctgcgctactggggcgagatccccatcagcagcagccagaccaacagaagcagctttgacctgctgccccgggagttccggctggtggaggtgcatgacccccccctgcaccagcccagcgccaacaagcccaagccacccaccatgctggacatccccagcgagccctgcagcctgaccatccacaccatccagctgatccagcacaacagaaggctgaggaacctgattgccacagcccaggcccagaaccagcagcagacagaaggagtgaagacagaggagagcgagcccctgcccagctgccccggcagcccccccctgcctgatgacctgctgcccctggactgcaagaaccccaatgcccccttccagatccgccacagcgaccctgagagtgacttctaccggggcaagggggagcctgtgacagagctgtcctggcacagctgccggcagctgctgtaccaggccgtggccaccatcctggcccatgctggctttgactgtgccaatgaatctgtgctggagaccctgacagatgtggcccacgagtactgcctgaagttcaccaagctgctgcgctttgctgtggaccgggaggcccggctgggccagacccccttcccagatgtgatggagcaggtgttccacgaggtgggcatcggctctgtgctgagcctgcagaagttctggcagcaccgcatcaaggactaccacagctacatgctgcagatcagcaagcagctgtctgaggagtatgagcgcatcgtgaaccctgagaaggccacagaagatgccaagcctgtgaagatcaaggaggagcctgtgtctgacatcaccttccctgtgtctgaggagctggaggccgacctggccagcggggaccagagcctgcccatgggcgtgctgggcgcccagagcgagcgcttccccagcaacctggaggtggaggccagcccccaggccagcagcgctgaggtgaatgccagccccctgtggaacctggcccacgtgaagatggagccccaggagagcgaggagggcaatgtgtctggccatggagtgctgggcagtgatgtgtttgaggagcccatgagcggcatgtctgaggccggcatcccccagagcccagatgacagcgacagcagctatggcagccacagcacagacagcctgatgggcagcagccctgtgttcaaccagcgctgcaagaagaggatgaggaagatctag

SEQ ID NO: 102438 - DNA, 1239 bp, Artificial Sequence
  derived and/or modified sequence
atgctgcggtactggggcgagatccccatcagcagcagccagaccaacaggagctctttcgatctgctccctagggagttcagactggtggaagtgcatgatccacccctccaccagccatcagcgaacaagcctaagcccccaacgatgctcgacataccaagtgagccttgcagtctgacgatccacacaattcagcttatacaacacaaccgacggctccggaacctgatcgctacagcccaggcacaaaaccagcagcagactgagggagttaagacggaggaatcagagcccttgccctcttgtcctggtagtccgcctctgccagacgatctgctccctctggactgcaagaaccctaacgcaccttttcagatccggcacagcgatcctgagtcagatttctatagggggaaaggggagcccgttacagagctcagttggcactcctgtcggcagttgctgtatcaggcagtcgccaccattttggcacatgcagggtttgattgtgctaacgaatcagtgttagagaccttgacagacgtcgcccacgaatattgtctcaagttcacaaagcttctgcggtttgcagtcgatcgggaggctcgcctcggacagacacccttccccgatgtgatggaacaagtctttcacgaggtgggcatcggttccgtgttgagtctgcaaaaattttggcagcatcgtatcaaagactatcacagttacatgttacagatctccaaacagctgtctgaagaatatgaacgcatcgtgaaccctgagaaagctaccgaggatgctaagcccgtaaaaatcaaagaggaaccggtgagcgacatcacattccccgtatccgaggagttagaggctgacctagcttcaggcgaccagtccctgccgatgggcgtgttgggcgcacagtctgagaggtttccgagtaacttggaggtcgaggcttcgccacaagcttcttccgcagaggtaaatgcatctcccctgtggaacttagcccatgtgaaaatggagccccaagagtccgaggagggtaatgtctcaggacacggcgtactggggagtgacgtcttcgaggagcccatgtccgggatgtctgaggcaggtattcctcagagtcccgacgacagcgactcatcatacggctctcactccacggacagcctgatggggagttctccagtattcaatcagcggtgcaagaagcgtatgaggaaaatttag

SEQ ID NO: 102439 - DNA, 1239 bp, Artificial Sequence
  derived and/or modified sequence
atgctgcggtactggggcgagatccccatcagcagcagccagaccaaccggtcctctttcgatctcctgccacgggagttccgattggtggaggtccacgatccccctctccaccaaccctctgctaataagcccaaacccccaacaatgctggatattccgtctgagccttgctccctgacaattcacacaatccaactaattcaacataacagacgattgcggaacctgattgcaactgcacaggcccaaaaccagcagcaaacagagggagtgaaaacagaggaatccgagccattgccctcttgcccaggcagtcctcccttgccagacgatctgctgccactagattgcaagaatcccaacgctccattccaaatcaggcactccgaccctgagtccgatttttaccgaggcaagggcgaacctgtaacggaactgtcttggcatagctgcaggcagcttctttaccaggcggttgcaacaatactggcacatgccggcttcgactgcgcaaacgaatccgtgctcgagaccctgaccgacgtggcacacgaatactgtctcaaatttactaaactccttagatttgctgttgatcgagaggcgcgcctcgggcagactccattcccagacgtgatggagcaggtttttcatgaggtcggtatcggctccgtcctttctttgcaaaagttttggcagcaccgcatcaaagattatcactcctacatgctccaaatatcgaagcagctcagtgaggaatatgagaggatcgtcaacccagaaaaagctacagaggacgctaaacccgtgaaaatcaaggaagagccggtaagcgatataacgttccctgttagcgaagaactggaggcagatctggcatccggagatcagagcctcccaatgggcgtgctgggagcccaatcagagcggtttccttcgaatttggaagtcgaagcatctccacaggcttccagtgctgaggtaaacgcaagtccgctctggaacctcgcgcacgtgaagatggagccacaggagtcagaggaaggcaacgtttcggggcatggcgtgctgggcagtgacgtattcgaggagcctatgtccggcatgtccgaggccgggatcccacagtctcccgatgacagcgactcatcatacggatcccattcgacagattccctgatgggctcctctcctgtgtttaatcagaggtgcaagaaacgaatgcgcaaaatctag

SEQ ID NO: 102440 - DNA, 1239 bp, Artificial Sequence
  derived and/or modified sequence
atgctgcggtactggggcgagatccccatcagcagcagccagaccaatcgtagttccttcgatctgctgcctagggaatttcgcttagtggaagtacacgacccgcccctgcatcagcctagtgcgaacaagcccaaacccccaacaatgctggacatccctagcgagccatgttcactcactattcatacgattcaattgatccaacataatcggagactgcgtaatctcattgccacagcacaggctcagaatcaacagcagaccgaaggggtgaagactgaggaaagcgagccgttgccgagttgccctgggtctcccccccttcctgatgatctgttaccattagactgtaagaaccccaatgccccatttcaaatcagacatagcgatcccgaatcagatttttatcgtggaaagggggaacctgtaacagagttgtcctggcattcctgtcggcagcttctgtaccaggccgttgctacaatcctggctcacgctggattcgattgcgcgaacgagtctgtcctcgagacgctcacagatgtcgcccacgagtattgcctcaagttcaccaagttgctgagattcgccgttgatcgggaggcccgcctcgggcaaacaccttttcctgacgtgatggaacaggtgtttcatgaagtgggtatcgggtccgtgttgtccttgcagaaattttggcagcaccggattaaagattaccactcatacatgcttcaaataagtaagcagctctccgaggagtatgaacggatcgtgaaccccgagaaggcaaccgaggatgcaaagcccgtgaaaattaaggaagaacccgtcagcgatatcaccttcccggtgagtgaggaactcgaggcagacctggcgtccggcgatcaatctcttcctatgggcgtccttggcgcgcagtcggagcggttcccttccaatctcgaggtggaagcctccccacaagccagcagcgctgaagtaaatgcatccccgttatggaatcttgcccatgtgaagatggagccccaggagtcggaagagggcaatgtatctggacacggcgtcttggggagcgatgtgttcgaagaacccatgagcggcatgagcgaggccgggatacctcagagtcccgacgactcggacagcagttatgggtcccattccacagatagcttaatgggcagcagtccagtattcaatcagcggtgcaagaaacggatgcgaaagatttag

SEQ ID NO: 102441 - DNA, 1239 bp, Artificial Sequence
  derived and/or modified sequence
atgctgcgatactggggcgaaattcctattagcagctcccaaaccaatcgatcttcctttgatcttttgcctagggaatttcggctggtggaggtgcatgatccccctttacatcagccttctgcaaacaagccaaaacctcccactatgcttgacatcccatcagaaccctgttccctcacaatccatacaattcaattgattcagcacaatcgtcgtcttaggaatttgatcgctactgcccaagctcagaatcagcaacagacagagggcgtcaagacagaggagagtgagccactccctagctgtccaggttccccacccctgccagacgacctactgcctctcgactgtaaaaaccctaatgcccctttccagatcaggcattcagaccctgagagcgacttttaccggggtaagggagagcctgttacagaactgtcctggcactcttgccgacagttgctataccaagccgttgccaccattctagcccacgccggattcgattgcgccaacgaatcggtcctggagactctaaccgatgttgcacatgaatactgtcttaagtttaccaagctgttgagatttgcagtggatagagaggcaagactgggacagacccccttcccggatgttatggagcaggtgttccacgaagtaggcatcgggagtgtgttgagtttgcagaagttttggcaacataggatcaaagattaccactcttatatgctccagatttccaaacagttgagtgaggaatacgagaggatcgttaacccagaaaaggctacagaagacgccaagccagtaaagattaaagaggagccggtgagcgacattacatttcctgtctcggaagagctggaggccgacctggcatctggggaccaatccctgcccatgggagttctgggagcccaatcagagaggttcccaagcaacttggaagttgaggccagtccccaggcatcaagtgccgaggtcaatgcaagcccattgtggaacctcgctcacgtgaaaatggagccccaggaaagtgaggaaggaaacgtatctggccatggcgtgcttgggtccgatgtgtttgaggagccgatgtctggtatgagcgaagccggaattccccagagtcctgacgactcagattcctcctacggcagccactcaacagattccttgatgggttctagccccgtctttaaccagcgttgtaaaaagcggatgagaaaaatttag

SEQ ID NO: 102442 - DNA, 1239 bp, Artificial Sequence
  derived and/or modified sequence
atgctaagatactggggagagatccccattagttccagtcagacgaatagatcgagtttcgatctactgccacgagaattcagattggttgaagtccacgatcccccactgcatcaaccaagcgccaataaacccaagccacctactatgttggacatcccctcggagccttgctccctgacgatccacactatccagctgatacagcacaacagacgcctccgcaatctgatagcgaccgcacaggcccagaaccaacagcagacagagggagtgaagacggaggaatctgagcccctgccatcttgccctgggtcccccccactaccagatgacctgctccctctggattgtaagaaccccaatgcaccatttcagattcgacacagtgatccggagagcgacttttacagaggcaagggcgagccagtgaccgaactgagctggcacagttgcagacagttactgtatcaggctgtcgctacaattctggcacatgccggttttgactgcgccaatgagagcgttttggagaccctaactgacgtggcacacgaatactgcctgaaattcacgaagctcctgaggttcgccgtcgatagggaggcgagacttggtcagactccttttcccgatgttatggaacaggtgttccacgaagtagggattgggtccgtactcagtctgcagaaattttggcaacacagaataaaggactaccactcctatatgttacagatctctaagcagctgtctgaagagtatgaaagaattgtcaaccctgaaaaagctactgaagacgcaaaacctgttaagattaaggaagagcctgtctccgacatcacatttccggtctccgaggagcttgaagccgacctggcttccggcgaccagtctctgcctatgggagtgttaggggctcagtctgagcgctttccgtcaaatcttgaggtggaggcaagtccacaggcctcgagcgccgaggtgaatgcctcccccctgtggaatcttgcccacgtgaagatggagcctcaggaatccgaggagggcaatgtgtcgggacatggtgtgttgggcagcgacgtgtttgaggaaccgatgtcaggcatgtcagaggctgggattcctcagtcgcctgacgacagtgatagcagctacgggtcgcacagtactgacagcctcatgggctcatcccctgtcttcaatcagcggtgtaagaaaaggatgagaaaaatatag

SEQ ID NO: 102443 - DNA, 1239 bp, Artificial Sequence
  derived and/or modified sequence
atgctccgatattggggggagattcccatctccagttcgcagaccaatcgcagctcattcgacttactcccaagagagttccgtcttgtagaggtgcacgatccacccctgcaccaaccatccgctaataagccaaaaccaccaacaatgttggacattcccagtgagccatgctcactgacaatccacacgatccagctgattcagcacaataggcgcttgcggaatctgattgcgacagctcaagcccagaatcagcaacagaccgaaggcgtgaaaactgaggagtccgagccgctgccaagttgtccgggtagcccccctctaccggatgacctgctgccgctcgactgtaagaatccgaatgcgccttttcagatacgacactccgaccccgaatctgatttttatcgaggcaaaggcgaacccgtcaccgagctgagctggcactcttgcaggcagctcctctatcaggctgtggctaccatactggcccacgctgggttcgactgcgctaacgaatctgtcttagaaactctgacggacgtcgcccacgaatattgcctgaaattcacgaaattactccgcttcgcagtcgatcgggaggcacgactgggtcagactccttttcccgacgtgatggagcaggtatttcacgaggtgggcataggcagtgttttgagtctgcagaaattttggcaacaccgtattaaggattatcactcttacatgctgcagatctctaaacagttgagtgaggagtacgagcggatcgttaaccccgaaaaagctacagaagacgcaaaaccagtcaagattaaggaagaaccggttagcgatatcacattccccgtgtcagaggagttggaggcagacctggcctccggtgaccagagcttgccgatgggtgtgttaggcgcacaatccgagaggtttccatcaaacctggaagttgaagcttcaccgcaggcgtctagcgctgaggtgaacgcctctcctttatggaacctcgctcacgtgaagatggagccccaggaatccgaggaaggcaatgtatcgggccatggcgtgctggggagcgacgtgtttgaggaacctatgagcggtatgtccgaagctggcattcctcagtcacctgacgacagcgactccagttacggttcacactctacagactccctcatgggatcatcccccgtctttaatcagagatgcaaaaagaggatgcgtaaaatatag

SEQ ID NO: 102444 - DNA, 2280 bp, Artificial Sequence
  derived and/or modified sequence
gagaagaagcgcttccggcggtcttagatcactaatcaacaaaccagctttcggggtctgacgcgatccttgcctcaggcctctcgaggtccagacagccgcccagcccgctctgcgacgcagcagtgaatagtgtggtacctccttgtctcggttcaggtccagacctccccgtcttccggctgccctgaacgtcaggcgacctcaggaccctgtgattggcgcctgcgccggcggaccgtgaccgaggaaacccctggagggacttgggcattccttgggctccgtgcctgttcttcgtgctcctttcgggcaaggatctcacattatcagtctttgaccgacacagaatgcctggcatttgataaatgtttgttgaacttgaagagacatatggacaatgaatctgcaaagggagaacacctttggtcctacagttttgctgacactgacatttttctaagtggtcacaaatagcctactttttacataaataactggctagacctcgtatttttcactacagaagcctataatctaaagttgccaggatttaaacacattacttttaggttattgtctacatttatcctgagacctcttctcttcttattccaaaatgttgagatactggggagagataccaatatcatcaagccagaccaacagaagttccttcgatttgctcccacgggagttccgtctggtggaagtccatgacccacccctgcaccaaccctcagccaacaagccgaagccccccactatgctggacatcccctcagagccatgtagtctcaccatccatacgattcagttgattcagcacaaccgacgtcttcgcaaccttattgccacagctcaggcccagaatcagcagcagacagaaggtgtaaaaactgaagagagtgaacctcttccctcgtgccctgggtcacctcctctccctgatgacctcctgcctttagattgtaagaatcccaatgcaccattccagatccggcacagtgacccagagagtgacttttatcgtgggaaaggggaacctgtgactgaactcagctggcactcctgtcggcagctcctctaccaggcagtggccacaatcctggcccacgcgggctttgactgtgctaatgagagtgtcctggagaccctaactgatgtggcacatgagtattgccttaagtttaccaagttgctgcgttttgctgtggaccgggaggcccggctgggacagactccttttcctgatgtgatggagcaggtattccatgaagtgggtattggcagtgtgctctccctccagaagttctggcagcaccgcatcaaggactatcacagttacatgctacagattagtaagcaactctctgaagaatatgaaaggattgtcaatcctgagaaggccacagaggacgctaaacctgtgaagatcaaggaggaacctgtgagcgacatcacttttcctgtcagtgaggagctggaggctgaccttgcttctggagaccagtcactgcctatgggagtgcttggggctcagagcgaacgcttcccatctaacctggaggttgaagcttcaccacaggcttcaagtgcagaggtaaatgcttctcctctttggaatctggcccatgtgaaaatggagcctcaagaaagtgaagaaggcaatgtctctgggcatggtgtgctgggcagtgatgtcttcgaggagcctatgtcaggcatgagtgaagctgggattcctcagagccctgatgactcagatagcagctatggttcccactccactgacagcctcatggggtcctcccctgttttcaaccagcgctgcaagaagaggatgaggaaaatataaaaggaaaagagggagatgttttgtccagacctactagacccaacagaaaaggtttttgtattagaatctgtttccttaaaaattgatttgactcctgttcttaaacacaagtggtttttcctaattccagaggaactggacgtcaccaaacaaggttgcattttacttttgcatccagtttttatagttttccacaaccaagccacccttcacagataaaatatgatgctggcatggcaatcagaccaaagcactgtccccaattgttgtcttaactatgactagacatgttatacagccatttatcttgtacaactgagaagaatcatactttgacctaccttgtagagatgtgaggatttagatgtttgctaacttcaaaactgtgcttgaatagactaataatatatgctcatatcaga

SEQ ID NO: 102445 - DNA, 2869 bp, Artificial Sequence
  derived and/or modified sequence
tgagaagaagcgcttccggcggtcttagatcactaatcaacaaaccagctttcggggtctgacgcgatccttgcctcaggcctctcgaggtccagacagccgcccagcccgctctgcgacgcagcagtgaatagtgtggtacctccttgtctcggttcaggtccagacctccccgtcttccggctgccctgaacgtcaggcgacctcaggaccctgtgattggcgcctgcgccggcggaccgtgaccgaggaaacccctggagggacttgggcattccttgggctccgtgcctgttcttcgtgctcctttcgggcaaggatctcacattatcagtctttgaccgacacagaatgcctggcatttgataaatgtttgttgaacttgaagagacatatggacaatgaatctgcaaaggtgagttgaaaccagattgtgaattttgttgaatggtaagccaaggaattctgactttttccaataggcaatgggaagccatttgatttaagttttaaaaagagtaagtctagcagcagtgtagagaatagatgacatacaaagagagattggaggaagggataccagttagaaggcagcagaaatctctcacgttctatatgtcaaaagttgaaagcataatgccatttagattaatggttcataaatttttccaccaggatcatgcctaagacacacagagtaagaaccacttcttattatctttaaccctactagtttttctcctattgatccagcacagatgtatcaagataccttatcatgccttgcttattgttcaggattgagcgtgatggtagttctggtaatgagttagtgagtgagatgggaaatagggatactagagctccagatgctgttgtagctattggtccactaatgacccaaattctaccctgtggttcagtgtagtaggaattgtcatagtatgacaataaccagcatctaacagttacatttctcttaatttatttagggagaacacctttggtcctacagttttgctgacactgacatttttctaagtggtcacaaatagcctactttttacataaataactggctagacctcgtatttttcactacagaagcctataatctaaagttgccaggatttaaacacattacttttaggttattgtctacatttatcctgagacctcttctcttcttattccaaaatgttgagatactggggagagataccaatatcatcaagccagaccaacagaagttccttcgatttgctcccacgggagttccgtctggtggaagtccatgacccacccctgcaccaaccctcagccaacaagccgaagccccccactatgctggacatcccctcagagccatgtagtctcaccatccatacgattcagttgattcagcacaaccgacgtcttcgcaaccttattgccacagctcaggcccagaatcagcagcagacagaaggtgtaaaaactgaagagagtgaacctcttccctcgtgccctgggtcacctcctctccctgatgacctcctgcctttagattgtaagaatcccaatgcaccattccagatccggcacagtgacccagagagtgacttttatcgtgggaaaggggaacctgtgactgaactcagctggcactcctgtcggcagctcctctaccaggcagtggccacaatcctggcccacgcgggctttgactgtgctaatgagagtgtcctggagaccctaactgatgtggcacatgagtattgccttaagtttaccaagttgctgcgttttgctgtggaccgggaggcccggctgggacagactccttttcctgatgtgatggagcaggtattccatgaagtgggtattggcagtgtgctctccctccagaagttctggcagcaccgcatcaaggactatcacagttacatgctacagattagtaagcaactctctgaagaatatgaaaggattgtcaatcctgagaaggccacagaggacgctaaacctgtgaagatcaaggaggaacctgtgagcgacatcacttttcctgtcagtgaggagctggaggctgaccttgcttctggagaccagtcactgcctatgggagtgcttggggctcagagcgaacgcttcccatctaacctggaggttgaagcttcaccacaggcttcaagtgcagaggtaaatgcttctcctctttggaatctggcccatgtgaaaatggagcctcaagaaagtgaagaaggcaatgtctctgggcatggtgtgctgggcagtgatgtcttcgaggagcctatgtcaggcatgagtgaagctgggattcctcagagccctgatgactcagatagcagctatggttcccactccactgacagcctcatggggtcctcccctgttttcaaccagcgctgcaagaagaggatgaggaaaatataaaaggaaaagagggagatgttttgtccagacctactagacccaacagaaaaggtttttgtattagaatctgtttccttaaaaattgatttgactcctgttcttaaacacaagtggtttttcctaattccagaggaactggacgtcaccaaacaaggttgcattttacttttgcatccagtttttatagttttccacaaccaagccacccttcacagataaaatatgatgctggcatggcaatcagaccaaagcactgtccccaattgttgtcttaactatgactagacatgttatacagccatttatcttgtacaactgagaagaatcatactttgacctaccttgtagagatgtgaggatttagatgtttgctaacttcaaaactgtgcttgaatagactaataatatatgctcatatcagatgtcagttttc

SEQ ID NO: 102446 - DNA, 2664 bp, Artificial Sequence
  derived and/or modified sequence
gagaagaagcgcttccggcggtcttagatcactaatcaacaaaccagctttcggggtctgacgcgatccttgcctcaggcctctcgaggtccagacagccgcccagcccgctctgcgacgcagcaggcaaggatctcacattatcagtctttgaccgacacagaatgcctggcatttgataaatgtttgttgaacttgaagagacatatggacaatgaatctgcaaaggtgagttgaaaccagattgtgaattttgttgaatggtaagccaaggaattctgactttttccaataggcaatgggaagccatttgatttaagttttaaaaagagtaagtctagcagcagtgtagagaatagatgacatacaaagagagattggaggaagggataccagttagaaggcagcagaaatctctcacgttctatatgtcaaaagttgaaagcataatgccatttagattaatggttcataaatttttccaccaggatcatgcctaagacacacagagtaagaaccacttcttattatctttaaccctactagtttttctcctattgatccagcacagatgtatcaagataccttatcatgccttgcttattgttcaggattgagcgtgatggtagttctggtaatgagttagtgagtgagatgggaaatagggatactagagctccagatgctgttgtagctattggtccactaatgacccaaattctaccctgtggttcagtgtagtaggaattgtcatagtatgacaataaccagcatctaacagttacatttctcttaatttatttagggagaacacctttggtcctacagttttgctgacactgacatttttctaagtggtcacaaatagcctactttttacataaataactggctagacctcgtatttttcactacagaagcctataatctaaagttgccaggatttaaacacattacttttaggttattgtctacatttatcctgagacctcttctcttcttattccaaaatgttgagatactggggagagataccaatatcatcaagccagaccaacagaagttccttcgatttgctcccacgggagttccgtctggtggaagtccatgacccacccctgcaccaaccctcagccaacaagccgaagccccccactatgctggacatcccctcagagccatgtagtctcaccatccatacgattcagttgattcagcacaaccgacgtcttcgcaaccttattgccacagctcaggcccagaatcagcagcagacagaaggtgtaaaaactgaagagagtgaacctcttccctcgtgccctgggtcacctcctctccctgatgacctcctgcctttagattgtaagaatcccaatgcaccattccagatccggcacagtgacccagagagtgacttttatcgtgggaaaggggaacctgtgactgaactcagctggcactcctgtcggcagctcctctaccaggcagtggccacaatcctggcccacgcgggctttgactgtgctaatgagagtgtcctggagaccctaactgatgtggcacatgagtattgccttaagtttaccaagttgctgcgttttgctgtggaccgggaggcccggctgggacagactccttttcctgatgtgatggagcaggtattccatgaagtgggtattggcagtgtgctctccctccagaagttctggcagcaccgcatcaaggactatcacagttacatgctacagattagtaagcaactctctgaagaatatgaaaggattgtcaatcctgagaaggccacagaggacgctaaacctgtgaagatcaaggaggaacctgtgagcgacatcacttttcctgtcagtgaggagctggaggctgaccttgcttctggagaccagtcactgcctatgggagtgcttggggctcagagcgaacgcttcccatctaacctggaggttgaagcttcaccacaggcttcaagtgcagaggtaaatgcttctcctctttggaatctggcccatgtgaaaatggagcctcaagaaagtgaagaaggcaatgtctctgggcatggtgtgctgggcagtgatgtcttcgaggagcctatgtcaggcatgagtgaagctgggattcctcagagccctgatgactcagatagcagctatggttcccactccactgacagcctcatggggtcctcccctgttttcaaccagcgctgcaagaagaggatgaggaaaatataaaaggaaaagagggagatgttttgtccagacctactagacccaacagaaaaggtttttgtattagaatctgtttccttaaaaattgatttgactcctgttcttaaacacaagtggtttttcctaattccagaggaactggacgtcaccaaacaaggttgcattttacttttgcatccagtttttatagttttccacaaccaagccacccttcacagataaaatatgatgctggcatggcaatcagaccaaagcactgtccccaattgttgtcttaactatgactagacatgttatacagccatttatcttgtacaactgagaagaatcatactttgacctaccttgtagagatgtgaggatttagatgtttgctaacttcaaaactgtgcttgaatagactaataatatatgctca

SEQ ID NO: 102447 - protein, 279 aa, Artificial Sequence
  derived and/or modified sequence
MNLQSGKGEPVTELSWHSCRQLLYQAVATILAHAGFDCANESVLETLTDVAHEYCLKFTKLLRFAVDREARLGQTPFPDVMEQVFHEVGIGSVLSLQKFWQHRIKDYHSYMLQISKQLSEEYERIVNPEKATEDAKPVKIKEEPVSDITFPVSEELEADLASGDQSLPMGVLGAQSERFPSNLEVEASPQASSAEVNASPLWNLAHVKMEPQESEEGNVSGHGVLGSDVFEEPMSGMSEAGIPQSPDDSDSSYGSHSTDSLMGSSPVFNQRCKKRMRKI

SEQ ID NO: 102448 - DNA, 840 bp, Artificial Sequence
  derived and/or modified sequence
atgaacctgcagagcggcaagggcgagcccgtgaccgagctgagctggcacagctgcagacagctgctgtaccaggccgtggccaccatcctggcccacgccggcttcgactgcgccaacgagagcgtgctggagaccctgaccgacgtggcccacgagtactgcctgaagttcaccaagctgctgagattcgccgtggacagagaggccagactgggccagacccccttccccgacgtgatggagcaggtgttccacgaggtgggcatcggcagcgtgctgagcctgcagaagttctggcagcacagaatcaaggactaccacagctacatgctgcagatcagcaagcagctgagcgaggagtacgagagaatcgtgaaccccgagaaggccaccgaggacgccaagcccgtgaagatcaaggaggagcccgtgagcgacatcaccttccccgtgagcgaggagctggaggccgacctggccagcggcgaccagagcctgcccatgggcgtgctgggcgcccagagcgagagattccccagcaacctggaggtggaggccagcccccaggccagcagcgccgaggtgaacgccagccccctgtggaacctggcccacgtgaagatggagccccaggagagcgaggagggcaacgtgagcggccacggcgtgctgggcagcgacgtgttcgaggagcccatgagcggcatgagcgaggccggcatcccccagagccccgacgacagcgacagcagctacggcagccacagcaccgacagcctgatgggcagcagccccgtgttcaaccagagatgcaagaagagaatgagaaagatctag

SEQ ID NO: 102449 - DNA, 840 bp, Artificial Sequence
  derived and/or modified sequence
atgaacttgcaatcagggaaaggggagcccgtgactgagctctcatggcactcctgccgccagcttctgtaccaggccgtcgccactattctcgcccatgccggattcgactgcgcaaacgagtctgtgctggagaccttaactgacgtagcacacgaatattgcctgaagtttacgaagctgctgaggtttgcagtggatagggaagccaggcttgggcagaccccgtttccagacgtgatggaacaggtgttccacgaagtgggaattggcagcgtgctcagccttcaaaaattttggcagcatcgtataaaggactatcacagctacatgttacaaattagtaaacagctgtcagaagagtacgagagaatcgtgaaccctgaaaaagccaccgaggacgcaaagccagtcaaaatcaaagaagaacctgtatccgatatcacattccctgtgagtgaggagctggaggcagatcttgccagtggcgatcagtctctgcccatgggagtccttggagctcagagtgaacggttcccttccaaccttgaagtggaagcaagcccccaggcctcctcagccgaggtaaatgcatcccctctctggaacctggcacacgtgaagatggaaccgcaggaatctgaagagggcaacgtgtcaggccatggggtattggggtcagatgtcttcgaggagccgatgagcgggatgtctgaagcaggaattcctcagagcccagatgactctgattcttcatacggttctcattccaccgacagtttaatgggctcaagtcccgtgttcaaccaacgatgcaagaaacggatgcgcaagatctag

SEQ ID NO: 102450 - DNA, 840 bp, Artificial Sequence
  derived and/or modified sequence
atgaacctgcagagcgggaaaggagagcctgtgacagagctgtcctggcacagctgccggcagctgctgtaccaggccgtggccaccatcctggcccacgccggctttgactgtgccaatgaatctgtgctggagaccctgacagatgtggcccacgagtactgcctgaagttcaccaagctgctgcgctttgctgtggaccgggaggcccggctgggccagacccccttcccagatgtgatggagcaggtgttccacgaggtgggcatcggctctgtgctgagcctgcagaagttctggcagcaccgcatcaaggactaccacagctacatgctgcagatcagcaagcagctgtctgaggagtatgaaagaattgtgaaccctgagaaggccacagaagatgccaagcctgtgaagatcaaggaggagcctgtgtctgacatcaccttccctgtgtctgaggagctggaggccgacctggccagcggggaccagagcctgcccatgggcgtgctgggcgcccagagcgagcgcttccccagcaacctggaggtggaggccagcccccaggccagcagcgctgaggtgaatgccagccccctgtggaacctggcccacgtgaagatggagccccaggagagcgaggagggcaatgtgtctggccacggcgtgctgggcagtgatgtgtttgaggagcccatgagcggcatgtctgaggccggcatcccccagagcccagatgacagcgacagcagctatggcagccacagcacagacagcctgatgggcagcagccctgtgttcaaccagcgctgcaagaagaggatgaggaagatctag

SEQ ID NO: 102451 - DNA, 840 bp, Artificial Sequence
  derived and/or modified sequence
atgaacctgcagagcggcaagggcgagcccgtgaccgagctgagctggcactcctgccgtcagcttctgtatcaggcagtggccaccattcttgcacacgctggcttcgattgtgctaacgaatcagtcctggagacactgactgacgtggcacatgaatactgccttaagttcacaaaacttctaagattcgctgttgaccgtgaagcacgactgggccagactccattcccggacgtgatggagcaggtgtttcatgaggtgggtattggctctgtcctgagccttcaaaagttttggcaacaccggatcaaagattaccattcatacatgctacaaatcagtaaacagttatcggaggaatacgaacgcatcgtgaacccagagaaggccacagaagatgctaagcctgtgaaaatcaaggaggaaccagttagtgacattaccttccccgtctctgaggagctggaggccgacctggcatctggtgaccagagtttgcctatgggcgtcctgggtgcccagtccgagagattccccagcaacctcgaagtagaagcgagcccacaagcttcaagcgctgaggttaatgcaagcccactgtggaacctcgctcatgtcaaaatggagccccaggagagcgaggaaggcaatgtgagcggacatggagtgctaggatccgatgtcttcgaggaacccatgagtggtatgagcgaagccggaatacctcagtcccctgacgactcggatagttcttacggcagccactccacagactcactcatgggttcctctcctgtcttcaatcagaggtgtaaaaaacgaatgaggaagatatag

SEQ ID NO: 102452 - DNA, 840 bp, Artificial Sequence
  derived and/or modified sequence
atgaacctgcagagcggaaagggcgagcccgtcactgagctcagctggcattcctgccggcagttgctctaccaggccgtcgccacaattctggcgcacgcaggatttgactgtgcgaacgaatccgtactcgaaacactcacagacgtggcccacgaatattgcctgaagtttaccaagttgttaagattcgccgttgaccgggaggcccgtctcggccagactcctttccccgatgtgatggagcaggtcttccacgaagttggcattgggagcgtcctcagtttgcagaaattctggcagcataggatcaaagattaccacagctacatgctccaaattagtaagcagttgagcgaggagtatgaacggattgtgaaccctgagaaggcaaccgaggacgcaaagcccgtgaagatcaaagaggaacccgtttccgacatcacctttccggtgtcggaggaactcgaagctgatcttgcctctggggatcaatccctgccaatgggagtgctcggcgcacagtctgaaaggttcccgagcaacctggaggtggaagcaagtccccaggccagttccgcagaggtgaacgcgtcacctttatggaacttggcccacgttaagatggagcctcaagaatctgaggagggcaacgtgtcagggcacggggtcttgggctccgatgtttttgaagaacctatgagcggtatgtccgaagctggcatccctcagtctcccgacgatagcgactcaagttatgggagccacagcaccgattctctgatgggttcctcgcccgtctttaaccagagatgtaagaaaagaatgcgcaagatctag

SEQ ID NO: 102453 - DNA, 1638 bp, Artificial Sequence
  derived and/or modified sequence
ggcggtcttagatcactaatcaacaaaccagctttcggggtctgacgcgatccttgcctcaggcctctcgaggtccagacagccgcccagcccgctctgcgacgcagcagtgaatagtgtggtacctccttgtctcggttcaggtccagacctccccgtcttccggctgccctgaacgtcaggcgacctcaggaccctgtgattggcgcctgcgccggcggaccgtgaccgaggaaacccctggagggacttgggcattccttgggctccgtgcctgttcttcgtgctcctttcgggcaaggatctcacattatcagtctttgaccgacacagaatgcctggcatttgataaatgtttgttgaacttgaagagacatatggacaatgaatctgcaaagtgggaaaggggaacctgtgactgaactcagctggcactcctgtcggcagctcctctaccaggcagtggccacaatcctggcccacgcgggctttgactgtgctaatgagagtgtcctggagaccctaactgatgtggcacatgagtattgccttaagtttaccaagttgctgcgttttgctgtggaccgggaggcccggctgggacagactccttttcctgatgtgatggagcaggtattccatgaagtgggtattggcagtgtgctctccctccagaagttctggcagcaccgcatcaaggactatcacagttacatgctacagattagtaagcaactctctgaagaatatgaaaggattgtcaatcctgagaaggccacagaggacgctaaacctgtgaagatcaaggaggaacctgtgagcgacatcacttttcctgtcagtgaggagctggaggctgaccttgcttctggagaccagtcactgcctatgggagtgcttggggctcagagcgaacgcttcccatctaacctggaggttgaagcttcaccacaggcttcaagtgcagaggtaaatgcttctcctctttggaatctggcccatgtgaaaatggagcctcaagaaagtgaagaaggcaatgtctctgggcatggtgtgctgggcagtgatgtcttcgaggagcctatgtcaggcatgagtgaagctgggattcctcagagccctgatgactcagatagcagctatggttcccactccactgacagcctcatggggtcctcccctgttttcaaccagcgctgcaagaagaggatgaggaaaatataaaaggaaaagagggagatgttttgtccagacctactagacccaacagaaaaggtttttgtattagaatctgtttccttaaaaattgatttgactcctgttcttaaacacaagtggtttttcctaattccagaggaactggacgtcaccaaacaaggttgcattttacttttgcatccagtttttatagttttccacaaccaagccacccttcacagataaaatatgatgctggcatggcaatcagaccaaagcactgtccccaattgttgtcttaactatgactagacatgttatacagccatttatcttgtacaactgagaagaatcatactttgacctaccttgtagagatgtgaggatttagatgtttgctaacttcaaaactgtgcttgaatagactaataatatatgctc

SEQ ID NO: 102454 - protein, 690 aa, Artificial Sequence
  derived and/or modified sequence
MCFRTKLSVSWVPLFLLLSRVFSTETDKPSAQDSRSRGSSGQPADLLQVLSAGDHPPHNHSRSLIKTLLEKTGCPRRRNGMQGDCNLCFEPDALLLIAGGNFEDQLREEVVQRVSLLLLYYIIHQEEICSSKLNMSNKEYKFYLHSLLSLRQDEDSSFLSQNETEDILAFTRQYFDTSQSQCMETKTLQKKSGIVSSEGANESTLPQLAAMIITLSLQGVCLGQGNLPSPDYFTEYIFSSLNRTNTLRLSELDQLLNTLWTRSTCIKNEKIHQFQRKQNNIITHDQDYSNFSSSMEKESEDGPVSWDQTCFSARQLVEIFLQKGLSLISKEDFKQMSPGIIQQLLSCSCHLPKDQQAKLPPTTLEKYGYSTVAVTLLTLGSMLGTALVLFHSCEENYRLILQLFVGLAVGTLSGDALLHLIPQVLGLHKQEAPEFGHFHESKGHIWKLMGLIGGIHGFFLIEKCFILLVSPNDKGLSLVNGHVGHSHHLALNSELSDQAGRGKSASTIQLKSPEDSQAAEMPIGSMTASNRKCKAISLLAIMILVGDSLHNFADGLAIGAAFSSSSESGVTTTIAILCHEIPHEMGDFAVLLSSGLSMKTAILMNFISSLTAFMGLYIGLSVSADPCVQDWIFTVTAGMFLYLSLVEMLPEMTHVQTQRPWMMFLLQNFGLILGWLSLLLLAIYEQNIKI

SEQ ID NO: 102455 - DNA, 2073 bp, Artificial Sequence
  derived and/or modified sequence
atgtgcttcagaaccaagctgagcgtgagctgggtgcccctgttcctgctgctgagcagagtgttcagcaccgagaccgacaagcccagcgcccaggacagcagaagcagaggcagcagcggccagcccgccgacctgctgcaggtgctgagcgccggcgaccaccccccccacaaccacagcagaagcctgatcaagaccctgctggagaagaccggctgccccagaagaagaaacggcatgcagggcgactgcaacctgtgcttcgagcccgacgccctgctgctgatcgccggcggcaacttcgaggaccagctgagagaggaggtggtgcagagagtgagcctgctgctgctgtactacatcatccaccaggaggagatctgcagcagcaagctgaacatgagcaacaaggagtacaagttctacctgcacagcctgctgagcctgagacaggacgaggacagcagcttcctgagccagaacgagaccgaggacatcctggccttcaccagacagtacttcgacaccagccagagccagtgcatggagaccaagaccctgcagaagaagagcggcatcgtgagcagcgagggcgccaacgagagcaccctgccccagctggccgccatgatcatcaccctgagcctgcagggcgtgtgcctgggccagggcaacctgcccagccccgactacttcaccgagtacatcttcagcagcctgaacagaaccaacaccctgagactgagcgagctggaccagctgctgaacaccctgtggaccagaagcacctgcatcaagaacgagaagatccaccagttccagagaaagcagaacaacatcatcacccacgaccaggactacagcaacttcagcagcagcatggagaaggagagcgaggacggccccgtgagctgggaccagacctgcttcagcgccagacagctggtggagatcttcctgcagaagggcctgagcctgatcagcaaggaggacttcaagcagatgagccccggcatcatccagcagctgctgagctgcagctgccacctgcccaaggaccagcaggccaagctgccccccaccaccctggagaagtacggctacagcaccgtggccgtgaccctgctgaccctgggcagcatgctgggcaccgccctggtgctgttccacagctgcgaggagaactacagactgatcctgcagctgttcgtgggcctggccgtgggcaccctgagcggcgacgccctgctgcacctgatcccccaggtgctgggcctgcacaagcaggaggcccccgagttcggccacttccacgagagcaagggccacatctggaagctgatgggcctgatcggcggcatccacggcttcttcctgatcgagaagtgcttcatcctgctggtgagccccaacgacaagggcctgagcctggtgaacggccacgtgggccacagccaccacctggccctgaacagcgagctgagcgaccaggccggcagaggcaagagcgccagcaccatccagctgaagagccccgaggacagccaggccgccgagatgcccatcggcagcatgaccgccagcaacagaaagtgcaaggccatcagcctgctggccatcatgatcctggtgggcgacagcctgcacaacttcgccgacggcctggccatcggcgccgccttcagcagcagcagcgagagcggcgtgaccaccaccatcgccatcctgtgccacgagatcccccacgagatgggcgacttcgccgtgctgctgagcagcggcctgagcatgaagaccgccatcctgatgaacttcatcagcagcctgaccgccttcatgggcctgtacatcggcctgagcgtgagcgccgacccctgcgtgcaggactggatcttcaccgtgaccgccggcatgttcctgtacctgagcctggtggagatgctgcccgagatgacccacgtgcagacccagagaccctggatgatgttcctgctgcagaacttcggcctgatcctgggctggctgagcctgctgctgctggccatctacgagcagaacatcaagatctag

SEQ ID NO: 102456 - DNA, 2073 bp, Artificial Sequence
  derived and/or modified sequence
atgtgtttccggacaaagctgtcagtatcttgggttccactgtttctgctcttgtcgagagtgttttctacagaaactgacaagcctagcgcccaagactccaggagcaggggtagctcagggcaacctgccgatctcctgcaggttctcagcgccggtgaccacccgccacacaaccactcccgatcacttattaagaccctgctggagaaaactggatgtccccgtcgcaggaatggaatgcagggtgactgtaatttatgcttcgagcccgacgcactgttgttgattgccggggggaattttgaggaccaactgagggaggaggtggtccagcgggtctctctcttgctcctgtactatattatacatcaggaggaaatctgtagttcaaagcttaacatgagtaataaagagtataaattctatctgcactccctgttgtccctgagacaggatgaggatagctcttttctgtctcagaacgaaaccgaagatatcctggccttcaccaggcagtactttgacacatctcagagtcagtgtatggaaactaagacccttcagaagaaatctggaattgtatccagtgagggggccaatgagagcacactacctcagctagctgctatgatcataacactgagtctgcagggggtgtgcctcgggcagggcaatttaccttcgcccgattacttcaccgaatacatctttagttccttgaacagaacaaatactctgagactgtccgaacttgaccagctgttgaacactctgtggaccagatcaacatgtattaagaatgagaaaatccatcaattccaaaggaaacagaataacataattacgcacgatcaggactacagcaactttagttcttcaatggagaaggaatccgaggacggtccagtgagctgggaccagacatgttttagtgcaagacaactggtcgagatcttcctccagaaggggttgagtctgatttctaaggaggactttaagcagatgtcacctggaattattcagcagctgttgtcatgcagttgtcacctgcccaaggaccagcaggccaagctgccccccacaaccctggagaagtatggctatagcaccgttgccgtgacactgctgactctgggaagcatgttgggcaccgcactggtcctgtttcattcatgtgaagaaaactaccgattgatcctccagctgtttgtgggactggcagtgggcactctttctggtgatgcgcttcttcatctcatacctcaggtccttggcctgcataagcaggaggctccggaatttggtcattttcatgagtctaaaggccacatttggaagctgatgggcttaatcggggggatacacgggttcttccttatagaaaaatgctttattctactggttagtccgaatgacaagggtttatccctagtgaatggacacgtgggtcacagccatcacctagctctgaacagcgagttgtcagaccaggccggccgcggtaaaagcgccagtaccatacagttgaaaagcccggaagacagtcaggcagccgaaatgcctataggcagtatgaccgcgagcaacaggaagtgcaaggctatttcactgttggcaattatgatcctggtaggtgactctctccataactttgctgatgggctcgcgattggggctgccttcagtagctccagcgagagcggggtcaccactacaatagccatcctgtgtcatgaaatcccacacgagatgggagattttgcagtgttgctgagctcaggcctctccatgaagacggccatccttatgaatttcatttccagtctgactgcgtttatgggactgtatattggccttagcgtcagcgccgacccctgtgtgcaggactggatattcaccgtcacagcagggatgttcctttacttgtctttggtggagatgctgcctgagatgactcacgttcagacacaacgcccttggatgatgttcctgctgcagaatttcgggctgatccttggctggctgtctctactcctgctagcaatttacgaacagaacatcaaaatatag

SEQ ID NO: 102457 - DNA, 2073 bp, Artificial Sequence
  derived and/or modified sequence
atgtgcttccgcaccaagctgtctgtgtcctgggtgcccctcttcctgctgctgagcagggtcttcagcacagaaacagacaagcccagcgcccaggacagccgcagccggggcagcagcggccagcctgctgacctgctgcaggtgctgtctgctggggaccaccccccccacaaccacagccgcagcctcatcaagaccctgctggagaagacaggctgccccaggagaagaaatggcatgcagggcgactgcaacctgtgctttgagccagatgccctgctgctgattgctgggggcaactttgaggaccagctgcgggaggaggtggtgcagagggtgtccctgctgctgctgtactacatcatccaccaggaggagatctgcagcagcaagctgaacatgagcaacaaggagtacaagttctacctgcacagcctgctgagcctgcggcaggatgaggacagcagcttcctgagccagaatgaaacagaggacatcctggccttcacccggcagtactttgacaccagccagagccagtgcatggagaccaagaccctgcagaagaagagcggcatcgtgtcctctgagggcgccaatgaaagcaccctgccccagctggccgccatgatcatcaccctgagcctgcagggcgtgtgcctgggccagggcaacctgcccagcccagactacttcacagagtacatcttcagcagcctgaacagaaccaacaccctgcggctgtctgagctggaccagctgctgaacaccctgtggaccaggagcacctgcatcaagaatgagaagatccaccagttccagaggaagcagaacaacatcatcacccatgaccaggactacagcaacttcagcagctccatggagaaggagagtgaagatggccctgtgtcctgggaccagacctgcttcagcgcccggcagctggtggagatcttcctgcagaagggcctgagcctcatcagcaaagaagacttcaagcagatgagccctggcatcatccagcagctgctgagctgcagctgccacctgcccaaggaccagcaggccaagctgccccccaccaccctggagaagtatggctacagcacagtggccgtgaccctgctgaccctgggctccatgctgggcacagccctggtgctcttccacagctgtgaggagaactaccgcctcatcctgcagctgtttgtgggcctggccgtgggcaccctgtctggagatgccctgctgcacctgatcccccaggtgctgggcctgcacaagcaggaggcccctgagtttggccacttccacgagagcaagggccacatctggaagctgatgggcctcatcggcggcatccacggcttcttcctgattgagaagtgcttcatcctgctggtgagccccaatgacaagggcctgagcctggtgaatggccacgtgggccacagccaccacctggccctgaacagcgagctgagtgaccaggccggccggggcaagagcgccagcaccatccagctgaagagccctgaggacagccaggccgctgagatgcccatcggctccatgacagccagcaacaggaagtgcaaggccatcagcctgctggccatcatgatcctggtgggggacagcctgcacaactttgctgatggcctggccatcggggccgccttcagcagcagcagcgagagcggcgtgaccaccaccatcgccatcctgtgccacgagatcccccatgagatgggagactttgctgtgctgctgagcagcggcctgtccatgaagacagccatcctgatgaacttcatcagcagcctgacagccttcatgggcctgtacatcggcctgtctgtgtctgctgacccctgtgtgcaggactggatcttcaccgtgacagctggcatgttcctgtacctgagcctggtggagatgctgcctgagatgacccacgtgcagacccagaggccctggatgatgttcctgctgcagaactttggcctcatcctgggctggctgagcctgctgctgctggccatctatgagcagaacatcaagatctag

SEQ ID NO: 102458 - DNA, 2073 bp, Artificial Sequence
  derived and/or modified sequence
atgtgcttccggaccaagctgagcgtgagctgggtgcccctgttccttctcctgtcaagggtgtttagcacagaaaccgacaagccgagcgcacaagattctagatctcgggggagcagcggccagcccgcggacctgttgcaggttctttctgcaggggaccatcctccccataaccacagcagatcgttgattaagactctgttagagaaaacaggttgtcccaggcgtcggaacggcatgcagggcgactgtaatctatgcttcgagcctgacgctttgctgctaatcgcgggcgggaatttcgaggaccagctgagggaggaggtggtgcaacgagtgtccctactccttctgtattacatcattcaccaggaggagatttgttcatcgaaactgaatatgtccaacaaggagtacaaattctacctgcactccctgctaagcctgaggcaagatgaagatagttcctttctctcccaaaacgaaactgaggacatcctggcctttactcgtcagtacttcgacaccagccaaagccagtgcatggaaacaaagacactccaaaaaaagtcagggattgtgtccagcgaaggtgccaacgaaagcaccctaccccagttggcagctatgatcataactctgagcctccagggggtgtgcctgggccaggggaacttgccgtcccctgactacttcacagagtatatatttagcagcctgaaccgaaccaatacccttaggctttcggagctcgatcagttgctcaacaccctgtggactcgcagcacttgcatcaaaaatgagaaaatacaccagtttcagcgtaaacaaaacaacatcatcacccacgaccaggattactccaatttctcttcaagcatggaaaaggaatcagaagatggtcctgtgagttgggatcaaacgtgtttttccgccaggcagttggtagaaattttcctccagaaagggctgtcccttatctctaaggaggattttaagcagatgtcaccgggcataatccagcagttgctgagttgttcttgccacttgcctaaagatcagcaagcaaagctgcctccaactaccctagagaaatacggatattcaactgtggctgttacactactgacacttggctcaatgttggggacggccttagtgctcttccattcgtgcgaagaaaattaccgcctgatcttacagctgtttgtgggtttggccgtgggtacattgagcggagatgccctgttacacctaataccacaggtgctgggactccacaagcaggaagctcctgagtttggccacttccatgagtctaagggacacatttggaagctgatgggactcattggtggaattcacggcttttttctgatagaaaagtgtttcatattattagtgagccccaacgacaaggggctgtctctggttaacggccacgtcgggcatagccaccacctggccctgaacagcgagcttagcgaccaggccgggcgcggaaaatcggcatccactattcagctgaagagcccggaggacagccaggcagctgagatgccaattggcagcatgacagctagcaaccgaaagtgtaaggctatctcgttactggctatcatgattctagttggcgacagtctgcataacttcgcagacggcttagccattggtgctgcgttttcatcatcttcagagtctggagttaccaccactattgccatcctatgtcacgagataccccatgagatgggagactttgcggtgctgctttcttccggcttaagtatgaagaccgcgattcttatgaatttcattagctccctgacagccttcatgggattatacatcggcttaagtgtgagcgcagacccatgtgttcaggattggatctttacagtgaccgctggtatgtttctttacttatctcttgttgagatgctgcccgaaatgacacatgtccagacccagaggccttggatgatgtttctgctgcagaattttgggctgatcctcggttggctgtctctgttactcctggctatctatgagcagaacatcaagatctag

SEQ ID NO: 102459 - DNA, 2073 bp, Artificial Sequence
  derived and/or modified sequence
atgtgttttcgcaccaaactgtccgtcagctgggtgcccctttttctactgctgtctcgcgttttctccactgaaacagacaagccatctgcgcaggatagtcgcagtcgaggctcgtccggccaaccagcggacctgttacaggtgctctccgctggcgaccaccctccacataaccatagtcggagcctcattaaaactctcctagagaaaacggggtgccccaggagacggaacgggatgcagggcgactgcaacctttgcttcgagccagatgctctgttacttatcgcgggtggcaactttgaagatcaactgagggaggaagtagtgcagcgagtgtctctattacttctgtactacattatccatcaggaagaaatctgctcctctaagctgaatatgtccaacaaggaatataaattttacctccatagcctgctttccctgagacaggatgaagacagtagttttctgtctcagaatgagaccgaggacattctcgcctttacaaggcaatatttcgacacttcccagagtcaatgcatggaaaccaaaacgctccagaaaaagtcagggattgtgtccagtgaaggggctaacgagagcacgctgccacaacttgccgcaatgattatcactctgtcgttgcaaggcgtctgtctcgggcagggaaatcttccctcccctgattacttcacagagtacatcttctccagccttaacaggactaacactctgcgcctcagtgaactggatcagcttctgaacacattgtggacccggtcaacctgcatcaaaaatgagaagatacaccaatttcagaggaaacaaaataatatcatcacccacgaccaggattattccaacttttcttctagcatggaaaaagagtcggaagatgggcctgtgagctgggaccagacctgcttttctgcccgacagctggtagagatattcctccagaagggcctgagtctgatttctaaagaggatttcaagcaaatgagccctggaattattcaacagctccttagctgctcctgccacctgcctaaagaccagcaggccaagcttcctcctaccaccttagagaaatatggatattccactgttgcggttacgttattgaccctgggatctatgttgggtaccgctctcgtgctgtttcactcttgcgaagagaactaccggttgatattgcagctgtttgtgggcctggccgtggggactctttcgggcgacgcgcttttacacctaattcctcaggtactgggtctgcacaaacaagaggcacccgaatttggtcacttccatgaatctaaggggcacatctggaagctgatgggacttatcggtggcattcacgggttttttttaatcgagaaatgttttattctactggtcagtcctaacgacaaaggcctgtctctggtgaatggccatgtcggtcactcccatcatcttgcattaaattctgagctgtccgatcaggcagggagaggaaagtctgccagcaccatccagctgaagtctcctgaggactctcaggcagccgaaatgcctatcgggagcatgacagccagcaatcggaagtgtaaagccattagccttctagcgatcatgattctggttggagactcactccacaattttgcggacgggctggccattggcgcagccttttcctctagctccgaaagcggtgtcactacgacaattgcgatcttgtgccatgagattccccacgagatgggtgattttgccgtcctcctgtcctctggattgtccatgaaaacagccatcctcatgaacttcatatcaagcctgacagctttcatggggctatacattggcttgagtgtcagtgccgacccttgtgtgcaagattggatcttcaccgtcacagcagggatgtttctttatctgagcctggtcgagatgctaccagaaatgacccacgtgcagactcagcggccttggatgatgtttttgttacaaaactttggcctcatcctcggctggttgagcttgctccttctggccatctacgaacaaaacatcaaaatctag

SEQ ID NO: 102460 - DNA, 2725 bp, Artificial Sequence
  derived and/or modified sequence
gtgcacagtcaaagaattttaaaaacagggaactttgtaactgtgaaatactctccaggatttaaaaggctgtggagctccagataaagaatcgtttatctttcttctgaagaaattcctttggttacaagtttaccccataaacggcaacacactcacctccatccaagacagactcaaggtggaggaagcgtggaaatgtgcttccggacaaagctctcagtatcctgggtgccattgtttcttctactcagccgtgttttttctactgagacagacaaaccctcagcccaggatagcagaagccgtgggagttcaggccaaccggcagacctgctacaggttctctctgctggtgaccacccaccccacaaccactcaagaagcctcatcaaaacattgttggagaaaactgggtgcccacggaggagaaacggaatgcaaggagattgcaatctgtgctttgaaccagatgcactattactaatagctggaggaaattttgaagatcagcttagagaagaagtggtccagagagtttctcttctccttctctattacattattcatcaggaagagatctgttcttcaaagctcaacatgagtaataaagagtataaattttacctacacagcctactgagcctcaggcaggatgaagattcctctttcctttcacagaatgagacagaagatatcttggctttcaccaggcagtactttgacacttctcaaagccagtgtatggaaaccaaaacgctgcagaaaaaatctggaatagtgagcagtgaaggtgctaatgaaagtacgcttcctcagttggcagccatgatcattactttgtccctccagggtgtttgtctgggacaaggaaacttgccttccccagactactttacagaatatattttcagttccttgaatcgtacgaataccctccgcctatcagaactagaccaactcctcaacactctctggaccagaagtacttgtatcaaaaatgagaaaatccatcaatttcaaaggaaacaaaacaacataataacccatgatcaggactattctaatttctcttcatccatggaaaaagagtctgaggatggtccagtttcctgggatcagacctgcttctctgctaggcagctggtggagatatttctacagaagggcctctcactcatttctaaggaggactttaagcaaatgagtccagggatcatccagcagctcctcagctgctcctgccacttacccaaggaccaacaagcaaagctgccacctaccactctggagaaatacggctacagcacggtggctgtcacccttctcacactgggctccatgctggggacagcgctggtccttttccatagctgtgaggagaactacaggcttatcttacagctgtttgtgggcttggccgtcgggacactgtctggggacgctctgctccaccttatccctcaggttcttggtttacataagcaggaagccccagaatttgggcatttccatgaaagcaaaggtcatatttggaaactgatgggattaattggaggcatccatggatttttcttgatagaaaaatgttttattcttcttgtatcaccaaatgacaagggcctgtcattggttaatgggcacgtgggtcattcccaccatcttgcactcaactctgaattaagtgaccaggcaggcagaggcaaatctgcttcaactatccagttgaaaagcccagaagattcacaggcagctgaaatgcctataggcagtatgacagcctccaacagaaaatgtaaagccattagcttgttagcaatcatgattctggttggggacagcctgcataattttgcagatggcctagccataggagcagccttctcatcatcatccgagtcaggagtgaccactacgattgctatcttgtgtcatgaaatcccacatgaaatgggagactttgccgtgctcttaagctctggactttctatgaagactgccatcctgatgaattttataagctccctaactgccttcatgggattatacattggcctttccgtgtcagctgatccatgtgttcaagactggatcttcacagtcactgctgggatgttcttatatttatccttggttgaaatgcttcctgaaatgactcatgttcaaacacaacgaccctggatgatgtttctcctgcaaaactttggattgatcctaggttggctttctctcctgctcttggctatatatgagcaaaatattaaaatataagtgaggatcttcaacatctttcaaaaatgcatttatatagtcttactttgtttctttcattgcactctataatgatttttaaattaagaattttttatcttaggcaaagtgtgtctctttcaattcattaacttattaattttataatgcagttttatttttggaaacatataaatatcagactgtccttaattgaaattttgtctttggtttccaacaccatgatgaagctcttgctttttaaaaagtagttagtaaattctgcatgaattttagtaaactttaaaaaatagattttttccctaagaaagaatgtttgtagaatttaaagtggacagatgcctgttggagtaaaatcaactgcaactttttgatgttaatttttttccctgtgcaattataaactataagcaagttaagtgacaagcaaatgtaataaagactagttttaata

SEQ ID NO: 102461 - protein, 557 aa, Artificial Sequence
  derived and/or modified sequence
MSNKEYKFYLHSLLSLRQDEDSSFLSQNETEDILAFTRQYFDTSQSQCMETKTLQKKSGIVSSEGANESTLPQLAAMIITLSLQGVCLGQGNLPSPDYFTEYIFSSLNRTNTLRLSELDQLLNTLWTRSTCIKNEKIHQFQRKQNNIITHDQDYSNFSSSMEKESEDGPVSWDQTCFSARQLVEIFLQKGLSLISKEDFKQMSPGIIQQLLSCSCHLPKDQQAKLPPTTLEKYGYSTVAVTLLTLGSMLGTALVLFHSCEENYRLILQLFVGLAVGTLSGDALLHLIPQVLGLHKQEAPEFGHFHESKGHIWKLMGLIGGIHGFFLIEKCFILLVSPNDKQGLSLVNGHVGHSHHLALNSELSDQAGRGKSASTIQLKSPEDSQAAEMPIGSMTASNRKCKAISLLAIMILVGDSLHNFADGLAIGAAFSSSSESGVTTTIAILCHEIPHEMGDFAVLLSSGLSMKTAILMNFISSLTAFMGLYIGLSVSADPCVQDWIFTVTAGMFLYLSLVEMLPEMTHVQTQRPWMMFLLQNFGLILGWLSLLLLAIYEQNIKI

SEQ ID NO: 102462 - DNA, 1674 bp, Artificial Sequence
  derived and/or modified sequence
atgagcaacaaggagtacaagttctacctgcacagcctgctgagcctgagacaggacgaggacagcagcttcctgagccagaacgagaccgaggacatcctggccttcaccagacagtacttcgacaccagccagagccagtgcatggagaccaagaccctgcagaagaagagcggcatcgtgagcagcgagggcgccaacgagagcaccctgccccagctggccgccatgatcatcaccctgagcctgcagggcgtgtgcctgggccagggcaacctgcccagccccgactacttcaccgagtacatcttcagcagcctgaacagaaccaacaccctgagactgagcgagctggaccagctgctgaacaccctgtggaccagaagcacctgcatcaagaacgagaagatccaccagttccagagaaagcagaacaacatcatcacccacgaccaggactacagcaacttcagcagcagcatggagaaggagagcgaggacggccccgtgagctgggaccagacctgcttcagcgccagacagctggtggagatcttcctgcagaagggcctgagcctgatcagcaaggaggacttcaagcagatgagccccggcatcatccagcagctgctgagctgcagctgccacctgcccaaggaccagcaggccaagctgccccccaccaccctggagaagtacggctacagcaccgtggccgtgaccctgctgaccctgggcagcatgctgggcaccgccctggtgctgttccacagctgcgaggagaactacagactgatcctgcagctgttcgtgggcctggccgtgggcaccctgagcggcgacgccctgctgcacctgatcccccaggtgctgggcctgcacaagcaggaggcccccgagttcggccacttccacgagagcaagggccacatctggaagctgatgggcctgatcggcggcatccacggcttcttcctgatcgagaagtgcttcatcctgctggtgagccccaacgacaagcagggcctgagcctggtgaacggccacgtgggccacagccaccacctggccctgaacagcgagctgagcgaccaggccggcagaggcaagagcgccagcaccatccagctgaagagccccgaggacagccaggccgccgagatgcccatcggcagcatgaccgccagcaacagaaagtgcaaggccatcagcctgctggccatcatgatcctggtgggcgacagcctgcacaacttcgccgacggcctggccatcggcgccgccttcagcagcagcagcgagagcggcgtgaccaccaccatcgccatcctgtgccacgagatcccccacgagatgggcgacttcgccgtgctgctgagcagcggcctgagcatgaagaccgccatcctgatgaacttcatcagcagcctgaccgccttcatgggcctgtacatcggcctgagcgtgagcgccgacccctgcgtgcaggactggatcttcaccgtgaccgccggcatgttcctgtacctgagcctggtggagatgctgcccgagatgacccacgtgcagacccagagaccctggatgatgttcctgctgcagaacttcggcctgatcctgggctggctgagcctgctgctgctggccatctacgagcagaacatcaagatctag

SEQ ID NO: 102463 - DNA, 1674 bp, Artificial Sequence
  derived and/or modified sequence
atgagcaataaggagtataagttctacctgcacagtctgctctcattgagacaggatgaggacagttcattcctgtctcagaacgagacagaggacattctggccttcacccgtcagtatttcgatacgagtcagagccagtgtatggagactaagaccctgcagaaaaagtccgggatcgtctccagtgagggcgccaatgagtctaccttgccccagttggctgccatgatcattacactcagtctacagggggtgtgtttgggccagggcaacctgccttcccccgattattttacggagtatattttttctagcctgaaccggactaacacattgaggctctccgagctggaccaactactgaatacgctttggacaagaagtacatgtataaaaaatgaaaagatccaccagtttcaaaggaaacagaataatataatcacgcacgaccaggactactccaatttttcctcaagcatggaaaaggagtcagaagacggcccagtttcctgggatcaaacctgtttttcagctcggcaactcgtggaaatatttcttcagaaaggactgtcactgataagtaaggaagatttcaagcaaatgagtccaggcattatacagcagttgctgtcatgtagctgccatcttcctaaggaccagcaggccaaacttcctccaactactctcgagaaatatggatactcaactgtggccgtcactctgctcaccctggggagcatgctcggcactgcactcgttctgtttcacagttgcgaggaaaattacagactaattctccagctgttcgttgggcttgctgttggtaccttgtcaggagatgcactcctccatctcatcccccaggtgctggggctgcacaagcaggaggcaccggagtttgggcatttccatgagtccaaaggtcacatctggaaactgatgggcctcattggaggaatccacggcttttttctgatagaaaagtgtttcatcctcttggttagcccaaatgacaaacaaggcctctccctggtcaatgggcacgtaggccactctcaccatctcgccctcaatagcgagcttagtgatcaggcaggccggggcaagtccgcatccaccatccagctaaagagccctgaagatagtcaggccgctgaaatgccaatcggttccatgactgcttccaaccgaaagtgcaaagctatatcactgctggccatcatgattctggttggagacagtttacacaactttgccgacggacttgcaatcggagccgcctttagctcctcaagtgaaagcggtgtcaccacaaccatcgcaattctgtgccacgaaatcccccatgaaatgggagattttgcagtcctactctcgtcaggactatccatgaagactgctattctgatgaactttatctcatctttgacggcgtttatgggactctacatcggtctgagcgtttctgcggatccttgcgttcaagactggatattcaccgtgacagcaggcatgtttctatacctgagcctagtggagatgctgcctgagatgactcacgtgcagacccaacggccttggatgatgttcctgctgcaaaactttggtttgattctcgggtggctctctctcctactgctggcaatatacgagcagaatattaagatttag

SEQ ID NO: 102464 - DNA, 1674 bp, Artificial Sequence
  derived and/or modified sequence
atgagcaacaaggagtacaagttctacctgcacagcctgctgagcctgcggcaggatgaggacagcagcttcctgagccagaatgaaacagaggacatcctggccttcacccggcagtactttgacaccagccagagccagtgcatggagaccaagaccctgcagaagaagagcggcatcgtgtcctctgagggcgccaatgaaagcaccctgccccagctggccgccatgatcatcaccctgagcctgcagggcgtgtgcctgggccagggcaacctgcccagcccagactacttcacagagtacatcttcagcagcctgaacagaaccaacaccctgcggctgtctgagctggaccagctgctgaacaccctgtggaccaggagcacctgcatcaagaatgagaagatccaccagttccagaggaagcagaacaacatcatcacccatgaccaggactacagcaacttcagcagctccatggagaaggagagtgaagatggccctgtgtcctgggaccagacctgcttcagcgcccggcagctggtggagatcttcctgcagaagggcctgagcctcatcagcaaagaagacttcaagcagatgagccctggcatcatccagcagctgctgagctgcagctgccacctgcccaaggaccagcaggccaagctgccccccaccaccctggagaagtatggctacagcacagtggccgtgaccctgctgaccctgggctccatgctgggcacagccctggtgctcttccacagctgtgaggagaactaccgcctcatcctgcagctgtttgtgggcctggccgtgggcaccctgtctggagatgccctgctgcacctgatcccccaggtgctgggcctgcacaagcaggaggcccctgagtttggccacttccacgagagcaagggccacatctggaagctgatgggcctcatcggcggcatccacggcttcttcctgattgagaagtgcttcatcctgctggtgagccccaatgacaagcagggcctgagcctggtgaatggacatgtgggccacagccaccacctggccctgaacagcgagctgagtgaccaggccggccggggcaagagcgccagcaccatccagctgaagagccctgaggacagccaggccgctgagatgcccatcggctccatgacagccagcaacaggaagtgcaaggccatcagcctgctggccatcatgatcctggtgggggacagcctgcacaactttgctgatggcctggccatcggggccgccttcagcagcagcagcgagagcggcgtgaccaccaccatcgccatcctgtgccacgagatcccccatgagatgggagactttgctgtgctgctgagcagcggcctgtccatgaagacagccatcctgatgaacttcatcagcagcctgacagccttcatgggcctgtacatcggcctgtctgtgtctgctgacccctgtgtgcaggactggatcttcaccgtgacagctggcatgttcctgtacctgagcctggtggagatgctgcctgagatgacccacgtgcagacccagaggccctggatgatgttcctgctgcagaactttggcctcatcctgggctggctgagcctgctgctgctggccatctatgagcagaacatcaagatctag

SEQ ID NO: 102465 - DNA, 1674 bp, Artificial Sequence
  derived and/or modified sequence
atgagcaacaaggagtacaagttctacctgcacagcctgctgagcttaaggcaggatgaggactcatcttttctgagtcaaaacgagacggaagacattttggcgtttacccggcagtacttcgacacctcccaatcgcagtgcatggagaccaagaccctccagaagaagtccggcattgtcagctcagaaggagccaatgaatccaccctcccacagttagccgcaatgattatcacacttagtctgcagggcgtctgtttgggccagggtaatctccccagtcccgattatttcacagaatacatctttagctctctgaacaggacgaacacgctgcgactcagtgagctggatcagctgctgaataccttgtggactagaagcacttgtatcaagaacgaaaaaattcaccagttccagcggaaacagaataatattatcactcacgatcaggactatagcaatttctcttcatcaatggaaaaagagtctgaagacggtcccgtgagttgggaccagacttgtttcagcgcacgacagctggtcgagatcttccttcagaagggactgagtctgatcagcaaggaggattttaagcagatgtccccaggtattatccagcagctgctgtcttgtagttgtcacctgcccaaggaccagcaggccaaacttcctccaaccactctggagaagtacggctactctaccgtcgcggtcacgttactgaccttgggttctatgctaggaactgcactggtcctctttcatagctgtgaggagaactacagactgattctgcagctgtttgttgggctggcagtgggcactctgagcggggacgccctgcttcacctgatcccccaagtgctcggtctccataagcaagaagccccagaatttggccattttcacgaatctaaaggacacatatggaagctgatgggtctcataggcggaatccatggtttttttctaatagaaaaatgcttcatcctgctggtctcccctaacgataagcaggggttgagcttggttaatggtcatgtaggccattctcaccatttggcactgaatagtgaattgagcgaccaggcgggccgaggaaagagtgcctctaccattcagctcaagtctccggaggacagccaggctgcggagatgcctattggctctatgacggccagcaataggaaatgcaaagccatctctctgcttgctattatgatcctggtgggagattctctacacaacttcgcggacggattggcaatcggtgcagccttctcctcaagtagcgaaagcggcgtcactactaccattgccattctgtgtcatgaaattccccatgaaatgggagatttcgccgtcctactctcgtccggactcagcatgaaaactgcaatactcatgaatttcatcagttcacttacagccttcatggggttatacatcggattgtccgtctcggccgacccctgcgtgcaggactggatctttactgtgactgctgggatgtttctttacctgtccctggtggaaatgctacctgagatgacgcatgtgcagactcagcgcccttggatgatgtttctgttacagaatttcggcctaattcttgggtggctctcattacttctgcttgctatatatgagcaaaatatcaaaatttag

SEQ ID NO: 102466 - DNA, 1674 bp, Artificial Sequence
  derived and/or modified sequence
atgtccaacaaggaatacaagttctaccttcattccctcctctctttgagacaggatgaagatagcagtttcctgagccagaacgagaccgaagacatacttgcctttacccgtcagtacttcgatacatcacagagccagtgtatggaaacaaaaacactgcaaaagaagtctggtatcgtgagcagtgagggcgctaacgaatcaacactgccccagctggcggcaatgataataacactgtccctccagggcgtctgtctggggcaaggcaacctgcctagccccgactattttacagagtatatattttcgtctctgaaccgaacaaacaccctgcggctctccgagcttgatcagctcctgaacaccctatggaccagaagtacatgcataaagaacgaaaagatccaccaattccaacggaaacaaaataacataatcactcacgaccaggactactctaactttagctcctcaatggaaaaggaatccgaagacggccctgtttcctgggatcaaacttgcttcagcgcccgacaacttgtggaaatattcctgcagaaaggcctctcactgataagcaaggaggactttaagcagatgagccctggtattatccaacagctgttgagctgctcttgccacttgcccaaagatcagcaggcgaaactgccgcctaccacgctggagaaatatgggtacagcacggtcgccgttacacttttgaccctcggatctatgcttggcacagctctggtgttgtttcactcctgtgaggaaaattaccgactgattctacagcttttcgtgggactcgcagtaggaaccctgtcaggggacgctttgctccatctgatcccccaggttttgggcctacacaagcaggaagccccagaattcgggcacttccacgagtctaagggacacatctggaaactaatgggtcttattggcggtattcacgggttttttctcatagaaaagtgtttcatcttgctggtaagtccgaacgacaagcaaggtttgtctctggtgaatggtcatgtggggcatagccatcatttggcgttgaactcagagctcagcgatcaggcgggtagagggaagtctgcctcaaccattcagctgaagagccctgaggattcgcaagcagccgagatgcccattggtagtatgactgcttctaatcgtaagtgtaaggctatttccctactggccattatgatcctcgtgggtgatagcctgcataatttcgccgatgggctagctataggtgcggcattttcatccagttcagagagcggcgtaaccaccaccatcgcaatcctttgccacgaaataccgcatgagatgggtgattttgcagtgctgctgtcttctggcctcagcatgaaaaccgctatcctcatgaattttatcagcagcctgaccgcattcatgggtttatatattggtcttagcgtttccgcggacccttgtgttcaggattggatctttacggtgactgccggaatgtttctctatctcagcctggtggaaatgctgccggagatgacgcatgtgcagacccagcgaccatggatgatgtttttgctacaaaactttggtctaatccttggatggctctcactgcttctgctagctatttacgagcagaacattaaaatttag

SEQ ID NO: 102467 - protein, 480 aa, Artificial Sequence
  derived and/or modified sequence
MARFPKADLAAAGVMLLCHFFTDQFQFADGKPGDQILDWQYGVTQAFPHTEEEVEVDSHAYSHRWKRNLDFLKAVDTNRASVGQDSPEPRSFTDLLLDDGQDNNTQIERVNLSFDFPFYGHFLREITVATGGFIYTGEVVHRMLTATQYIAPLMANFDPSVSRNSTVRYFDNGTALVVQWDHVHLQDNYNLGSFTFQATLLMDGRIIFGYKEIPVLVTQISSTNHPVKVGLSDAFVVVHRIQQIPNVRRRTIYEYHRVELQMSKITNISAVEMTPLPTCLQFNRCGPCVSSQIGFNCSWCSKLQRCSSGFDRHRQDWVDSGCPEESKEKMCENTEPVETSSRTTTTVGATTTQFRVLTTTRRAVTSQFPTSLPTEDDTKIALHLKDNGASTDDSAAEKKGGTLHAGLIIGILILVLIVATAILVTVYMYHHPTSAASIFFIERRPSRWPAMKFRRGSGHPAYAEVEPVGEKEGFIVSEQC

SEQ ID NO: 102468 - DNA, 1443 bp, Artificial Sequence
  derived and/or modified sequence
atggctcgctttccaaaggcagatctggccgcagcaggcgtgatgcttctctgtcacttcttcaccgatcagttccagtttgccgatggaaaacccggcgaccagatcctcgattggcagtacggggttacccaggccttcccacatactgaggaagaagtggaggtagactcccacgcctacagtcacaggtggaagcgtaacctggacttcttgaaagctgttgatacaaacagggcaagcgtaggacaagatagccctgagccccgcagctttactgatctgttgctcgacgatggtcaagataataatacgcagatcgagagggtgaacctttcgtttgactttcccttttatggacattttcttagagagattactgtggccacgggaggcttcatctacaccggcgaagtggtacacagaatgctcaccgctacacagtatatcgcaccactaatggcaaatttcgatccttcagtaagccgaaactccaccgtccgttacttcgataacggcaccgccctcgtggttcagtgggaccacgtgcatctgcaggacaattacaatctcggcagttttacattccaggcaaccttgctgatggacgggcgcattatctttgggtacaaggagatccccgtcctcgtgacgcagatttctagcaccaaccatcccgtaaaggtgggattgtccgatgcattcgtagtagtgcaccgcatacagcagatccccaatgttcgtagacgcactatctatgagtatcaccgggtggaactgcagatgagcaaaattaccaacatttctgctgtagagatgacccccttaccaacatgcttacagttcaaccgatgtgggccttgcgtgagcagccagataggcttcaattgctcgtggtgttcaaagttgcaaaggtgtagcagcggcttcgatcgccaccgccaggattgggttgatagcggttgcccagaggagagcaaggaaaaaatgtgcgaaaataccgagccggtggagaccagtagcagaactactaccaccgtcggggctacaaccactcagttcagggtcctgactacaacacgtcgagctgttacaagccagttccccacttcgctgcctaccgaggacgataccaagatcgccttgcacctcaaggacaacggcgcttctaccgacgattccgccgctgaaaagaagggtggtacattgcacgccggcctgatcataggtatcctcattcttgtactgattgtcgccacggccatcctggtgaccgtctacatgtaccaccaccccacaagcgctgcctccatattctttatcgaacggcgcccatccagatggcccgccatgaaatttcgaagaggatctggtcaccccgcttacgccgaagtcgagcccgttggggagaaggaaggcttcattgtgtctgagcaatgctag

SEQ ID NO: 102469 - DNA, 1443 bp, Artificial Sequence
  derived and/or modified sequence
atggcccgcttccccaaggctgacctggccgccgccggcgtgatgctgctgtgccacttcttcacagaccagttccagtttgctgatggcaagccaggggaccagatcctggactggcagtatggagtgacccaggccttcccccacacagaggaggaggtggaggtggacagccacgcctacagccaccgctggaagaggaacctggacttcctgaaggctgtggacaccaacagagcctctgtgggccaggacagccctgagcccaggagcttcacagacctgctgctggatgatggccaggacaacaacacccagatcgagcgggtgaacctgagctttgacttccccttctacggccacttcctgcgggagatcaccgtggccaccggcggcttcatctacaccggggaggtggtgcacaggatgctgacagccacccagtacatcgcccccctgatggccaactttgaccccagcgtgtccaggaacagcacagtgcgctactttgacaatggaacagccctggtggtgcagtgggaccacgtgcacctgcaggacaactacaacctgggcagcttcaccttccaggccaccctgctgatggatggccgcatcatcttcggctacaaggagatccctgtgctggtgacccagatcagcagcaccaaccaccctgtgaaggtgggcctgagtgatgcctttgtggtggtgcaccgcatccagcagatccccaacgtgagaagaaggaccatctatgagtaccaccgggtggagctgcagatgagcaagatcaccaacatctctgctgtggagatgacccccctgcccacctgcctgcagttcaacagatgtggcccctgtgtgagcagccagatcggcttcaactgctcctggtgcagcaagctgcagcgctgcagcagcggctttgacagacaccggcaggactgggtggacagcggctgcccagaggagagcaaggagaagatgtgtgagaacacagagcctgtggagaccagcagcaggaccaccaccaccgtgggcgccaccaccacccagttccgggtgctgaccaccaccaggagagctgtgaccagccagttccccaccagcctgcccacagaagatgacaccaagatcgccctgcacctgaaggacaatggagccagcacagatgacagcgctgctgagaagaagggcggcaccctgcatgctggcctcatcatcggcatcctgatcctggtgctgattgtggccacagccatcctggtgacagtgtacatgtaccaccaccccaccagcgctgccagcatcttcttcattgaaagaagacccagccgctggccagccatgaagttccggcggggcagcggccacccagcctatgcagaggtggagcctgtgggggagaaggagggcttcatcgtgtctgagcagtgctag

SEQ ID NO: 102470 - DNA, 1443 bp, Artificial Sequence
  derived and/or modified sequence
atggcccggttccccaaggccgacctggccgccgccggcgtgatgctcttatgtcactttttcaccgaccagtttcagttcgccgacgggaagccgggggatcagatactcgattggcaatatggggttacgcaagccttcccccacaccgaggaagaggttgaggttgactctcatgcctactcccatagatggaagcgtaaccttgatttcctgaaagctgtggatacaaacagagcttctgtcggacaagactccccagagccccggtcattcacagatctgctgctggacgacggacaggacaataatacccagatagaaagagtcaatctcagttttgatttccctttctatggtcacttcctgcgggaaatcactgtcgctacgggtggattcatctatacgggcgaggtggtacaccgtatgctgacagccacccagtacattgcaccactcatggctaacttcgatccctcagtgtcaaggaattccacagtgcgctacttcgataacgggacagctttggtggtccagtgggaccacgtacacctccaagacaattataacctcggctccttcactttccaagctactctgctgatggatgggcgaattatttttggatacaaggaaatcccagttctcgtcacccagatttcttccactaatcaccccgtgaaggtcgggctatctgacgcatttgtggtggtgcatcggattcaacagatcccaaacgttcgccgccgtaccatttacgagtatcatcgagtggagcttcagatgtccaagattactaatataagcgctgtagagatgacgcctttgccgacatgccttcaattcaatcggtgcggaccctgcgtgtcgtcccagattgggttcaattgttcatggtgttccaagctccagcgttgctccagcggctttgatcgtcataggcaggattgggtcgacagcggatgtccagaggaatctaaggagaaaatgtgcgaaaataccgagccagtggaaacttcaagtagaactactacgactgtaggggccacaaccactcagtttcgcgtcctgaccaccactcgtcgcgcagtcacatcgcagtttcctactagtctccctaccgaggatgatacaaagatcgcactacatctgaaggataacggagcttctactgatgatagtgccgctgaaaagaagggggggacactgcatgccggtctcatcattggcatattgatcctggtactcatcgtggctaccgccatcctagtgactgtgtacatgtatcaccatcccacatccgccgcaagtattttctttatcgagcgtcgaccaagccgttggccggctatgaaattccgcagggggtccgggcatcccgcatacgctgaggtggagccggttggtgaaaaggaagggtttatagtatcggagcagtgttag

SEQ ID NO: 102471 - DNA, 2822 bp, Artificial Sequence
  derived and/or modified sequence
ggcgacggcagcgcctcctccgccaccaaactcctggggctccgcgggggcttggggccacctcctcctgagcccggaggaaccctctcccgataggttccagcgtgactccctcccactccacccttttcctttcttcttcctcttttttttttttttttttaaacacatttttttcctggcttcggacctcagactgctgcagccctaaccttcccagggctcagctctttggagctgcccattcctccggctgcgagaaaggacgcgcgccctgcgtcgggcgaagaaaagaagcaaaacttgtcgggagggtttcgtcatcaacctccttcccgcaaacctaaacctcctgccggggccatccctagacagaggaaagttcctgcagagccgaccagccctagtggatctggggcaggcagcggcgctggctgtggaattagatctgttttgaacccagtggagcgcatcgctggggctcggaagtcaccgtccgcgggcaccgggttggcgctgcccgagtggaaccgacagtttgcgagcctcggctgcaagtggcctctcctccccgcggttgttgttcagtgtcgggtgagggctgcgagtgtggcaagttgcaaagagagcctcagaggtccgaagagcgctgcgctcctactcgcgttcgcttcttcctcttctcggttccctactgtgaaatcgcagcgacatttacaaaggcctccgggtcctaccgagaccgatccgcagcgtttggcccggtcgtgcctattgcatcgggagcccccgagcaccggcgaaggactggcgggtggggtagggaggtggcggcggcggcatggcgaggttcccgaaggccgacctggccgctgcaggagttatgttactttgccacttcttcacggaccagtttcagttcgccgatgggaaacccggagaccaaatccttgattggcagtatggagttactcaggccttccctcacacagaggaggaggtggaagttgattcacacgcgtacagccacaggtggaaaagaaacttggactttctcaaggcggtagacacgaaccgagcaagcgtcggccaagactctcctgagcccagaagcttcacagacctgctgctggatgatgggcaggacaataacactcagatcgagagagtgaatctgtccttcgattttccattttatggccacttcctacgtgaaatcactgtggcaaccgggggtttcatatacactggagaagtcgtacatcgaatgctaacagccacacagtacatagcacctttaatggcaaatttcgatcccagtgtatccagaaattcaactgtcagatattttgataatggcacagcacttgtggtccagtgggaccatgtacatctccaggataattataacctgggaagcttcacattccaggcaaccctgctcatggatggacgaatcatctttggatacaaagaaattcctgtcttggtcacacagataagttcaaccaatcatccagtgaaagtcggactgtccgatgcatttgtcgttgtccacaggatccaacaaattcccaatgttcgaagaagaacaatttatgaataccaccgagtagagctacaaatgtcaaaaattaccaacatttcggctgtggagatgaccccattacccacatgcctccagtttaacagatgtggcccctgtgtatcttctcagattggcttcaactgcagttggtgtagtaaacttcaaagatgttccagtggatttgatcgtcatcggcaggactgggtggacagtggatgccctgaagagtcaaaagagaagatgtgtgagaatacagaaccagtggaaacttcttctcgaaccaccacaaccgtaggagcgacaaccacccagttcagggtcctaactaccaccagaagagcagtgacttctcagtttcccaccagcctccctacagaagatgataccaagatagcactacatctaaaagataatggagcttctacagatgacagtgcagctgagaagaaagggggaaccctccacgctggcctcatcattggaatcctcatcctggtcctcattgtagccacagccattcttgtgacagtctatatgtatcaccacccaacatcagcagccagcatcttctttattgagagacgcccaagcagatggcctgcgatgaagtttagaagaggctctggacatcctgcctatgctgaagttgaaccagttggagagaaagaaggctttattgtatcagagcagtgctaaaatttctaggacagaacaacaccagtactggtttacaggtgttaagactaaaattttgcctatacctttaagacaaacaaacaaacacacacacaaacaagctctaagctgctgtagcctgaagaagacaagatttctggacaagctcagcccaggaaacaaagggtaaacaaaaaactaaaacttatacaagataccatttacactgaacatagaattccctagtggaatgtcatctatagttcactcggaacatctcccgtggacttatctgaagtatgacaagattataatgcttttggcttaggtgcagggttgcaaagggatcagaaaaaaaaaatcataataaagctttagttcatgagggatcgacacctttggttcaaatgttctctgatgtctcaaagataactgttttccaaagcctgaaccctttcactcaaaagagcaatgatgaatgtctcaagattgctaagaaaaacagcccatgcaagagtgagaacaaacacaaaataagagattttctacattttcaaaa

SEQ ID NO: 102472 - DNA, 1443 bp, Artificial Sequence
  derived and/or modified sequence
atggcccgattccctaaggcagacctagccgcagctggtgtaatgctgctctgccacttcttcactgaccaattccagtttgctgacggcaaacctggtgaccagatcttggactggcagtatggcgtgacacaggcattcccacacaccgaggaggaagtggaggtcgattcccacgcttactcccaccgttggaagaggaatttagacttcctcaaggccgttgatacgaatagagcgagcgtcgggcaagatagcccggagccccgtagtttcacagacttattactggacgacggccaggataataatactcagatagagagggtcaacttaagttttgactttccattctacggtcatttcctaagggaaatcaccgtagccaccggcggattcatctacacgggcgaggtggtgcaccgtatgcttaccgccacccaatatattgctcccctcatggcaaactttgaccccagcgtgtcaaggaacagcactgtgagatatttcgataacggaaccgcactggttgtccagtgggaccacgtacacttgcaggataattacaacttaggaagttttacctttcaggcaaccctgttaatggatggccgaatcatctttggttataaagagattccagttctagtaacccaaatatcttcgactaaccacccagtgaaagtcggcttatccgacgcttttgtcgtcgtccatcgtattcaacaaatcccaaacgtccgaaggcgcacaatttatgaataccacagggttgagctccagatgtctaagattactaatatatccgctgttgaaatgacaccccttccaacatgcttgcagtttaatcgatgcggaccttgtgtgtcatcacagatcggtttcaactgttcctggtgtagtaagttacagcgctgtagctcgggctttgaccgtcaccgacaggactgggtagactctggatgccctgaagagtctaaggaaaagatgtgcgagaacacggagcccgtcgagacctcttcacggaccacgaccaccgttggggctacaaccacgcagtttcgggtgctgacaaccacacggcgtgccgtgacttcccagttcccgacttcgttgcctaccgaagacgataccaagatcgctctccacctgaaggataatggagcgtcaacggatgattctgcagctgaaaagaagggcggaacgctgcacgccggactgataattggaatcctcatactggtcctgattgtcgcgacagccatattggttacagtgtatatgtatcaccacccaacatcagctgccagcatcttttttatcgagcgtcgcccaagtcgttggcctgctatgaagttccggaggggaagcgggcatccggcttacgcggaggtggagcccgtgggtgagaaagaaggtttcattgtgagcgaacagtgttag

SEQ ID NO: 102473 - DNA, 1443 bp, Artificial Sequence
  derived and/or modified sequence
atggccagattccccaaggccgacctggccgccgccggcgtgatgctgctgtgccacttcttcaccgaccagttccagttcgccgacggcaagcccggcgaccagatcctggactggcagtacggcgtgacccaggccttcccccacaccgaggaggaggtggaggtggacagccacgcctacagccacagatggaagagaaacctggacttcctgaaggccgtggacaccaacagagccagcgtgggccaggacagccccgagcccagaagcttcaccgacctgctgctggacgacggccaggacaacaacacccagatcgagagagtgaacctgagcttcgacttccccttctacggccacttcctgagagagatcaccgtggccaccggcggcttcatctacaccggcgaggtggtgcacagaatgctgaccgccacccagtacatcgcccccctgatggccaacttcgaccccagcgtgagcagaaacagcaccgtgagatacttcgacaacggcaccgccctggtggtgcagtgggaccacgtgcacctgcaggacaactacaacctgggcagcttcaccttccaggccaccctgctgatggacggcagaatcatcttcggctacaaggagatccccgtgctggtgacccagatcagcagcaccaaccaccccgtgaaggtgggcctgagcgacgccttcgtggtggtgcacagaatccagcagatccccaacgtgagaagaagaaccatctacgagtaccacagagtggagctgcagatgagcaagatcaccaacatcagcgccgtggagatgacccccctgcccacctgcctgcagttcaacagatgcggcccctgcgtgagcagccagatcggcttcaactgcagctggtgcagcaagctgcagagatgcagcagcggcttcgacagacacagacaggactgggtggacagcggctgccccgaggagagcaaggagaagatgtgcgagaacaccgagcccgtggagaccagcagcagaaccaccaccaccgtgggcgccaccaccacccagttcagagtgctgaccaccaccagaagagccgtgaccagccagttccccaccagcctgcccaccgaggacgacaccaagatcgccctgcacctgaaggacaacggcgccagcaccgacgacagcgccgccgagaagaagggcggcaccctgcacgccggcctgatcatcggcatcctgatcctggtgctgatcgtggccaccgccatcctggtgaccgtgtacatgtaccaccaccccaccagcgccgccagcatcttcttcatcgagagaagacccagcagatggcccgccatgaagttcagaagaggcagcggccaccccgcctacgccgaggtggagcccgtgggcgagaaggagggcttcatcgtgagcgagcagtgctag

SEQ ID NO: 102474 - protein, 750 aa, Artificial Sequence
  derived and/or modified sequence
MHRQRTRTMSSLAAKRLGMNRRPAGSGGGGGEAATWGHRFWRPQERPTDRNQGEMAHTCRGTINLSTAHIDTEDSCGILLTSGARSYHLKASSEVDRQQWITALELAKAKAVRVMNTHSDDSGDDDEATTPADKSELHHTLKNLSLKLDDLSTCNDLIAKHGAALQRSLTELDGLKIPSESGEKLKVVNERATLFRITSNAMINACRDFLELAEIHSRKWQRALQYEQEQRVHLEETIEQLAKQHNSLERAFHSAPGRPANPSKSFIEGSLLTPKGEDSEEDEDTEYFDAMEDSTSFITVITEAKEDRKAEGSTGTSSVDWSSADNVLDGASLVPKGSSKVKRRVRIPNKPNYSLNLWSIMKNCIGRELSRIPMPVNFNEPLSMLQRLTEDLEYHHLLDKAVHCTSSVEQMCLVAAFSVSSYSTTVHRIAKPFNPMLGETFELDRLDDMGLRSLCEQVSHHPPSAAHYVFSKHGWSLWQEITISSKFRGKYISIMPLGAIHLEFQASGNHYVWRKSTSTVHNIIVGKLWIDQSGDIEIVNHKTNDRCQLKFLPYSYFSKEAARKVTGVVSDSQGKAHYVLSGSWDEQMECSKVMHSSPSSPSSDGKQKTVYQTLSAKLLWKKYPLPENAENMYYFSELALTLNEHEEGVAPTDSRLRPDQRLMEKGRWDEANTEKQRLEEKQRLSRRRRLEACGPGSSCSSEEEKEADAYTPLWFEKRLDPLTGEMACVYKGGYWEAKEKQDWHMCPNIF

SEQ ID NO: 102475 - DNA, 2253 bp, Artificial Sequence
  derived and/or modified sequence
atgcatcgtcagagaaccagaactatgtcctccctggccgctaagcgcctcggcatgaacaggaggcctgccggatctgggggtggaggcggggaggccgccacctgggggcataggttttggcggccccaggaaagacctactgatcgaaatcagggtgaaatggcacatacttgtcgtggcacgattaacctgtcaactgcacacatcgatactgaagattcctgtggaattctgctgacctccggtgcccggtcctaccatctgaaagcctcctctgaggtagatcggcagcagtggataacagctctggagcttgccaaggcaaaggcagttcgcgtaatgaacacccatagtgacgattcaggagacgatgacgaagctactactcccgccgacaagtctgagctgcatcataccctcaagaacctaagtctaaagctagatgacctctctacttgtaacgaccttatcgctaagcacggcgccgcgctgcagagaagcctcaccgagctggatggcttgaaaattccatcagagtctggagagaagctgaaggtagtgaacgagcgagcaactttgtttaggatcacgtcaaatgcaatgataaacgcgtgccgagattttctggagctggctgagatccatagtcgaaaatggcaacgagccttacaatacgagcaggaacagcgtgtgcacctggaggaaaccatcgagcagcttgctaagcagcacaacagtctagaaagagcctttcattctgctccgggccgccctgcaaatcctagcaagtctttcatagaggggtcactgctcaccccaaagggtgaagatagcgaagaggacgaggacaccgagtacttcgatgcaatggaggatagtacctctttcatcaccgtgatcaccgaggccaaggaagacagaaaagccgaggggtcaactgggacaagctctgttgattggagtagtgccgacaatgtgcttgatggagcatccctggtccccaagggttcaagtaaggttaaacgcagagtcagaatccctaataaacccaactattctctgaacctttggtcaataatgaagaactgcatcggccgggagctgtcaaggattccaatgccagtgaacttcaacgaaccccttagcatgctccagagattaaccgaggaccttgagtaccatcacctgctggataaggccgtgcattgcacctcttccgttgagcagatgtgcttggtggctgcgttctccgtaagcagctattccacaactgtccacaggatcgccaagcctttcaatccaatgctgggggaaactttcgaactggaccggcttgatgatatgggcctcaggtcattgtgtgaacaggtttctcatcatcccccgtctgccgcgcactacgtcttcagtaagcatgggtggtctttgtggcaagagattaccatatctagtaagtttcggggtaagtacattagcatcatgccccttggcgccattcacctcgagttccaggcaagcggaaaccattacgtgtggagaaagagcacatccaccgtgcataatatcattgtggggaaactgtggatcgaccaaagtggggacattgagatcgtgaaccacaagaccaatgatagatgtcagctgaaattcttgccctactcatacttttcgaaagaagccgcccgcaaggtaaccggtgtggtgtccgattcccaaggcaaagcgcactatgtgttgtctggatcttgggacgaacagatggaatgctccaaggtcatgcacagcagcccatcgtcaccatcatccgacggtaaacagaagactgtctaccaaaccctgtccgcaaagctactgtggaagaaataccccctgcctgagaatgccgagaacatgtactatttttctgaactggcactcacactaaatgagcacgaggaaggagttgcccccaccgactctcgcttacgaccagaccagcggctaatggagaagggccggtgggatgaggccaacaccgaaaagcagcggctcgaagagaaacaacgcctgtcacggagacgacgcctggaagcatgcggacccggctctagctgctcctccgaagaggaaaaagaagccgacgcttatacaccgttatggttcgagaaacgcctggatcctctcaccggcgaaatggcctgtgtgtacaaagggggttactgggaggccaaggagaagcaagactggcacatgtgccctaacatattctag

SEQ ID NO: 102476 - DNA, 1383 bp, Artificial Sequence
  derived and/or modified sequence
atggaggatagcacgagttttattaccgtgatcaccgaagcgaaggaagatcgaaaggcagagggaagtactgggacaagctccgtggactggagctccgccgataatgtgctggacggagcctctctggtccccaaaggctcatctaaggtcaaacgccgagtgaggattcccaacaaacctaattactccctcaacttgtggtccattatgaaaaattgcatcggcagggagttatcccgaattccaatgccagtgaattttaatgaaccactatctatgttacagagactgactgaggatctcgagtaccatcaccttctggataaggctgtccattgcacaagctcagttgaacagatgtgtttagtggctgcattctcagtgagcagttactcgacaaccgtgcaccggatagcaaagccattcaaccccatgctgggagagacatttgaactagaccgcctggacgacatgggtctgagaagcctctgcgagcaagtgagccaccatccaccctccgcagcccattacgtgttttcgaagcacggctggtctctatggcaagaaataactatcagctcgaagttcaggggcaaatacatttccatcatgccccttggcgcgatccacctcgaattccaggcatccggtaatcattatgtttggaggaagtctacctccactgtgcataatataatagtcggcaaactgtggatcgatcaatcaggggatatcgaaattgtaaaccataaaaccaatgataggtgtcaactgaaattccttccatacagttacttctccaaagaagctgcccgcaaggtgactggggtggtctcagacagccaaggcaaagcccactatgtgttgagtggaagctgggacgagcagatggaatgcagtaaggtgatgcactcctcaccctcttcccctagctccgatggtaagcaaaaaaccgtatatcagacactctcagctaagcttctgtggaagaagtacccgctgcccgaaaacgctgagaatatgtactacttttcggagttagctctcaccttaaatgagcatgaggaaggggtcgcccctactgacagccgtctgcgcccagaccaaagattgatggagaaagggcgatgggacgaagccaatacggagaagcagagactagaagagaagcagcgcttaagccgtcgcagaaggcttgaagcctgtgggccaggctcttcttgctcctccgaggaagaaaaggaagcagatgcctataccccattatggttcgagaagagactggacccactgacaggcgaaatggcctgtgtgtataaaggcggatactgggaagccaaagagaagcaggattggcacatgtgccctaacatattttag

SEQ ID NO: 102477 - DNA, 2253 bp, Artificial Sequence
  derived and/or modified sequence
atgcaccggcagaggaccaggaccatgagcagcctggccgccaagaggctgggcatgaacagaagacctgctggcagcggcggcggcggcggggaggccgccacctggggccaccgcttctggaggccccaggagcggcccacagacaggaaccagggcgagatggcccacacctgccggggcaccatcaacctgagcacagcccacatcgacacagaggacagctgtggcatcctgctgaccagcggggcccggagctaccacctgaaggccagcagcgaggtggaccggcagcagtggatcacagccctggagctggccaaggccaaggctgtgcgggtgatgaacacccacagtgatgacagcggagatgatgatgaggccaccaccccagctgacaagtctgagctgcaccacaccctgaagaacctgagcctgaagctggatgacctgagcacctgcaatgacctgattgccaagcatggagctgccctgcagaggagcctgacagagctggatggcctgaagatccccagcgagagcggggagaagctgaaggtggtgaatgaaagagccaccctcttccgcatcaccagcaatgccatgatcaatgcctgccgggacttcctggagctggccgagatccacagcaggaagtggcagagggccctgcagtatgagcaggagcagagggtgcacctggaggagaccatcgagcagctggccaagcagcacaacagcctggagcgggccttccacagcgcccctggccgcccagccaaccccagcaagagcttcatcgagggcagcctgctgacccccaagggagaagattctgaagaagatgaggacacagagtactttgatgccatggaggacagcaccagcttcatcaccgtcatcacagaggccaaggaggacaggaaggccgagggcagcacaggcaccagctctgtggactggagcagcgctgacaacgtgctggatggagccagcctggtgcccaagggcagcagcaaggtgaagagaagagtgcgcatccccaacaagcccaactacagcctgaacctgtggagcatcatgaagaactgcatcggccgggagctgagccgcatccccatgcctgtgaacttcaatgagcccctgtccatgctgcagaggctgacagaggacctggagtaccaccacctgctggacaaggctgtgcactgcaccagctctgtggagcagatgtgcctggtggccgccttctctgtgtcctcctacagcaccaccgtgcacagaattgccaagcccttcaaccccatgctgggggagacctttgagctggaccggctggatgacatgggcctgcggagcctgtgtgagcaggtgagccaccacccccccagcgctgcccactacgtgttcagcaagcacggctggagcctgtggcaggagatcaccatcagcagcaagttccggggcaagtacatcagcatcatgcccctgggcgccatccacctggagttccaggccagcggcaaccactacgtgtggaggaagagcaccagcacagtgcacaacatcatcgtgggcaagctgtggattgaccagagcggggacatcgagatcgtgaaccacaagaccaatgaccgctgccagctgaagttcctgccctacagctacttcagcaaggaggccgccaggaaggtgactggagtggtgtctgacagccagggcaaggcccactacgtgctgagcggctcctgggatgagcagatggagtgcagcaaggtgatgcacagcagccccagcagccccagcagtgatggcaagcagaagacagtgtaccagaccctgagcgccaagctgctgtggaagaagtaccccctgcctgaaaatgctgagaacatgtactacttcagcgagctggccctgaccctgaatgaacatgaggagggcgtggcccccacagacagccggctgcggccagaccagaggctgatggagaagggccgctgggatgaggccaacacagagaagcagaggctggaggagaagcagaggctgagcagaagaagaaggctggaggcctgtggccctggcagcagctgcagcagcgaggaggagaaggaggctgatgcctacacccccctgtggtttgagaagaggctggaccccctgactggagagatggcctgtgtgtacaagggcggctactgggaggccaaggagaagcaggactggcacatgtgccccaacatcttctag

SEQ ID NO: 102478 - DNA, 1383 bp, Artificial Sequence
  derived and/or modified sequence
atggaggacagcaccagcttcatcaccgtcatcacagaggccaaggaggacaggaaggccgagggcagcacaggcaccagctctgtggactggagcagcgctgacaacgtgctggatggagccagcctggtgcccaagggcagcagcaaggtgaagagaagagtgcgcatccccaacaagcccaactacagcctgaacctgtggagcatcatgaagaactgcatcggccgggagctgagccgcatccccatgcctgtgaacttcaatgagcccctgtccatgctgcagaggctgacagaggacctggagtaccaccacctgctggacaaggctgtgcactgcaccagctctgtggagcagatgtgcctggtggccgccttctctgtgtcctcctacagcaccaccgtgcacagaattgccaagcccttcaaccccatgctgggggagacctttgagctggaccggctggatgacatgggcctgcggagcctgtgtgagcaggtgagccaccacccccccagcgctgcccactacgtgttcagcaagcacggctggagcctgtggcaggagatcaccatcagcagcaagttccggggcaagtacatcagcatcatgcccctgggcgccatccacctggagttccaggccagcggcaaccactacgtgtggaggaagagcaccagcacagtgcacaacatcatcgtgggcaagctgtggattgaccagagcggggacatcgagatcgtgaaccacaagaccaatgaccgctgccagctgaagttcctgccctacagctacttcagcaaggaggccgccaggaaggtgactggagtggtgtctgacagccagggcaaggcccactacgtgctgagcggctcctgggatgagcagatggagtgcagcaaggtgatgcacagcagccccagcagccccagcagtgatggcaagcagaagacagtgtaccagaccctgagcgccaagctgctgtggaagaagtaccccctgcctgaaaatgctgagaacatgtactacttcagcgagctggccctgaccctgaatgaacatgaggagggcgtggcccccacagacagccggctgcggccagaccagaggctgatggagaagggccgctgggatgaggccaacacagagaagcagaggctggaggagaagcagaggctgagcagaagaagaaggctggaggcctgtggccctggcagcagctgcagcagcgaggaggagaaggaggctgatgcctacacccccctgtggtttgagaagaggctggaccccctgactggagagatggcctgtgtgtacaagggcggctactgggaggccaaggagaagcaggactggcacatgtgccccaacatcttctag

SEQ ID NO: 102479 - DNA, 2253 bp, Artificial Sequence
  derived and/or modified sequence
atgcaccggcagcggacccggaccatgagcagcctggccgccaagcgtctgggcatgaaccgacggcctgcgggaagcggcgggggaggaggcgaggcagccacatggggccatcgtttttggaggccccaggaacgacctactgaccgcaatcagggcgaaatggcccatacttgccgcggaactattaatctcagcaccgctcacatagacacagaagactcctgcggtatactgcttacctcaggggctaggtcgtatcatttaaaggcatcaagtgaagtggacaggcagcaatggatcactgctctcgagcttgctaaagcaaaagccgtgcgcgtgatgaacacccactcagatgactctggagatgatgatgaagcgacgaccccggcggacaaatcggagcttcaccatactctgaagaatctttccctcaaactagatgacctgtcaacctgcaacgatttgattgccaagcacggcgcagctctgcagaggtctctgaccgaactggacggactcaaaatcccctcagagagcggcgagaagctaaaagtggtaaatgaacgcgctacactgttcaggataacttcaaacgccatgataaacgcctgtagggactttttagaactagccgagatacatagccggaaatggcaacgcgcacttcaatatgaacaggagcagagggtgcatctggaggaaaccatcgaacagctagcaaaacagcataacagcctcgagagagcttttcatagtgcgcccggccgaccagcaaatccttccaaatctttcatcgaaggatccctgctgacgccaaagggcgaggattccgaggaggatgaagataccgaatattttgacgccatggaagacagtaccagctttattacggtgataaccgaagctaaggaggatcggaaagccgaaggatccacaggcacgtcatcagtggattggtcaagcgcagacaacgtactggatggagctagcctggttcccaaaggctcgtccaaggtaaagcggcgggtccggataccgaacaagccgaactacagcttgaatctttggagcatcatgaagaattgtataggcagagagctgtccaggattcccatgcctgtgaacttcaatgagcccctgtcaatgttacagcggctcaccgaggacctggaataccatcatctgctagacaaagccgtgcattgtaccagcagtgtagaacagatgtgtcttgtggccgccttttctgttagcagttattcaaccactgtgcatcggattgccaagccattcaacccaatgttaggagagaccttcgagctcgatcgtctcgacgatatgggcctacgctccctctgcgaacaagtaagccaccaccccccctccgctgcccattacgtttttagcaaacacggatggagcctctggcaggagataactatctctagtaaattccgcggcaaatatatcagcatcatgcctctgggagcaatccatcttgaattccaggcctccggaaaccactatgtgtggcggaagtccactagtacagtacacaacattatcgtaggaaaactgtggatagatcagtccggtgatatcgaaatagtcaaccacaagactaacgatcgctgccaactcaagttccttccctacagctacttcagtaaggaagccgcccgtaaagtgaccggcgtggtatccgacagccaggggaaggctcattacgttctcagtggttcatgggatgaacagatggagtgttccaaggtcatgcacagttccccctccagcccaagctcagatggtaaacaaaaaacggtgtaccaaaccctctccgctaagctcctgtggaagaagtacccactccctgagaacgcagaaaacatgtactattttagtgaactggcactaacactcaacgagcacgaagagggtgtggcccctaccgattcacgcctgcgtccggatcaacgcctgatggagaagggacgctgggacgaggccaacaccgaaaaacagcgccttgaagagaagcagcgcttgtcacgcagacgcagactggaagcttgtggtccaggaagcagttgcagctcagaggaggagaaagaagccgatgcctatacgccactgtggtttgagaagagactcgatccactgacaggcgagatggcctgtgtttataagggagggtactgggaggctaaggaaaaacaggactggcacatgtgcccaaatatcttctag

SEQ ID NO: 102480 - DNA, 1383 bp, Artificial Sequence
  derived and/or modified sequence
atggaggacagcaccagcttcatcaccgtgatcaccgaggccaaggaggaccgtaaggcggaaggaagcacgggcacttcaagtgtcgactggagctcagctgataatgtcctggacggggcttccttggtgcctaagggaagctccaaggtcaaaagacgcgtgaggatccctaacaaacccaattatagcttgaacctttggtctatcatgaagaactgcatcgggagggaactgtctcgaatccctatgcctgtcaacttcaatgaacccttgtcaatgctacagagattgactgaagatctcgagtatcaccatctgctagataaggctgtacattgcacgagtagcgtggaacagatgtgcctcgttgccgctttcagcgtctcctcatactctaccacagtgcatagaatcgccaaaccctttaatcccatgctgggagagacgtttgagctggaccgcctggacgacatgggactcaggtctctttgtgagcaggtatcgcatcacccaccttccgctgcccattatgtttttagtaagcacggatggagcctgtggcaggaaattaccatctcttctaaatttcggggaaaatatatctcaattatgccccttggtgccattcatctggaatttcaggcgagtggcaaccactacgtgtggaggaagtctacgagcacggtacacaacatcatagtgggaaaactgtggatagaccagtcgggggatatcgaaatcgttaatcataagaccaacgatagatgtcagttgaaatttttgccatatagctacttttcgaaagaggccgctcgcaaagttactggagtagtgagcgacagtcaggggaaagctcattacgtgctcagcggctcttgggacgagcagatggagtgttctaaggtgatgcactcgtctccatcttcccctagctccgacgggaagcagaagaccgtctaccaaaccctgagtgccaagctgctttggaagaaataccctctgcccgagaacgccgagaatatgtactatttcagtgagttggccctgaccctaaatgagcatgaggaaggggtggctcctactgatagccgcctacggcctgaccagagactgatggaaaaaggacggtgggatgaggccaatacggaaaagcagagattggaagaaaaacagagacttagtaggcgaagaaggctcgaggcctgcgggccgggctctagctgcagctcagaagaggagaaagaggcagacgcctataccccattgtggtttgagaaacggctggatcccctaactggcgagatggcttgcgtgtacaaaggtggctattgggaagctaaggaaaaacaggattggcacatgtgccccaacatcttttag

SEQ ID NO: 102481 - DNA, 2747 bp, Artificial Sequence
  derived and/or modified sequence
catggtgaaaccccgtttctactaaaaatacaaaatttagctgggcatggtgcgggccgtggaattccagctactagggaggccaaggcaggagaatcgcttgaacctgggaagcggaggctgcagtgaaccaagatcacgccactgcattccagcctgggctaccgagtgagactcagtctcaaaaaggaaaaaaaaaaaaagcggaaaaaaaaattcgctgatgttttaaccattctggggtcacagcctcctttgttatggacctactctggaaaaatgcacagacagagaacccgaacgatgtcgtcactggcagcgaagcgccttggcatgaaccgtaggccagctggctcaggaggtggaggcggtgaggcggccacttggggccaccgcttctggcggccgcaggagcgacccacagacagaaatcagggtgaaatggcccacacgtgccgtggaaccatcaacctgtccaccgcgcacattgacacggaggactcttgtggtatcttgctgaccagtggggccaggagctaccacctcaaggccagctcagaggtggaccggcagcagtggatcaccgccctggagctggccaaggccaaggctgtccgcgtgatgaacactcattcagatgactctggggacgacgacgaggctaccaccccagccgacaagagcgagctgcaccacaccctgaagaatctttccctgaagttagatgacctcagcacgtgcaatgacctcatcgccaagcacggcgctgcactccagcgctccctgacagagctggacggcctcaagatcccatctgagagtggggagaagctgaaggtggtgaatgagcgggccaccctcttccgcatcacatccaatgctatgatcaacgcctgcagggacttcttggaactagcagagatacacagtcggaaatggcagcgggcactgcagtatgagcaggagcagcgcgtgcacttggaggaaaccattgagcagctggcgaagcagcacaacagcctcgagcgggccttccacagtgcccctggccggccggccaacccctccaagagcttcattgagggaagcctcttgactcccaaaggagaggacagtgaggaagatgaagataccgagtactttgatgccatggaagactccacatccttcatcaccgtgatcaccgaggccaaggaagacagaaaagctgaaggtagcaccgggacaagttccgtggactggagctcagcagacaatgtactagatggtgcctcgctcgtgcccaagggttcatccaaagtcaagaggcgagtccgcattcccaacaagcccaactacagccttaacctctggagcatcatgaagaactgcatcggccgggagctctccaggatccccatgccggtgaacttcaatgagcccctgtccatgctccagcggctgacagaggacctggagtaccaccacctgctggacaaggcagtgcactgcaccagctcagtggagcagatgtgcctggtggccgccttctctgtgtcctcctactccaccacagtgcaccgcatcgccaagcccttcaaccccatgctgggggagaccttcgagctggaccgcctcgacgacatgggcctgcgctccctctgtgagcaggtgagccaccaccccccctcagctgcgcactacgtgttctccaagcatggctggagcctctggcaggagatcaccatctccagcaagttccggggaaaatacatctccatcatgccgctaggtgccatccacttagaattccaggccagtgggaatcactacgtgtggaggaagagcacctcaactgttcacaacatcatcgtgggcaagctctggatcgaccagtcaggggacatcgagattgtgaaccataagaccaatgaccggtgccagctgaagttcctgccctacagctacttctccaaagaggcagcccggaaggtgacaggagtggtgagtgacagccagggcaaggcccattacgtgctgtccggctcgtgggatgaacaaatggagtgctccaaggtcatgcatagcagtcccagcagccccagctctgacgggaagcagaagacagtgtaccagaccctgtcagccaagctgctgtggaagaagtacccgctgccggagaacgcggagaacatgtactacttctcagagctggccctgaccctcaacgagcacgaggagggcgtagcgccaaccgacagccgcctgcggcccgaccagcggctgatggagaagggccgttgggacgaggccaataccgagaagcagcggctggaggagaagcagcgcctgtcgcggcgccggcggctggaggcctgcgggccgggcagcagctgcagctcggaggaagagaaggaggcggatgcctacacgccactgtggtttgagaagaggctggatccgctgaccggggagatggcctgtgtgtacaagggcggctactgggaggccaaggagaagcaagactggcatatgtgccccaacatcttctgagcgccacccttgcaacaaatacaggcgcctgcacagcctggcccacctgttcattaatgcactcaatttagtactgaatggtctttctcccagcccattcccagcccttcctatttcctttcctattttttttttctccccacactttcttgggactcccaccttggaaggaggaagggctgacctgggttctctccagcccccaggtgcgccgg

SEQ ID NO: 102482 - DNA, 2045 bp, Artificial Sequence
  derived and/or modified sequence
agcattctgagaacagcagggccacgccaggcgcctgcctctccccacagcacagccaggatggggcctggagaaggccggcagcagcagaggagaccctgggagtcagggatggacaccaggcctgcagggacttcttggaactagcagagatacacagtcggaaatggcagcgggcactgcagtatgagcaggagcagcgcgtgcacttggaggaaaccattgagcagctggcgaagcagcacaacagcctcgagcgggccttccacagtgcccctggccggccggccaacccctccaagagcttcattgagggaagcctcttgactcccaaaggagaggacagtgaggaagatgaagataccgagtactttgatgccatggaagactccacatccttcatcaccgtgatcaccgaggccaaggaagacagaaaagctgaaggtagcaccgggacaagttccgtggactggagctcagcagacaatgtactagatggtgcctcgctcgtgcccaagggttcatccaaagtcaagaggcgagtccgcattcccaacaagcccaactacagccttaacctctggagcatcatgaagaactgcatcggccgggagctctccaggatccccatgccggtgaacttcaatgagcccctgtccatgctccagcggctgacagaggacctggagtaccaccacctgctggacaaggcagtgcactgcaccagctcagtggagcagatgtgcctggtggccgccttctctgtgtcctcctactccaccacagtgcaccgcatcgccaagcccttcaaccccatgctgggggagaccttcgagctggaccgcctcgacgacatgggcctgcgctccctctgtgagcaggtgagccaccaccccccctcagctgcgcactacgtgttctccaagcatggctggagcctctggcaggagatcaccatctccagcaagttccggggaaaatacatctccatcatgccgctaggtgccatccacttagaattccaggccagtgggaatcactacgtgtggaggaagagcacctcaactgttcacaacatcatcgtgggcaagctctggatcgaccagtcaggggacatcgagattgtgaaccataagaccaatgaccggtgccagctgaagttcctgccctacagctacttctccaaagaggcagcccggaaggtgacaggagtggtgagtgacagccagggcaaggcccattacgtgctgtccggctcgtgggatgaacaaatggagtgctccaaggtcatgcatagcagtcccagcagccccagctctgacgggaagcagaagacagtgtaccagaccctgtcagccaagctgctgtggaagaagtacccgctgccggagaacgcggagaacatgtactacttctcagagctggccctgaccctcaacgagcacgaggagggcgtagcgccaaccgacagccgcctgcggcccgaccagcggctgatggagaagggccgttgggacgaggccaataccgagaagcagcggctggaggagaagcagcgcctgtcgcggcgccggcggctggaggcctgcgggccgggcagcagctgcagctcggaggaagagaaggaggcggatgcctacacgccactgtggtttgagaagaggctggatccgctgaccggggagatggcctgtgtgtacaagggcggctactgggaggccaaggagaagcaagactggcatatgtgccccaacatcttctgagcgccacccttgcaacaaatacaggcgcctgcacagcctggcccacctgttcattaatgcactcaatttagtactgaatggtctttctcccagcccattcccagcccttcctatttcctttcctattttttttttctccccacactttcttgggactcccaccttggaaggaggaagggctgacctgggttctctccagcccccaggtgcgccgggtcacccgtgccccttcattatggacctgggccctaccggaacccctgccccagttaccacaactca

SEQ ID NO: 102483 - DNA, 2253 bp, Artificial Sequence
  derived and/or modified sequence
atgcatcggcagcggactcgaaccatgtcaagcctggctgcaaaacgtttaggcatgaacaggcgccctgcgggttcagggggaggaggaggcgaggctgccacgtggggacatcgattttggagacctcaggaacgcccaaccgacaggaaccagggggaaatggcacacacctgccgcggaactataaatctgtcaaccgcccacatcgatacggaagattcatgtgggatattgctgaccagtggagccagatcctaccacctaaaggccagtagcgaggtcgatagacagcaatggatcacagcactcgagctggctaaggctaaagccgtgagggtgatgaacactcacagcgatgattccggagatgatgatgaggccaccacgcccgctgacaaatccgaattgcaccataccctcaagaatctgtctctgaaactagacgacctgtccacctgcaacgatttaatcgccaagcacggagctgcgctgcagcggagcctcactgaattggacggcctcaagatcccaagcgagagcggcgagaagctcaaagtcgtaaatgagagggctactctgtttaggattacctccaatgctatgatcaatgcctgtagggattttctggaattggccgagatccactctcggaagtggcagcgggctctgcagtatgagcaagagcagcgcgtgcatcttgaggagaccatcgagcaactcgccaagcaacataactcgctggaaagggcattccattcggcccctggaagaccagccaacccttcaaaaagttttatcgaaggatcactccttaccccaaagggcgaagacagtgaagaagatgaagacacagaatactttgacgccatggaagactctaccagttttattactgtgattacggaagccaaggaagataggaaagccgaagggagcaccggcaccagctctgtggactggtcatcagctgacaacgtgctcgacggcgcttcactggtgccaaagggatccagtaaagtgaaacgtagagtgcggatcccaaataagccaaattatagcctgaatctttggtcgattatgaaaaactgcatcggacgcgaactatcgagaattccgatgcctgtcaatttcaacgaacccctgtccatgctgcaaaggttgaccgaggacctggagtaccatcatctcttagacaaggccgtgcattgtacatcaagtgtcgaacagatgtgtctggtagcagcattttccgtctcgtcctacagtacaacagtgcatcgaatcgctaagccctttaaccccatgttgggcgagactttcgagctggaccgactcgacgatatgggactgcgctcactttgtgaacaggttagccaccatccaccttccgctgctcactatgtgttcagcaagcatgggtggtctctgtggcaggagatcaccatttcgtctaaattccgcggaaaatacatctctattatgcctctcggcgcaatccacttagagtttcaggcatccggcaaccactatgtttggcgcaagtccacttcaaccgtacataacatcattgtgggcaagctgtggatagatcagtctggcgatatagagattgtaaatcacaagaccaacgatcggtgccagctcaagttcctgccttactcatacttctcaaaagaagccgcaagaaaagttactggggtggtcagcgactctcagggaaaggcacattacgtgctcagcgggtcatgggatgagcagatggagtgctcgaaagtaatgcactcgtctccctcttccccctcttcagatgggaagcagaagacagtctatcaaaccctgtccgccaagttactgtggaaaaagtacccactcccggaaaacgctgaaaacatgtattacttctcagagctggctttaactctgaatgaacacgaagagggtgtcgctcctactgactcccggctgcgccctgaccagcggctgatggagaaggggcgatgggacgaagccaacactgagaaacagcgcctggaagaaaaacaacgactctccagaaggagacgcctggaggcttgtggcccaggtagcagctgctcgtccgaggaggagaaagaggcggatgcctacacccctctctggttcgagaagcggttagatccgctgactggggagatggcatgtgtttataaagggggttactgggaggcaaaggagaagcaggattggcacatgtgtccgaatatcttctag

SEQ ID NO: 102484 - DNA, 1383 bp, Artificial Sequence
  derived and/or modified sequence
atggaagactctacctccttcatcactgtcattactgaggccaaagaagatagaaaggcggaaggtagcaccggcaccagctccgtggactggtcctcagctgacaatgtgctcgacggagcctctttggtgcctaagggatccagcaaagtaaaacggagggtcagaatccctaataaacctaattatagtctgaacctgtggtcaattatgaagaactgcataggaagggaattgagccggatcccaatgcccgtcaattttaatgaacctttgagtatgctccaacggctcactgaggatttggagtaccatcacttactggataaggccgtgcactgcacatcttcagtcgagcaaatgtgtttggtggcagcctttagtgtttcttcgtacagtaccacagttcaccgcatagctaagccctttaaccccatgttaggcgagactttcgagttagacaggctcgatgatatgggcctccgcagcttgtgcgagcaagtgagtcaccatccaccgagcgcagcgcattatgtgttctccaagcacgggtggtccctctggcaggaaatcactatctcctccaaattcaggggcaagtacataagtattatgcccctcggggctattcacctggaatttcaggcgtcgggtaaccattacgtgtggcgcaaaagcaccagtaccgtccacaacatcatagtaggtaagctgtggattgaccaatccggtgatatcgagatcgttaaccacaagacaaatgacagatgccagttaaaattcttgccttacagctacttctcaaaagaggctgctcgcaaggtgactggcgttgtgtctgacagccaggggaaggcccattacgttttgtcaggatcttgggacgaacagatggaatgctcaaaagtgatgcatagcagcccaagctcgccttccagtgacgggaagcagaagacagtatatcagactcttagcgctaaactgctttggaaaaagtatcctctaccagaaaacgcagaaaacatgtattacttttccgaactcgccctgacgttaaatgagcacgaagagggcgttgctccaaccgactctcggctgagacccgatcagaggctaatggagaagggcagatgggatgaggctaatactgaaaaacagcgcttggaagagaagcagcggttgtccaggaggcggaggctcgaagcctgcggccctggcagtagctgttccagtgaggaggaaaaagaagctgatgcgtatacccccctatggttcgagaagagactcgacccattaactggggaaatggcctgcgtctacaaaggcggttactgggaggccaaggagaaacaagactggcacatgtgccccaatatcttctag

SEQ ID NO: 102485 - DNA, 2253 bp, Artificial Sequence
  derived and/or modified sequence
atgcacagacagagaaccagaaccatgagcagcctggccgccaagagactgggcatgaacagaagacccgccggcagcggcggcggcggcggcgaggccgccacctggggccacagattctggagaccccaggagagacccaccgacagaaaccagggcgagatggcccacacctgcagaggcaccatcaacctgagcaccgcccacatcgacaccgaggacagctgcggcatcctgctgaccagcggcgccagaagctaccacctgaaggccagcagcgaggtggacagacagcagtggatcaccgccctggagctggccaaggccaaggccgtgagagtgatgaacacccacagcgacgacagcggcgacgacgacgaggccaccacccccgccgacaagagcgagctgcaccacaccctgaagaacctgagcctgaagctggacgacctgagcacctgcaacgacctgatcgccaagcacggcgccgccctgcagagaagcctgaccgagctggacggcctgaagatccccagcgagagcggcgagaagctgaaggtggtgaacgagagagccaccctgttcagaatcaccagcaacgccatgatcaacgcctgcagagacttcctggagctggccgagatccacagcagaaagtggcagagagccctgcagtacgagcaggagcagagagtgcacctggaggagaccatcgagcagctggccaagcagcacaacagcctggagagagccttccacagcgcccccggcagacccgccaaccccagcaagagcttcatcgagggcagcctgctgacccccaagggcgaggacagcgaggaggacgaggacaccgagtacttcgacgccatggaggacagcaccagcttcatcaccgtgatcaccgaggccaaggaggacagaaaggccgagggcagcaccggcaccagcagcgtggactggagcagcgccgacaacgtgctggacggcgccagcctggtgcccaagggcagcagcaaggtgaagagaagagtgagaatccccaacaagcccaactacagcctgaacctgtggagcatcatgaagaactgcatcggcagagagctgagcagaatccccatgcccgtgaacttcaacgagcccctgagcatgctgcagagactgaccgaggacctggagtaccaccacctgctggacaaggccgtgcactgcaccagcagcgtggagcagatgtgcctggtggccgccttcagcgtgagcagctacagcaccaccgtgcacagaatcgccaagcccttcaaccccatgctgggcgagaccttcgagctggacagactggacgacatgggcctgagaagcctgtgcgagcaggtgagccaccacccccccagcgccgcccactacgtgttcagcaagcacggctggagcctgtggcaggagatcaccatcagcagcaagttcagaggcaagtacatcagcatcatgcccctgggcgccatccacctggagttccaggccagcggcaaccactacgtgtggagaaagagcaccagcaccgtgcacaacatcatcgtgggcaagctgtggatcgaccagagcggcgacatcgagatcgtgaaccacaagaccaacgacagatgccagctgaagttcctgccctacagctacttcagcaaggaggccgccagaaaggtgaccggcgtggtgagcgacagccagggcaaggcccactacgtgctgagcggcagctgggacgagcagatggagtgcagcaaggtgatgcacagcagccccagcagccccagcagcgacggcaagcagaagaccgtgtaccagaccctgagcgccaagctgctgtggaagaagtaccccctgcccgagaacgccgagaacatgtactacttcagcgagctggccctgaccctgaacgagcacgaggagggcgtggcccccaccgacagcagactgagacccgaccagagactgatggagaagggcagatgggacgaggccaacaccgagaagcagagactggaggagaagcagagactgagcagaagaagaagactggaggcctgcggccccggcagcagctgcagcagcgaggaggagaaggaggccgacgcctacacccccctgtggttcgagaagagactggaccccctgaccggcgagatggcctgcgtgtacaagggcggctactgggaggccaaggagaagcaggactggcacatgtgccccaacatcttctag

SEQ ID NO: 102486 - DNA, 1383 bp, Artificial Sequence
  derived and/or modified sequence
atggaggacagcaccagcttcatcaccgtgatcaccgaggccaaggaggacagaaaggccgagggcagcaccggcaccagcagcgtggactggagcagcgccgacaacgtgctggacggcgccagcctggtgcccaagggcagcagcaaggtgaagagaagagtgagaatccccaacaagcccaactacagcctgaacctgtggagcatcatgaagaactgcatcggcagagagctgagcagaatccccatgcccgtgaacttcaacgagcccctgagcatgctgcagagactgaccgaggacctggagtaccaccacctgctggacaaggccgtgcactgcaccagcagcgtggagcagatgtgcctggtggccgccttcagcgtgagcagctacagcaccaccgtgcacagaatcgccaagcccttcaaccccatgctgggcgagaccttcgagctggacagactggacgacatgggcctgagaagcctgtgcgagcaggtgagccaccacccccccagcgccgcccactacgtgttcagcaagcacggctggagcctgtggcaggagatcaccatcagcagcaagttcagaggcaagtacatcagcatcatgcccctgggcgccatccacctggagttccaggccagcggcaaccactacgtgtggagaaagagcaccagcaccgtgcacaacatcatcgtgggcaagctgtggatcgaccagagcggcgacatcgagatcgtgaaccacaagaccaacgacagatgccagctgaagttcctgccctacagctacttcagcaaggaggccgccagaaaggtgaccggcgtggtgagcgacagccagggcaaggcccactacgtgctgagcggcagctgggacgagcagatggagtgcagcaaggtgatgcacagcagccccagcagccccagcagcgacggcaagcagaagaccgtgtaccagaccctgagcgccaagctgctgtggaagaagtaccccctgcccgagaacgccgagaacatgtactacttcagcgagctggccctgaccctgaacgagcacgaggagggcgtggcccccaccgacagcagactgagacccgaccagagactgatggagaagggcagatgggacgaggccaacaccgagaagcagagactggaggagaagcagagactgagcagaagaagaagactggaggcctgcggccccggcagcagctgcagcagcgaggaggagaaggaggccgacgcctacacccccctgtggttcgagaagagactggaccccctgaccggcgagatggcctgcgtgtacaagggcggctactgggaggccaaggagaagcaggactggcacatgtgccccaacatcttctag

SEQ ID NO: 102487 - protein, 460 aa, Artificial Sequence
  derived and/or modified sequence
MEDSTSFITVITEAKEDRKAEGSTGTSSVDWSSADNVLDGASLVPKGSSKVKRRVRIPNKPNYSLNLWSIMKNCIGRELSRIPMPVNFNEPLSMLQRLTEDLEYHHLLDKAVHCTSSVEQMCLVAAFSVSSYSTTVHRIAKPFNPMLGETFELDRLDDMGLRSLCEQVSHHPPSAAHYVFSKHGWSLWQEITISSKFRGKYISIMPLGAIHLEFQASGNHYVWRKSTSTVHNIIVGKLWIDQSGDIEIVNHKTNDRCQLKFLPYSYFSKEAARKVTGVVSDSQGKAHYVLSGSWDEQMECSKVMHSSPSSPSSDGKQKTVYQTLSAKLLWKKYPLPENAENMYYFSELALTLNEHEEGVAPTDSRLRPDQRLMEKGRWDEANTEKQRLEEKQRLSRRRRLEACGPGSSCSSEEEKEADAYTPLWFEKRLDPLTGEMACVYKGGYWEAKEKQDWHMCPNIF

SEQ ID NO: 102488 - protein, 659 aa, Artificial Sequence
  derived and/or modified sequence
MKGRGCWDTASVRSFCSSGCLNKFKKDDSGDDDEATTPADKSELHHTLKNLSLKLDDLSTCNDLIAKHGAALQRSLTELDGLKIPSESGEKLKVVNERATLFRITSNAMINACRDFLELAEIHSRKWQRALQYEQEQRVHLEETIEQLAKQHNSLERAFHSAPGRPANPSKSFIEGSLLTPKGEDSEEDEDTEYFDAMEDSTSFITVITEAKEDSRKAEGSTGTSSVDWSSADNVLDGASLVPKGSSKVKRRVRIPNKPNYSLNLWSIMKNCIGRELSRIPMPVNFNEPLSMLQRLTEDLEYHHLLDKAVHCTSSVEQMCLVAAFSVSSYSTTVHRIAKPFNPMLGETFELDRLDDMGLRSLCEQVSHHPPSAAHYVFSKHGWSLWQEITISSKFRGKYISIMPLGAIHLEFQASGNHYVWRKSTSTVHNIIVGKLWIDQSGDIEIVNHKTNDRCQLKFLPYSYFSKEAARKVTGVVSDSQGKAHYVLSGSWDEQMECSKVMHSSPSSPSSDGKQKTVYQTLSAKLLWKKYPLPENAENMYYFSELALTLNEHEEGVAPTDSRLRPDQRLMEKGRWDEANTEKQRLEEKQRLSRRRRLEACGPGSSCSSEEAEKEADAYTPLWFEKRLDPLTGEMACVYKGGYWEAKEKQDWHMCPNIF

SEQ ID NO: 102489 - DNA, 1980 bp, Artificial Sequence
  derived and/or modified sequence
atgaaaggacggggatgctgggatactgcttctgtccggtcattttgctcaagcggttgcctgaacaaatttaaaaaggacgactcaggggacgatgatgaggcaactactccagccgacaagtctgagctgcaccacacattgaagaacctatccctgaaactggacgatctcagtacgtgtaatgatctgatcgccaaacatggtgccgccctgcagagaagtctgaccgaactggacggcctcaagattccctccgaatccggagaaaagcttaaagtggtcaacgagcgtgccacactcttcaggattaccagcaacgccatgatcaacgcctgccgggacttcttagaactggctgagatccattcgaggaaatggcaacgggccctgcaatatgaacaggagcagcgagtgcacctcgaggaaacaatcgagcagctcgcaaagcagcataattcattggaacgcgcctttcattcagcacctggacgtccagcaaacccgtcaaagagcttcatcgaagggtccctgttgacaccgaaaggcgaagattctgaggaggatgaagacaccgagtattttgatgccatggaggattctacctcttttattaccgtgataactgaagccaaggaagacagcaggaaggccgaaggcagcaccgggacctccagcgtcgactggagcagcgctgataacgttctggatggggcttctttagttcccaaggggtcaagcaaagtcaaacgacgcgtgcgtattcctaacaagccaaattactctttgaatctgtggagcataatgaaaaattgcattggaagggaactttctagaatccctatgccagttaatttcaatgagccattatcaatgctgcagaggcttactgaggacctggaataccaccatctgttggataaggcagtccattgtacatcaagtgtggagcagatgtgcctggtggcagcgtttagcgtgagtagttattctacgaccgtccaccggatcgctaagccttttaatcccatgcttggtgagacatttgaactggaccggcttgatgatatgggtctgagatcattatgtgaacaggtaagccatcaccccccgtctgctgcacactatgtgttcagtaaacacgggtggagcctgtggcaggagatcacgatttcgagcaaattcagaggtaaatacatatccattatgccactgggcgcgattcacctagaatttcaggcatctggcaatcactacgtctggagaaagagtacctccacggtgcacaatatcatagtgggaaaactctggatcgatcagtcaggggatattgaaatcgtgaaccacaagaccaatgaccgatgccaactaaagtttctgccttactcttatttcagcaaggaagcggcgcgcaaagttaccggggtggtctcagattcccaaggaaaggcacattacgtgctcagcggctcatgggacgaacagatggagtgctccaaagtgatgcactccagcccatcttccccatcctctgacggcaaacagaagacggtgtaccagacactatcggccaaactgctgtggaagaagtaccctctgccagaaaacgccgagaacatgtattacttttccgagttggccctgactctgaatgagcatgaagagggcgttgccccaacagattccaggctgcggcccgaccagagattgatggagaaaggtcgctgggacgaggccaataccgagaagcaacggctggaagagaagcagcgcctcagtcgccgccgtcggctcgaagcatgtggcccagggagttcttgttcttcggaagaagcagagaaggaggccgacgcttacaccccactgtggttcgagaagaggctggatcctctgacaggtgaaatggcatgtgtctacaaagggggttactgggaggccaaggagaaacaggattggcacatgtgtcctaacatcttttag

SEQ ID NO: 102490 - DNA, 1980 bp, Artificial Sequence
  derived and/or modified sequence
atgaagggccggggctgctgggacacagcctctgtgcgctccttctgcagcagcggctgcctgaacaagttcaagaaggatgattctggagatgatgatgaggccaccaccccagctgacaagtctgagctgcaccacaccctgaagaacctgagcctgaagctggatgacctgagcacctgcaatgacctgattgccaagcacggggccgccctgcagaggagcctgacagagctggatggcctgaagatccccagcgagagcggggagaagctgaaggtggtgaatgaaagagccaccctcttccgcatcaccagcaatgccatgatcaatgcctgccgggacttcctggagctggccgagatccacagcaggaagtggcagagggccctgcagtatgagcaggagcagagggtgcacctggaggagaccatcgagcagctggccaagcagcacaacagcctggagcgggccttccacagcgcccctggccggcctgccaaccccagcaagagcttcatcgagggcagcctgctgacccccaagggggaggacagcgaggaggatgaggacacagagtactttgatgccatggaggacagcaccagcttcatcaccgtcatcacagaggccaaggaggacagcaggaaggccgagggcagcacaggcaccagctctgtggactggagcagcgctgacaacgtgctggatggagccagcctggtgcccaagggcagcagcaaggtgaagagaagagtgcgcatccccaacaagcccaactacagcctgaacctgtggagcatcatgaagaactgcatcggccgggagctgagccgcatccccatgcctgtgaacttcaatgagcccctgtccatgctgcagaggctgacagaggacctggagtaccaccacctgctggacaaggctgtgcactgcaccagctctgtggagcagatgtgcctggtggccgccttctctgtgtcctcctacagcaccaccgtgcacagaattgccaagcccttcaaccccatgctgggggagacctttgagctggaccggctggatgacatgggcctgcggagcctgtgtgagcaggtgagccaccacccccccagcgctgcccactacgtgttcagcaagcacggctggagcctgtggcaggagatcaccatcagcagcaagttccggggcaagtacatcagcatcatgcccctgggcgccatccacctggagttccaggccagcggcaaccactacgtgtggaggaagagcaccagcacagtgcacaacatcatcgtgggcaagctgtggattgaccagagcggggacatcgagatcgtgaaccacaagaccaatgaccgctgccagctgaagttcctgccctacagctacttcagcaaggaggccgccaggaaggtgactggagtggtgtctgacagccagggcaaggcccactacgtgctgagcggctcctgggatgagcagatggagtgcagcaaggtgatgcacagcagccccagcagccccagcagtgatggcaagcagaagacagtgtaccagaccctgagcgccaagctgctgtggaagaagtaccccctgcctgaaaatgctgagaacatgtactacttcagcgagctggccctgaccctgaatgaacatgaggagggcgtggcccccacagacagccggctgcggccagaccagaggctgatggagaagggccgctgggatgaggccaacacagagaagcagaggctggaggagaagcagaggctgagcagaagaagaaggctggaggcctgtggccctggcagcagctgcagcagcgaggaggccgagaaggaggctgatgcctacacccccctgtggtttgagaagaggctggaccccctgaccggggagatggcctgtgtgtacaagggcggctactgggaggccaaggagaagcaggactggcacatgtgccccaacatcttctag

SEQ ID NO: 102491 - DNA, 1980 bp, Artificial Sequence
  derived and/or modified sequence
atgaagggccggggctgctgggacaccgccagcgtgcggagcttctgttctagcggatgtcttaataagttcaaaaaggacgatagtggcgacgatgatgaggctacgacccccgctgataaatccgagctccatcatactcttaagaatctgagcctcaaacttgacgatctttctacttgtaacgatctgattgctaaacacggcgccgcactgcagagaagcctgacggagctcgatggcttaaagatcccgagcgagtcaggcgagaaactgaaggtcgtgaacgagagggctaccctgtttaggattactagcaacgcaatgatcaacgcatgtagagacttcctggagttggctgaaatccactccaggaagtggcagagggcactccaatatgagcaggagcagcgcgtacatctggaggagacaatcgagcagttagccaaacagcacaattctctcgagcgcgcttttcactctgcgccaggtcgtccggctaacccatcaaaatcatttatcgaagggagcctcctgacacctaagggcgaagatagcgaggaggatgaagatacagagtacttcgacgccatggaggatagcacaagtttcatcaccgtcatcaccgaagcaaaggaggattctcggaaggcagaggggtctaccggaacttcatctgtggactggagtagcgccgataatgtgttagacggggcgtcgctcgtccccaaaggaagctctaaggttaagagacgtgtgcggatccctaacaaacctaactactccctcaatctctggtcaattatgaaaaattgtatagggagagaactgtctcggattccaatgcccgtgaactttaacgaaccgttgagcatgctccagagactcacagaagacctggaatatcatcacttgctagataaggcagtccactgtaccagctcagtggagcagatgtgcctggtggctgccttttccgtgtcttcatatagcaccactgtgcacaggatagcgaaaccttttaacccaatgctgggggagacctttgaactggatcggcttgatgatatggggctgaggtccctgtgcgagcaggtgagccatcaccctccgagcgctgcccactatgtcttcagtaagcatgggtggtcattgtggcaagaaattacgattagctccaagtttcggggcaaatacatttccatcatgcctctcggagctattcatctggagtttcaagcaagcggtaatcactacgtgtggcggaagtctacatccaccgttcataacatcattgtcgggaaattatggattgaccagtctggtgacatcgagatcgttaatcacaagaccaacgaccgctgtcagttgaagttcctgccatattcctactttagtaaagaagccgcaaggaaggtcacaggcgtggtcagtgacagccagggcaaggcccattatgtcctgtcgggcagttgggacgagcagatggagtgctctaaggtcatgcactcatcgcccagcagcccctcaagcgatggcaagcagaagacggtgtaccagacccttagtgcaaaactgctgtggaaaaaatatcccctccccgagaacgcggagaacatgtattactttagcgaactggcgctaactctcaatgaacatgaagaaggcgtggcccctactgatagtcgccttaggcctgaccagagactcatggagaaaggaagatgggacgaagctaacacggagaaacaacgccttgaagaaaaacaaaggcttagccgtcgtagacgcctcgaggcttgcggccccggaagctcttgtagcagcgaggaggcggagaaggaggcagacgcttacacccccctgtggtttgagaaacggcttgatccactgacaggggagatggcctgcgtctacaaaggcgggtactgggaggccaaagagaaacaggactggcacatgtgtcccaatatcttctag

SEQ ID NO: 102492 - DNA, 2470 bp, Artificial Sequence
  derived and/or modified sequence
gagtgtccgccgcctccgccgggcggcccaccgagctgtgcacgcgtccgtgcaagcccccgggacccggcgccatgtagcgccccgccgattggaggctgccccgccgcgggaaatgaagggacgcggctgctgggacacggcctccgtgcgctccttctgcagctccggctgcctgaataaatttaagaaggatgactctggggacgacgacgaggctaccaccccagccgacaagagcgagctgcaccacaccctgaagaatctttccctgaagttagatgacctcagcacgtgcaatgacctcatcgccaagcacggcgctgcactccagcgctccctgacagagctggacggcctcaagatcccatctgagagtggggagaagctgaaggtggtgaatgagcgggccaccctcttccgcatcacatccaatgctatgatcaacgcctgcagggacttcttggaactagcagagatacacagtcggaaatggcagcgggcactgcagtatgagcaggagcagcgcgtgcacttggaggaaaccattgagcagctggcgaagcagcacaacagcctcgagcgggccttccacagtgcccctggccggccggccaacccctccaagagcttcattgagggaagcctcttgactcccaaaggagaggacagtgaggaagatgaagataccgagtactttgatgccatggaagactccacatccttcatcaccgtgatcaccgaggccaaggaagacagcagaaaagctgaaggtagcaccgggacaagttccgtggactggagctcagcagacaatgtactagatggtgcctcgctcgtgcccaagggttcatccaaagtcaagaggcgagtccgcattcccaacaagcccaactacagccttaacctctggagcatcatgaagaactgcatcggccgggagctctccaggatccccatgccggtgaacttcaatgagcccctgtccatgctccagcggctgacagaggacctggagtaccaccacctgctggacaaggcagtgcactgcaccagctcagtggagcagatgtgcctggtggccgccttctctgtgtcctcctactccaccacagtgcaccgcatcgccaagcccttcaaccccatgctgggggagaccttcgagctggaccgcctcgacgacatgggcctgcgctccctctgtgagcaggtgagccaccaccccccctcagctgcgcactacgtgttctccaagcatggctggagcctctggcaggagatcaccatctccagcaagttccggggaaaatacatctccatcatgccgctaggtgccatccacttagaattccaggccagtgggaatcactacgtgtggaggaagagcacctcaactgttcacaacatcatcgtgggcaagctctggatcgaccagtcaggggacatcgagattgtgaaccataagaccaatgaccggtgccagctgaagttcctgccctacagctacttctccaaagaggcagcccggaaggtgacaggagtggtgagtgacagccagggcaaggcccattacgtgctgtccggctcgtgggatgaacaaatggagtgctccaaggtcatgcatagcagtcccagcagccccagctctgacgggaagcagaagacagtgtaccagaccctgtcagccaagctgctgtggaagaagtacccgctgccggagaacgcggagaacatgtactacttctcagagctggccctgaccctcaacgagcacgaggagggcgtagcgccaaccgacagccgcctgcggcccgaccagcggctgatggagaagggccgttgggacgaggccaataccgagaagcagcggctggaggagaagcagcgcctgtcgcggcgccggcggctggaggcctgcgggccgggcagcagctgcagctcggaggaagcagagaaggaggcggatgcctacacgccactgtggtttgagaagaggctggatccgctgaccggggagatggcctgtgtgtacaagggcggctactgggaggccaaggagaagcaagactggcatatgtgccccaacatcttctgagcgccacccttgcaacaaatacaggcgcctgcacagcctggcccacctgttcattaatgcactcaatttagtactgaatggtctttctcccagcccattcccagcccttcctatttcctttcctattttttttttctccccacactttcttgggactcccaccttggaaggaggaagggctgacctgggttctctccagcccccaggtgcgccgggtcacccgtgccccttcattatggacctgggccctaccggaacccctgccccagttaccacaactcaggccggctggcccgggccatgggctgcgcaaatcaccagcccccaacccagggaggaactggcccctcctagggagcctcttcgactttttta

SEQ ID NO: 102493 - DNA, 1980 bp, Artificial Sequence
  derived and/or modified sequence
atgaaggggaggggctgttgggataccgcttccgtgcgctctttctgttcatccggttgtttgaacaagtttaagaaagatgattcaggggatgatgacgaagccactacacccgcagataaaagtgaacttcaccacaccctgaagaacttgagcttaaaattagacgacctcagcacgtgtaacgatttgatcgctaaacatggagcagccctgcagcggagcctcacagagctggatggccttaagatcccatccgagagcggggagaaactgaaggtggttaatgagagggctacgttattccgaatcacatctaacgccatgatcaatgcctgccgagatttcctcgaacttgccgaaatccacagccggaagtggcagagagccctgcagtacgaacaggagcagcgggtgcatcttgaggagacgattgaacagctcgccaagcagcataactcccttgagagggccttccattccgccccagggaggccagccaatccgtcgaagtcttttatcgagggctctcttctgactcctaaaggggaggacagtgaagaggacgaggatacagaatatttcgatgcaatggaagattcaacatcctttatcaccgtcattacagaagctaaagaggacagcaggaaagccgagggatcaacaggcactagctcagttgactggagtagcgcagataacgtccttgatggagcatcattagtacccaagggtagctcaaaagtgaaacgccgagtgcggattccgaataagcccaattacagtctcaatttatggtcaatcatgaaaaattgcattggccgtgaactctccaggatccccatgcccgttaactttaacgaacccctgagtatgctgcaaaggctcaccgaggacctggaataccaccatctcctggacaaagcggttcattgtaccagcagcgtcgagcagatgtgtctcgtcgccgcatttagtgtgtcttcttactctactacagtgcataggatagccaaaccttttaaccctatgctaggggaaacatttgagctcgatcgtctggacgacatgggcctcagaagcttgtgcgagcaagtcagtcatcatcctccgtctgccgctcactacgttttttccaagcatggttggagcctgtggcaggagatcacgatctcctccaaattcaggggaaagtatatcagcatcatgcccctaggagcaattcacctggaattccaggcgagtggtaatcactatgtctggaggaaatctactagtacagtgcacaacatcatcgtgggtaagctgtggattgaccagagcggtgatatcgagattgtgaatcacaagactaacgataggtgtcaacttaagttcctaccttactcttatttctcgaaggaggccgcacgaaaagtaaccggagtggtgagtgattctcagggcaaggctcactatgttctctccggctcttgggacgaacagatggaatgttccaaggtcatgcactctagcccatcatccccctcatctgacgggaagcagaaaacagtatatcagacgttgagcgccaagcttctgtggaaaaaatatcctctacccgagaatgcagagaacatgtactatttctctgagctcgccttgaccctaaatgagcatgaagagggagttgcaccaacagactcccggttgcggcctgatcagagactgatggaaaaaggccgatgggacgaggccaataccgaaaaacagaggttagaagaaaagcaaaggctctctaggcgcaggagattagaggcctgcggtcctgggagttcatgtagtagcgaagaagccgaaaaggaagccgacgcctatacacccctttggtttgagaagcggttagatcccttaacgggggagatggcttgtgtgtacaaaggtggctattgggaggcaaaggagaagcaggactggcatatgtgtcccaatatattctag

SEQ ID NO: 102494 - DNA, 1980 bp, Artificial Sequence
  derived and/or modified sequence
atgaagggcagaggctgctgggacaccgccagcgtgagaagcttctgcagcagcggctgcctgaacaagttcaagaaggacgacagcggcgacgacgacgaggccaccacccccgccgacaagagcgagctgcaccacaccctgaagaacctgagcctgaagctggacgacctgagcacctgcaacgacctgatcgccaagcacggcgccgccctgcagagaagcctgaccgagctggacggcctgaagatccccagcgagagcggcgagaagctgaaggtggtgaacgagagagccaccctgttcagaatcaccagcaacgccatgatcaacgcctgcagagacttcctggagctggccgagatccacagcagaaagtggcagagagccctgcagtacgagcaggagcagagagtgcacctggaggagaccatcgagcagctggccaagcagcacaacagcctggagagagccttccacagcgcccccggcagacccgccaaccccagcaagagcttcatcgagggcagcctgctgacccccaagggcgaggacagcgaggaggacgaggacaccgagtacttcgacgccatggaggacagcaccagcttcatcaccgtgatcaccgaggccaaggaggacagcagaaaggccgagggcagcaccggcaccagcagcgtggactggagcagcgccgacaacgtgctggacggcgccagcctggtgcccaagggcagcagcaaggtgaagagaagagtgagaatccccaacaagcccaactacagcctgaacctgtggagcatcatgaagaactgcatcggcagagagctgagcagaatccccatgcccgtgaacttcaacgagcccctgagcatgctgcagagactgaccgaggacctggagtaccaccacctgctggacaaggccgtgcactgcaccagcagcgtggagcagatgtgcctggtggccgccttcagcgtgagcagctacagcaccaccgtgcacagaatcgccaagcccttcaaccccatgctgggcgagaccttcgagctggacagactggacgacatgggcctgagaagcctgtgcgagcaggtgagccaccacccccccagcgccgcccactacgtgttcagcaagcacggctggagcctgtggcaggagatcaccatcagcagcaagttcagaggcaagtacatcagcatcatgcccctgggcgccatccacctggagttccaggccagcggcaaccactacgtgtggagaaagagcaccagcaccgtgcacaacatcatcgtgggcaagctgtggatcgaccagagcggcgacatcgagatcgtgaaccacaagaccaacgacagatgccagctgaagttcctgccctacagctacttcagcaaggaggccgccagaaaggtgaccggcgtggtgagcgacagccagggcaaggcccactacgtgctgagcggcagctgggacgagcagatggagtgcagcaaggtgatgcacagcagccccagcagccccagcagcgacggcaagcagaagaccgtgtaccagaccctgagcgccaagctgctgtggaagaagtaccccctgcccgagaacgccgagaacatgtactacttcagcgagctggccctgaccctgaacgagcacgaggagggcgtggcccccaccgacagcagactgagacccgaccagagactgatggagaagggcagatgggacgaggccaacaccgagaagcagagactggaggagaagcagagactgagcagaagaagaagactggaggcctgcggccccggcagcagctgcagcagcgaggaggccgagaaggaggccgacgcctacacccccctgtggttcgagaagagactggaccccctgaccggcgagatggcctgcgtgtacaagggcggctactgggaggccaaggagaagcaggactggcacatgtgccccaacatcttctag

SEQ ID NO: 102495 - protein, 865 aa, Artificial Sequence
  derived and/or modified sequence
MGKKIKKEVEPPPKDVFDPLMIESKKAATVVLMLNSPEEEILAKACEAIYKFALKGEENKTTLLELGAVEPLTKLLTHEDKIVRRNATMIFGILASNNDVKKLLRELDVMNSVIAQLAPEEEVVIHEFASLCLANMSAEYTSKVQIFEHGGLEPLIRLLSSPDPDVKKNSMECIYNLVQDFQCRAKLQELNAIPPILDLLKSEYPVIQLLALKTLGVIANDKESRTMLRDNQGLDHLIKILETKELNDLHIEALAVIANCLEDMDTMVQIQQTGGLKKLLSFAENSTIPDIQKNAAKAITKAAYDPENRKLFHEQEVEKCLVALLGSENDGTKIAASQAISAMCENSGSKDFFNNQGIPQLIQLLKSDNEEVREAAALALANLTTCNPANANAAAEADGIDPLINLLSSKRDGAIANAATVLTNMAMQEPLRLNIQNHDIMHAIISPLRSANTVVQSKAALAVTATACDVEARTELRNSGGLEPLVELLRSKNDEVRKHASWAVMVCAGDELTANELCRLGALDILEEVNVSGTRKNKFSEAAYNKLLNNNLSLKYSQTGYLSSSNIINDGFYDYGRINPGTKLLPLKELCLQEPSDLRAVLLINSKSYVSPPSSMEDKSDVGYGRSISSSSSLRRSSKEKNNAGFGSPIEDKSEPASGRNTVLSKSATKEKGWRKSKGKKEEEKVKEEEEVMVVPKFVGEGSSDKEWCPPSDPDFSMYVYEVTKSILPITNIKEQIEDLAKYVAEKMGGKIPKEKLPDFSWELHISELKFQLKSNVIPIGHVKKGIFYHRALLFKALADRIGIGCSLVRGEYGRAWNEVMLQNDSRKGVIGGLPAPEMYVIDLMFHPGGLMKLRSREADLYRFI

SEQ ID NO: 102496 - DNA, 2598 bp, Artificial Sequence
  derived and/or modified sequence
atgggcaagaagatcaagaaggaggtggagcccccccccaaggacgtgttcgaccccctgatgatcgagagcaagaaggccgccaccgtggtgctgatgctgaacagccccgaggaggagatcctggccaaggcctgcgaggccatctacaagttcgccctgaagggcgaggagaacaagaccaccctgctggagctgggcgccgtggagcccctgaccaagctgctgacccacgaggacaagatcgtgagaagaaacgccaccatgatcttcggcatcctggccagcaacaacgacgtgaagaagctgctgagagagctggacgtgatgaacagcgtgatcgcccagctggcccccgaggaggaggtggtgatccacgagttcgccagcctgtgcctggccaacatgagcgccgagtacaccagcaaggtgcagatcttcgagcacggcggcctggagcccctgatcagactgctgagcagccccgaccccgacgtgaagaagaacagcatggagtgcatctacaacctggtgcaggacttccagtgcagagccaagctgcaggagctgaacgccatcccccccatcctggacctgctgaagagcgagtaccccgtgatccagctgctggccctgaagaccctgggcgtgatcgccaacgacaaggagagcagaaccatgctgagagacaaccagggcctggaccacctgatcaagatcctggagaccaaggagctgaacgacctgcacatcgaggccctggccgtgatcgccaactgcctggaggacatggacaccatggtgcagatccagcagaccggcggcctgaagaagctgctgagcttcgccgagaacagcaccatccccgacatccagaagaacgccgccaaggccatcaccaaggccgcctacgaccccgagaacagaaagctgttccacgagcaggaggtggagaagtgcctggtggccctgctgggcagcgagaacgacggcaccaagatcgccgccagccaggccatcagcgccatgtgcgagaacagcggcagcaaggacttcttcaacaaccagggcatcccccagctgatccagctgctgaagagcgacaacgaggaggtgagagaggccgccgccctggccctggccaacctgaccacctgcaaccccgccaacgccaacgccgccgccgaggccgacggcatcgaccccctgatcaacctgctgagcagcaagagagacggcgccatcgccaacgccgccaccgtgctgaccaacatggccatgcaggagcccctgagactgaacatccagaaccacgacatcatgcacgccatcatcagccccctgagaagcgccaacaccgtggtgcagagcaaggccgccctggccgtgaccgccaccgcctgcgacgtggaggccagaaccgagctgagaaacagcggcggcctggagcccctggtggagctgctgagaagcaagaacgacgaggtgagaaagcacgccagctgggccgtgatggtgtgcgccggcgacgagctgaccgccaacgagctgtgcagactgggcgccctggacatcctggaggaggtgaacgtgagcggcaccagaaagaacaagttcagcgaggccgcctacaacaagctgctgaacaacaacctgagcctgaagtacagccagaccggctacctgagcagcagcaacatcatcaacgacggcttctacgactacggcagaatcaaccccggcaccaagctgctgcccctgaaggagctgtgcctgcaggagcccagcgacctgagagccgtgctgctgatcaacagcaagagctacgtgagcccccccagcagcatggaggacaagagcgacgtgggctacggcagaagcatcagcagcagcagcagcctgagaagaagcagcaaggagaagaacaacgccggcttcggcagccccatcgaggacaagagcgagcccgccagcggcagaaacaccgtgctgagcaagagcgccaccaaggagaagggctggagaaagagcaagggcaagaaggaggaggagaaggtgaaggaggaggaggaggtgatggtggtgcccaagttcgtgggcgagggcagcagcgacaaggagtggtgcccccccagcgaccccgacttcagcatgtacgtgtacgaggtgaccaagagcatcctgcccatcaccaacatcaaggagcagatcgaggacctggccaagtacgtggccgagaagatgggcggcaagatccccaaggagaagctgcccgacttcagctgggagctgcacatcagcgagctgaagttccagctgaagagcaacgtgatccccatcggccacgtgaagaagggcatcttctaccacagagccctgctgttcaaggccctggccgacagaatcggcatcggctgcagcctggtgagaggcgagtacggcagagcctggaacgaggtgatgctgcagaacgacagcagaaagggcgtgatcggcggcctgcccgcccccgagatgtacgtgatcgacctgatgttccaccccggcggcctgatgaagctgagaagcagagaggccgacctgtacagattcatctag

SEQ ID NO: 102497 - DNA, 2598 bp, Artificial Sequence
  derived and/or modified sequence
atgggaaaaaaaattaaaaaagaggttgagccacctccgaaggacgtatttgatccattaatgatagaatccaagaaggctgcaactgtcgtgttgatgctgaattctcccgaggaagagatactcgctaaggcatgtgaggctatatacaaattcgctctaaaaggagaggaaaataaaaccaccctcctcgagctgggcgccgtcgagccattgacaaagctactgacacacgaggacaagattgtccggcgcaacgctactatgattttcgggattctggcttctaacaatgatgtgaagaaactgttacgagaactggatgtgatgaattcggtaatcgcacagcttgcccctgaggaggaggtagtgatccatgaattcgcgtccctatgcttggcaaacatgtcagctgagtatacctctaaggtgcagatcttcgagcatggtggcctggagccgctcatccgtttactgagctccccagaccccgatgtgaaaaagaactccatggaatgtatatacaatctggttcaggatttccaatgtcgcgcgaagctccaggagctaaacgccatcccgccaatccttgatctccttaaaagtgaataccccgtcatccagctcctggccctgaaaacacttggcgtcatcgccaacgacaaagaatcccgcacaatgcttcgtgacaatcaaggactggatcacttaattaagatccttgaaaccaaggaactcaatgacctgcatattgaggcattagcagtcatagcaaattgcttggaggacatggacaccatggtccagatccagcagaccggcggtttaaagaagcttttaagctttgccgaaaactcaaccatcccagatatccagaagaacgccgctaaggcaataaccaaggctgcctatgatccagagaacagaaagctgtttcacgaacaagaggtcgagaaatgtcttgtggccctcttgggatctgagaacgatggaacaaaaatcgctgcctcgcaagccatcagcgccatgtgcgagaactcaggtagcaaggactttttcaacaatcaaggcatcccacagctgatacaattgttaaagtccgacaatgaagaggttcgagaagccgctgctctggcgctcgccaacctgactacctgtaatccagcaaacgcaaacgctgcagctgaggcggacggcatcgatccgctgattaaccttctttctagcaaaagggacggggccattgctaatgccgccactgtgctgaccaatatggccatgcaagaacccctccggctgaacatacagaatcatgacatcatgcatgctattattagccccctgcggtcggccaatacggtagtgcaatcgaaggccgcactcgctgtcacagcaaccgcgtgcgatgtggaggcccggaccgagctaaggaattctggtgggctcgaaccgctggttgagttactccgctccaagaacgatgaagtgcgaaaacatgctagctgggctgtcatggtgtgcgccggtgacgagttgaccgctaacgaattgtgcaggctgggggccctagacattctcgaagaagtaaacgtaagtgggacccgaaagaacaaattttctgaagccgcttataataaactgctgaataataacctgtcattgaagtacagccagaccgggtatctctcttcgtccaacataattaacgatggattctatgattacggccgaattaatcctggtactaaactcctgcccctgaaagagctatgtctgcaggaacccagcgacttacgagcagtcctgctcatcaactcgaagtcttatgtgtctcctcctagcagcatggaagataagtcggatgtggggtatggccggagtatatcctccagttcctctctgcgcaggtcctcgaaggaaaaaaataacgctggattcggttctcccatcgaagacaaatctgaacccgcttctggccgcaatacagttttgtcaaaaagtgctacaaaggagaagggctggaggaagagtaagggcaaaaaagaggaagaaaaggtcaaagaggaggaggaggtgatggtggttcctaagtttgtgggggaaggctccagcgataaggagtggtgcccgcccagcgatcctgatttctctatgtatgtgtatgaggtcactaaaagcatactgcctataacaaacattaaagagcagatcgaagatctggccaagtacgttgccgaaaagatgggtggaaagatacccaaggagaagctgccagacttcagttgggagctgcatatttcggagctgaaattccagcttaagagtaatgttattccaatcggccacgtgaaaaaagggatattttatcatcgtgctctgctgtttaaggccctcgctgacaggattggaattggctgttccttagtgcggggtgagtatggacgtgcttggaatgaggtcatgttgcagaacgattcccggaagggcgtgatcggcggcctgccagccccggaaatgtatgtcattgacctcatgtttcatcccggggggctgatgaagttaaggtcaagagaagcggacctctatagattcatctag

SEQ ID NO: 102498 - DNA, 2598 bp, Artificial Sequence
  derived and/or modified sequence
atgggcaagaagatcaagaaggaggtggagcccccacccaaggatgtgtttgaccccctgatgattgagagcaagaaggccgccaccgtggtgctgatgctgaacagccctgaggaggagatcctggccaaggcctgtgaggccatctacaagtttgccctgaagggggaggagaacaagaccaccctgctggagctgggcgctgtggagcccctgaccaagctgctgacccatgaggacaagatcgtgagaagaaatgccaccatgatcttcggcatcctggccagcaacaatgatgtgaagaagctgctgcgggagctggatgtgatgaacagcgtcatcgcccagctggcccctgaggaggaggtggtgatccacgagtttgccagcctgtgcctggccaacatgtctgctgagtacaccagcaaggtgcagatctttgaacatggaggcctggagcccctcatccggctgctgagcagcccagaccctgatgtgaagaagaacagcatggagtgcatctacaacctggtgcaggacttccagtgccgggccaagctgcaggagctgaatgccatcccccccatcctggacctgctgaagtctgagtaccctgtgatccagctgctggccctgaagaccctgggcgtcatcgccaatgacaaggagagcaggaccatgctgcgggacaaccagggcctggaccacctgatcaagatcctggagaccaaggagctgaatgacctgcacatcgaggccctggccgtgattgccaactgcctggaggacatggacaccatggtgcagatccagcagacaggaggcctgaagaagctgctgagctttgctgagaacagcaccatcccagacatccagaagaatgctgccaaggccatcaccaaggccgcctatgaccctgaaaataggaagctgttccacgagcaggaggtggagaagtgcctggtggccctgctgggctctgaaaatgatggcaccaagattgctgccagccaggccatcagcgccatgtgtgaaaattctggcagcaaggacttcttcaacaaccagggcatcccccagctgatccagctgctgaagagtgacaatgaggaggtgcgggaggccgccgccctggccctggccaacctgaccacctgcaacccagccaatgccaatgctgctgctgaggctgatggcatcgaccccctcatcaacctgctgagcagcaagagagatggagccatcgccaatgctgccaccgtgctgaccaacatggccatgcaggagcccctgcggctgaacatccagaaccacgacatcatgcacgccatcatcagccccctgcggagcgccaacacagtggtgcagagcaaggccgccctggccgtgacagccacagcctgtgatgtggaggccaggacagagctgagaaattctgggggcctggagcccctggtggagctgctgcggagcaagaatgatgaggtgaggaagcacgcctcctgggccgtgatggtgtgtgctggagatgagctgacagccaatgagctgtgccgcctgggcgccctggacatcctggaggaggtgaatgtgtctggcaccaggaagaacaagttcagcgaggccgcctacaacaagctgctgaacaacaacctgagcctgaagtacagccagacaggctacctgagcagcagcaacatcatcaatgatggcttctatgactatggccgcatcaaccctggcaccaagctgctgcccctgaaggagctgtgcctgcaggagcccagcgacctgcgggctgtgctgctgatcaacagcaagagctatgtgagcccccccagctccatggaggacaagagtgatgtgggctacggccgcagcatcagcagcagcagcagcctgcggcgcagcagcaaggagaagaacaatgccggcttcggcagccccatcgaggacaagtctgagcccgccagcggcaggaacacagtgctgagcaagagcgccaccaaggagaagggctggaggaagagcaagggcaagaaggaggaggagaaggtgaaggaggaggaggaggtgatggtggtgcccaagtttgtgggggagggcagcagtgacaaggagtggtgcccccccagcgaccctgacttctccatgtatgtgtatgaggtgaccaagagcatcctgcccatcaccaacatcaaggagcagatcgaggacctggccaagtatgtggccgagaagatgggcggcaagatccccaaggagaagctgcctgacttctcctgggagctgcacatcagcgagctgaagttccagctgaagagcaatgtcatccccatcggccacgtgaagaagggcatcttctaccaccgggccctgctcttcaaggccctggccgaccgcatcggcatcggctgcagcctggtgcggggggagtatggccgggcctggaatgaggtgatgctgcagaatgacagcaggaagggcgtgattggaggcctgcctgcccctgagatgtatgtgattgacctgatgttccaccctgggggcctgatgaagctgcggagccgggaggccgacctgtaccgcttcatctag

SEQ ID NO: 102499 - DNA, 2598 bp, Artificial Sequence
  derived and/or modified sequence
atgggcaagaagatcaagaaggaggtggagcccccccccaaggacgtgttcgatccactgatgattgaatccaagaaagccgcaaccgtcgtgctgatgctgaacagcccagaagaggagatcctcgccaaagcctgtgaggcaatttacaaatttgccctgaagggtgaagagaacaagactactcttctcgagctgggagccgtcgagcccctcaccaagctgctcacccatgaggacaaaattgtacggcgaaacgccacaatgatcttcggaatcctagcctcaaataatgatgtgaaaaagttactgcgggaactcgatgttatgaactctgtgatcgctcaattggcccctgaagaggaggttgtcatccacgagttcgcctctctttgtctggccaacatgagtgccgaatatacatctaaagtgcaaatatttgaacacggcggacttgaacccctcattagactgctgagtagccccgatcccgacgtcaaaaaaaactcaatggagtgcatttacaatctcgttcaagacttccagtgccgcgctaagctgcaggagcttaatgcaattccacccattctggacctcctgaaatccgagtatccggtcatccagctgctggccttgaaaactttgggtgtgattgcaaatgacaaggagtcaaggactatgctgcgggacaatcagggtttagaccatctcatcaagatcctggagacgaaggaacttaacgacctccacatcgaggctcttgcagtgattgccaactgtctggaggatatggatacaatggtgcaaatacaacagaccggagggctcaagaaactgctttcctttgccgaaaactcgactatcccggacatccaaaagaatgccgcaaaagcaatcactaaagccgcctacgatccagagaatcggaagctgttccacgaacaggaagtagaaaagtgcctcgtagccttgctggggtccgaaaacgatggcaccaaaatcgccgcctcccaggccatctcagcgatgtgcgagaactcaggctctaaagacttcttcaacaatcagggcatcccccagcttattcagctcctcaagagtgataacgaagaagtgagagaagcggccgcacttgccctggcgaaccttacgacttgcaaccctgccaacgccaacgccgcagcagaggccgatgggatcgatccattaattaacctcctctcatccaagcgagacggcgcaatcgccaatgctgccaccgttttaacaaatatggcaatgcaagagcccctccgactcaatatccagaaccacgatatcatgcacgccatcatctcgccgttgcgctctgccaataccgtggtccagtccaaggccgcactcgctgttactgccactgcatgcgatgtggaggcgcggactgaactcaggaatagcggcggcctcgagccattagtcgagctgctccggtccaagaatgacgaggtccgcaaacacgcgtcttgggctgttatggtgtgtgccggcgatgaactgacggccaatgagctctgtcggctcggcgccctcgacattttggaagaggtcaacgtgagcgggactagaaagaacaaattctccgaggccgcctacaacaaactccttaacaacaacctctcactcaagtactcgcagacaggttatctgtcttcctccaacattattaatgacggcttttacgactacggacgtataaaccctggcacaaaactgctccctctcaaggagctctgtctgcaggagcccagcgacctgcgggctgtgctgctgattaatagtaagtcatatgtaagccctcccagttccatggaggacaaatccgacgtcggatacggacggagtattagcagctcaagcagtctgcggcgctccagcaaggaaaagaacaacgccgggttcggaagcccaattgaagacaaaagcgagcctgcgagcgggaggaatacggttctaagcaagagcgcgactaaggaaaaggggtggaggaaaagcaagggaaagaaggaagaggagaaggtaaaggaggaggaagaggtcatggtggtcccgaagtttgtaggggaaggtagcagcgacaaggagtggtgcccccccagtgatccggacttttccatgtatgtgtatgaggtgactaaatcaatcctccctattaccaatattaaagagcaaatagaagatctggccaagtacgtcgcagagaaaatgggtggcaagattccaaaggaaaagctcccggatttcagctgggaattgcacataagcgaactcaagtttcagctgaagagcaacgtgattcccatcggtcatgtcaagaaaggtatcttctaccaccgggcactcctgtttaaagccctggcggacagaataggcatcgggtgcagtttggtgagaggagagtatggaagggcttggaatgaggtcatgctccagaatgacagcaggaaaggcgttatcggagggttgccagccccagaaatgtacgtgatcgatctcatgtttcacccaggcggactcatgaaactgagatcccgcgaggccgatctttaccggttcatctag

SEQ ID NO: 102500 - DNA, 2598 bp, Artificial Sequence
  derived and/or modified sequence
atggggaagaaaattaagaaagaggtggagccaccccctaaggatgtatttgaccccctgatgattgaatccaagaaggcagcaactgtcgttctcatgctcaatagtcccgaagaagagattctggcgaaagcatgcgaggccatctataagttcgctttgaagggtgaagagaacaagactactttactggaattaggagccgttgagccgttgacaaagttgcttacacacgaggacaagatcgtgcgtcggaacgcaaccatgattttcggtatcctggcctctaataacgacgtgaaaaaacttttgcgcgagttggacgttatgaatagtgttatcgcacagctggctcctgaagaagaggttgtgatacacgagttcgcatccctgtgtctggccaatatgtctgcagagtataccagcaaagtgcaaattttcgaacatggagggcttgaacctctgattcggctgctcagttctccggaccctgacgttaagaagaactctatggagtgtatatataacctcgttcaggactttcaatgtcgagcaaagcttcaagagctcaacgccattcccccaattcttgatctccttaaatctgaatatccggttatccaactgctggccctgaaaaccctgggggtgatcgccaacgataaggagtcacgaaccatgttgagggataaccaaggcctggaccaccttataaagattcttgaaacaaaggagctgaatgatttacatatcgaagccctggcggttattgctaattgtctggaggatatggacaccatggtgcagatccagcagactggagggcttaagaaacttctgtcattcgccgagaactctacaatccctgatatacagaagaatgcggctaaagctatcacaaaagccgcatacgacccagagaatcgaaagctctttcacgagcaggaggtagaaaagtgcctggtggcactgttaggatccgagaacgacggcaccaagattgcggcttcacaggcaatcagcgccatgtgcgaaaactcagggagtaaggacttcttcaacaaccagggtatcccacagcttattcagcttctgaagtcagacaatgaagaggtccgagaagctgccgcactggccctggcaaatctgactacttgcaaccccgctaacgctaacgcggctgcagaggcggatggcatcgaccctctaataaacctgttgagtagcaaaagagacggcgctattgccaacgctgccaccgtgttaactaatatggctatgcaggagccgctgcgcctcaacattcagaaccacgatatcatgcacgctattattagtcctctgagaagcgccaacacggtagtacagtctaaagccgctctagccgtcacagcaaccgcatgtgatgttgaggcgagaactgagctgagaaactccggtggcctggagccacttgtcgaactgctcaggagtaaaaacgatgaagtgcggaaacacgcaagttgggcagtgatggtatgcgcaggcgacgagctgacagctaacgagctgtgcagactgggtgcactggacatattagaggaggtgaatgtttccggcacccgtaagaacaagttcagcgaggcggcatacaacaagctgctgaataataatctttcactcaagtattcacagacaggatacttgtcctcttctaatattatcaacgacggcttctatgattatggtcgaatcaatccaggtacaaaactgctgcctctcaaagagctgtgtctgcaggagcccagtgatctgcgagcggtcctgctaattaactctaaaagctacgttagcccaccgtcttccatggaagacaagtctgatgtaggctatggaaggagcatctccagctccagttccctgcgcaggtcttcaaaggaaaagaataatgcgggattcggcagccctattgaagataagagcgaacccgcttcaggtcgtaatacggttctgtccaaatcagcgacaaaggagaagggatggcgaaagagcaaggggaaaaaggaggaagagaaggttaaagaggaggaggaggtgatggtggtccccaagtttgtcggcgagggatcctccgacaaagagtggtgccctccaagtgaccctgacttcagcatgtatgtgtatgaggtgacgaagtcgatccttcctatcaccaatattaaggaacagatcgaagatcttgccaaatacgtagccgaaaaaatggggggaaaaatacccaaagaaaagttgccagatttcagctgggagttacatatctccgaactgaagtttcagctaaagagcaatgtgatcccgattggtcatgtgaagaaaggcattttttatcaccgcgcactgctctttaaagcattggcagatcgaatcggaatcggctgcagcctggttcgcggtgagtacggaagagcttggaacgaggtgatgctgcagaatgatagccgcaagggcgtcatcgggggtcttcctgcccctgagatgtacgtgatagacctaatgtttcaccctggaggactgatgaagctgcgcagcagagaggcagacctgtaccggttcatttag

SEQ ID NO: 102501 - DNA, 2779 bp, Artificial Sequence
  derived and/or modified sequence
caacaagggactgggggttcgtctgctgggtttgcggagcagctagctactcggcgggatctcccggcaggatgggtaaaaagataaagaaggaagtagagcctcctcctaaggatgtgtttgacccattaatgattgaaagcaaaaaagcagcaactgtggtgttaatgcttaattctccagaagaggaaattttggctaaagcatgtgaagccatttataaatttgctttaaaaggtgaggaaaataaaacaaccctccttgaacttggagctgtggaacctttaactaagctactcacccatgaagacaaaattgtaagaagaaatgctactatgatatttggaatcctggcttctaataatgatgttaaaaaattgttaagggagttagatgtcatgaattctgtcattgcccagctcgctccagaagaagaagtagttatccatgagtttgctagtctttgtctagcaaacatgtctgcagagtacaccagtaaagtgcaaatatttgaacatgggggattagagccactcatcagactactgagtagccctgacccggatgtaaagaagaactctatggaatgcatttacaacttggtgcaggattttcagtgtcgagctaaacttcaagaactaaatgcaatacctcctatcttagatctcttgaagtcagaatatccagtgattcagttgttggctctcaaaaccttaggtgttattgcaaatgataaggagtctcgaacaatgctaagagacaatcaaggattggaccatcttattaagatcctagaaactaaggaattgaatgaccttcatatagaagcacttgcagtgatagccaattgccttgaagacatggatactatggtgcagattcagcagacagggggtcttaaaaagctcctgtcatttgcagaaaactctacaattcctgatattcagaagaatgcagcaaaagccattactaaagcagcttatgatcctgaaaatagaaaactttttcatgaacaagaggttgaaaagtgccttgtagcccttttgggttctgaaaatgatggaactaaaattgctgcttcccaagctatttcagcaatgtgtgagaattcaggcagcaaagattttttcaataatcaggggattccacagttaattcagttgctaaaaagtgacaatgaagaggtacgggaagcagcagctctagccctggcaaacctaaccacttgcaaccctgctaatgcaaacgctgctgctgaagctgatggtattgatccattaataaacctcctgtctagtaaacgagatggagccattgccaacgctgctacagtattaacaaacatggccatgcaggagcccctgcgcctgaacatacagaatcacgacatcatgcatgccatcatcagcccactgcgttctgcaaacacagtcgtgcagagcaaagctgctctcgctgtcaccgcaactgcgtgtgacgttgaagcccggactgagttaagaaattctggtggattggagcccctggtagagctgctacgctccaagaatgatgaagtgaggaagcacgccagttgggcagtgatggtctgtgctggtgacgagctgacggccaatgaattatgcaggctcggggctttagatatccttgaagaagttaacgtatcaggaactcggaaaaataaattcagtgaggcagcttataataagttgctcaataacaatctttccctgaaatacagccagactggctatttgtcatcaagtaacataattaacgatggattctatgattatggtcggataaatcccggcaccaaactgttgcctttgaaggagctctgcttacaagaaccaagtgacctacgggctgtactcttaatcaacagtaaatcttacgtttctccaccttcatctatggaagataaatcagatgttggttatggacgaagtatttcttcttcatcttccttaagaagatcaagtaaagaaaagaacaatgctggatttggatctcccatagaagacaaatcagagccagcttctggacgaaatactgttctcagcaaaagcgccaccaaagaaaaaggatggaggaaaagcaaaggaaaaaaagaagaggaaaaagtgaaagaggaggaagaggttatggtggtaccaaaatttgttggtgaaggaagctctgacaaagaatggtgtcctccctctgaccctgatttctctatgtatgtgtatgaggtgaccaaatcaatactgccaataaccaatattaaggaacagattgaggatctggcaaagtatgtagcagaaaaaatgggtggtaagattccaaaagagaaactacctgatttcagctgggaacttcacataagtgaactgaaatttcaacttaaatccaatgttataccgattggacatgtcaaaaaaggaatcttctaccatcgagctttgcttttcaaggctctggctgatagaattggcattggttgctccctagttcgcggagagtacggtagagcgtggaatgaagtcatgctgcagaatgactctcggaagggagtgattgggggcctccccgctcctgagatgtacgtgattgacctcatgttccatccaggtggactgatgaagttgagaagtcgagaggctgatctttacagattcatttaagccatcagacgaacacaagagaggctcaaacaagaaattcactgtgtacactctctaagacattctccaaattgattttatctctttaaataaaaactttaaataaaagt

SEQ ID NO: 102502 - protein, 688 aa, Artificial Sequence
  derived and/or modified sequence
MGKKIKKEVEPPPKDVFDPLMIESKKAATVVLMLNSPEEEILAKACEAIYKFALKGEENKTTLLELGAVEPLTKLLTHEDKIVRRNATMIFGILASNNDVKKLLRELDVMNSVIAQLAPEEEVVIHEFASLCLANMSAEYTSKVQIFEHGGLEPLIRLLSSPDPDVKKNSMECIYNLVQDFQCRAKLQELNAIPPILDLLKSEYPVIQLLALKTLGVIANDKESRTMLRDNQGLDHLIKILETKELNDLHIEALAVIANCLEDMDTMVQIQQTGGLKKLLSFAENSTIPDIQKNAAKAITKAAYDPENRKLFHEQEVEKCLVALLGSENDGTKIAASQAISAMCENSGSKDFFNNQGIPQLIQLLKSDNEEVREAAALALANLTTCNPANANAAAEADGIDPLINLLSSKRDGAIANAATVLTNMAMQEPLRLNIQNHDIMHAIISPLRSANTVVQSKAALAVTATACDVEARTELRNSGGLEPLVELLRSKNDEVRKHASWAVMVCAGDELTANELCRLGALDILEEVNVSGTRKNKFSEAAYNKLLNNNLSLKYSQTGYLSSSNIINDGFYDYGRINPGTKLLPLKELCLQEPSDLRAVLLINSKSYVSPPSSMEDKSDVGYGRSISSSSSLRRSSKEKNKKNSYHFSAGFGSPIEDKSEPASGRNTVLSKSATKEKGWSSLPTSR

SEQ ID NO: 102503 - DNA, 2067 bp, Artificial Sequence
  derived and/or modified sequence
atgggcaagaagatcaagaaggaggtggagcccccccccaaggacgtgttcgaccccctgatgatcgagagcaagaaggccgccaccgtggtgctgatgctgaacagccccgaggaggagatcctggccaaggcctgcgaggccatctacaagttcgccctgaagggcgaggagaacaagaccaccctgctggagctgggcgccgtggagcccctgaccaagctgctgacccacgaggacaagatcgtgagaagaaacgccaccatgatcttcggcatcctggccagcaacaacgacgtgaagaagctgctgagagagctggacgtgatgaacagcgtgatcgcccagctggcccccgaggaggaggtggtgatccacgagttcgccagcctgtgcctggccaacatgagcgccgagtacaccagcaaggtgcagatcttcgagcacggcggcctggagcccctgatcagactgctgagcagccccgaccccgacgtgaagaagaacagcatggagtgcatctacaacctggtgcaggacttccagtgcagagccaagctgcaggagctgaacgccatcccccccatcctggacctgctgaagagcgagtaccccgtgatccagctgctggccctgaagaccctgggcgtgatcgccaacgacaaggagagcagaaccatgctgagagacaaccagggcctggaccacctgatcaagatcctggagaccaaggagctgaacgacctgcacatcgaggccctggccgtgatcgccaactgcctggaggacatggacaccatggtgcagatccagcagaccggcggcctgaagaagctgctgagcttcgccgagaacagcaccatccccgacatccagaagaacgccgccaaggccatcaccaaggccgcctacgaccccgagaacagaaagctgttccacgagcaggaggtggagaagtgcctggtggccctgctgggcagcgagaacgacggcaccaagatcgccgccagccaggccatcagcgccatgtgcgagaacagcggcagcaaggacttcttcaacaaccagggcatcccccagctgatccagctgctgaagagcgacaacgaggaggtgagagaggccgccgccctggccctggccaacctgaccacctgcaaccccgccaacgccaacgccgccgccgaggccgacggcatcgaccccctgatcaacctgctgagcagcaagagagacggcgccatcgccaacgccgccaccgtgctgaccaacatggccatgcaggagcccctgagactgaacatccagaaccacgacatcatgcacgccatcatcagccccctgagaagcgccaacaccgtggtgcagagcaaggccgccctggccgtgaccgccaccgcctgcgacgtggaggccagaaccgagctgagaaacagcggcggcctggagcccctggtggagctgctgagaagcaagaacgacgaggtgagaaagcacgccagctgggccgtgatggtgtgcgccggcgacgagctgaccgccaacgagctgtgcagactgggcgccctggacatcctggaggaggtgaacgtgagcggcaccagaaagaacaagttcagcgaggccgcctacaacaagctgctgaacaacaacctgagcctgaagtacagccagaccggctacctgagcagcagcaacatcatcaacgacggcttctacgactacggcagaatcaaccccggcaccaagctgctgcccctgaaggagctgtgcctgcaggagcccagcgacctgagagccgtgctgctgatcaacagcaagagctacgtgagcccccccagcagcatggaggacaagagcgacgtgggctacggcagaagcatcagcagcagcagcagcctgagaagaagcagcaaggagaagaacaagaagaacagctaccacttcagcgccggcttcggcagccccatcgaggacaagagcgagcccgccagcggcagaaacaccgtgctgagcaagagcgccaccaaggagaagggctggagcagcctgcccaccagcagatag

SEQ ID NO: 102504 - DNA, 2067 bp, Artificial Sequence
  derived and/or modified sequence
atgggtaagaagatcaaaaaggaggtggaacctccgccgaaagacgtttttgaccccctcatgattgagtccaagaaggctgctactgtggtgttgatgctcaacagtcctgaggaggagatattggccaaggcttgcgaggctatctataaatttgccctgaaaggagaggaaaataaaacaacacttctggagctgggagctgtggaaccccttactaagctactgacccacgaggataagatcgtgcggcggaacgccactatgatcttcggcatcctagcttcaaataatgacgtgaaaaaactcctgcgggagctcgacgttatgaactcggtgattgctcagctcgcccctgaggaggaagttgttattcacgaatttgcctctctttgtctggccaacatgtctgctgagtacacctctaaagtgcagatctttgaacacggaggcctggaacccttaatacggctcttatctagtccagaccccgacgtgaaaaagaactccatggagtgtatctacaaccttgtgcaagacttccaatgccgggctaaattacaggagctgaacgctatcccacccatccttgacctgctgaagtctgagtatccagtgatccagctgctggccctgaaaactctgggcgtgatcgccaatgataaggaatctcggaccatgttgcgagataaccagggcctcgatcatttaattaagatcctcgagacaaaggaacttaatgatctgcacattgaggcacttgcggtcatcgcaaactgcctcgaggatatggacactatggtgcagatccagcagacagggggcttgaaaaagctcttaagtttcgcagagaacagcacaatccccgatatacagaagaatgctgccaaggcaatcactaaggcagcctacgaccccgaaaataggaagctgttccatgagcaggaagtcgagaagtgtctggtggcactcctcggtagtgagaatgatgggacaaagattgcagcctctcaagctatctcggccatgtgtgaaaacagcggcagcaaagactttttcaataatcaaggaatcccacagctgatccagctgctcaagtccgataatgaggaagtccgcgaagcggcggccctggcactggccaatctgaccacatgtaatcccgccaacgccaacgccgccgctgaagccgatggcattgatcctctaattaatctgctctcttctaagagggatggagcgatcgcaaacgcagcaactgtgttaacaaatatggcgatgcaggagcctcttagactgaacatacaaaaccatgacatcatgcacgccattatttcccctctcaggtctgctaatacagtggtccaaagtaaggccgccctggccgtgacagccacagcttgtgatgtagaggcccggacagaactgaggaatagtgggggacttgagccccttgtcgaactgctgcggtccaagaatgacgaggtccgaaaacacgctagttgggccgtgatggtgtgtgcgggcgacgagttgaccgctaatgaactgtgcagattgggagccctcgacattctggaggaagtcaacgtctccggcaccaggaaaaacaagttcagtgaggcagcctataacaagttgctgaataataacctgagcttaaagtactctcagacggggtatctcagcagcagcaacatcatcaacgatggattttacgactacggtagaataaacccaggcactaagctgctcccactgaaggagctgtgcctgcaggagccttcggaccttagggcggttttgctgatcaactccaagtcttatgtgtctcctcctagttccatggaggacaagagcgacgtcggctacggaagatccatcagttccagcagcagcctgcgaaggagctctaaagagaaaaacaagaaaaactcttatcacttctccgccgggttcgggagccccattgaggacaagtcagaacccgcctcggggaggaatactgttctgtccaagtccgccactaaggaaaaagggtggtcgtcactgccgacctcacgatag

SEQ ID NO: 102505 - DNA, 2067 bp, Artificial Sequence
  derived and/or modified sequence
atgggcaagaagatcaagaaggaggtggagcccccacccaaggatgtgtttgaccccctgatgattgagagcaagaaggccgccaccgtggtgctgatgctgaacagccctgaggaggagatcctggccaaggcctgtgaggccatctacaagtttgccctgaagggggaggagaacaagaccaccctgctggagctgggcgctgtggagcccctgaccaagctgctgacccatgaggacaagatcgtgagaagaaatgccaccatgatcttcggcatcctggccagcaacaatgatgtgaagaagctgctgcgggagctggatgtgatgaacagcgtcatcgcccagctggcccctgaggaggaggtggtgatccacgagtttgccagcctgtgcctggccaacatgtctgctgagtacaccagcaaggtgcagatctttgaacatggaggcctggagcccctcatccggctgctgagcagcccagaccctgatgtgaagaagaacagcatggagtgcatctacaacctggtgcaggacttccagtgccgggccaagctgcaggagctgaatgccatcccccccatcctggacctgctgaagtctgagtaccctgtgatccagctgctggccctgaagaccctgggcgtcatcgccaatgacaaggagagcaggaccatgctgcgggacaaccagggcctggaccacctgatcaagatcctggagaccaaggagctgaatgacctgcacatcgaggccctggccgtgattgccaactgcctggaggacatggacaccatggtgcagatccagcagacaggaggcctgaagaagctgctgagctttgctgagaacagcaccatcccagacatccagaagaatgctgccaaggccatcaccaaggccgcctatgaccctgaaaataggaagctgttccacgagcaggaggtggagaagtgcctggtggccctgctgggctctgaaaatgatggcaccaagattgctgccagccaggccatcagcgccatgtgtgaaaattctggcagcaaggacttcttcaacaaccagggcatcccccagctgatccagctgctgaagagtgacaatgaggaggtgcgggaggccgccgccctggccctggccaacctgaccacctgcaacccagccaatgccaatgctgctgctgaggctgatggcatcgaccccctcatcaacctgctgagcagcaagagagatggagccatcgccaatgctgccaccgtgctgaccaacatggccatgcaggagcccctgcggctgaacatccagaaccacgacatcatgcacgccatcatcagccccctgcggagcgccaacacagtggtgcagagcaaggccgccctggccgtgacagccacagcctgtgatgtggaggccaggacagagctgagaaattctgggggcctggagcccctggtggagctgctgcggagcaagaatgatgaggtgaggaagcacgcctcctgggccgtgatggtgtgtgctggagatgagctgacagccaatgagctgtgccgcctgggcgccctggacatcctggaggaggtgaatgtgtctggcaccaggaagaacaagttcagcgaggccgcctacaacaagctgctgaacaacaacctgagcctgaagtacagccagacaggctacctgagcagcagcaacatcatcaatgatggcttctatgactatggccgcatcaaccctggcaccaagctgctgcccctgaaggagctgtgcctgcaggagcccagcgacctgcgggctgtgctgctgatcaacagcaagagctatgtgagcccccccagctccatggaggacaagagtgatgtgggctacggccgcagcatcagcagcagcagcagcctgcggcgcagcagcaaggagaagaacaagaagaacagctaccacttctctgctggcttcggcagccccatcgaggacaagtctgagcccgccagcggcaggaacacagtgctgagcaagagcgccaccaaggagaagggctggagcagcctgcccaccagcaggtag

SEQ ID NO: 102506 - DNA, 2067 bp, Artificial Sequence
  derived and/or modified sequence
atgggcaagaagatcaagaaggaggtggagcccccccccaaggacgtgttcgatcctctcatgattgagagcaagaaggcagccaccgtggtgcttatgttgaactcccccgaggaggaaatccttgccaaagcatgtgaggccatctacaaatttgccctcaaaggggaggaaaataagaccacgctcctggagctcggggccgtggagcctctcacaaaattgctcacacatgaagacaaaattgtacgaaggaacgcaactatgatttttgggatcctggcctctaacaatgacgtaaagaagctcctgcgggaactggatgttatgaactccgtgatcgcacagctggccccagaggaggaggttgtcatccatgaatttgcgtccttgtgtctggccaacatgagtgctgaatatacgtcaaaggtgcaaatcttcgagcatggggggctggaaccactgatcagactcctgtcttctcccgatccggacgtgaaaaaaaattcaatggagtgcatctataacctagtacaagacttccagtgtagggctaaactccaggagctgaatgcgattccccctatcctcgacttacttaagagcgagtaccccgtcatccaactgttggccctgaagaccctcggcgtgattgctaacgacaaggagagcagaactatgctacgcgataaccagggacttgatcatttgattaagatacttgagacaaaagagctgaatgacctacatattgaggccctggcagtcattgcaaactgcctggaggacatggataccatggtgcagattcaacagacgggcggtctcaaaaaattgttatcttttgctgaaaacagtacaattccagatattcagaaaaatgccgcaaaggccatcactaaagccgcgtatgatcccgaaaatagaaagctgttccacgagcaggaagtcgagaaatgtctagtggcactcttgggctcagagaatgacggcaccaagatcgcagcaagtcaggcaatttccgccatgtgtgaaaactccgggtccaaagattttttcaataatcagggtatccctcagctgatccaactcctgaaaagcgacaacgaggaggtacgagaagcggctgcgctagccctggcgaacctgacaacatgtaacccagccaacgctaacgcagccgctgaggcagatgggattgaccccctgatcaacctgcttagctccaaaagagacggtgcaattgcaaacgcagcgaccgttctaaccaacatggccatgcaggagccgctgcgtctgaatatccagaatcatgacattatgcatgctataattagccccttaaggagtgccaacactgtggtgcagagtaaagctgctttggcggtgacagccacagcttgtgacgtcgaggcacgcactgagcttcggaatagtggcgggcttgaacctttagtcgaactgctccgctccaagaacgatgaggttagaaagcacgcaagctgggcggtgatggtgtgtgctggtgacgaattgactgcaaacgaattatgcagactgggagctcttgacatcttggaggaagtgaatgtctctggcactaggaaaaacaagttcagtgaagctgcctacaacaagcttctgaataataacctgtctctaaaatattcacagactggttatttgagtagttccaacatcattaatgacggcttctacgattacgggaggataaaccccggaactaagctcctgcctcttaaggagctctgcctgcaagaaccctccgatctgcgtgcggtcctactcatcaatagcaagtcctacgtctcgccccccagctccatggaagataaatccgacgttggatacggaagatctataagctcttcgagctcactccgccgctctagtaaggaaaagaataagaaaaacagctatcatttcagtgccggattcgggtcacctatcgaagataagtcagagccggccagcggcaggaatacagtcttaagtaaatccgctaccaaggagaaaggctggtctagtctgccaacaagcaggtag

SEQ ID NO: 102507 - DNA, 2067 bp, Artificial Sequence
  derived and/or modified sequence
atgggcaagaagatcaaaaaagaagtggaaccccctccaaaggatgtgttcgatcccttgatgatagagagtaagaaggcagcaacggtggtgcttatgctgaatagcccagaggaggagatactggctaaggcttgtgaagccatctataagtttgccctcaaaggggaagaaaacaagaccactttgttagagctgggagcggtagaacccctgacaaaactccttacgcacgaggataaaatagtgagaagaaacgctaccatgattttcggcatcctggcctctaacaatgacgttaagaagctcctgcgggaactggatgtaatgaatagcgtgatcgcacagcttgcgccagaggaggaggttgtgattcatgagtttgcttccctatgtttggccaatatgtccgcggagtataccagtaaagtccagatttttgagcacggaggcctcgagcctctgattcgtttattaagtagtcccgaccctgacgtgaagaaaaattcaatggagtgtatctacaacctggtccaggattttcagtgtcgcgctaaattgcaagaattgaatgctattcctccaatccttgacctgctgaagtccgaataccctgtcattcagctgctcgccctaaagaccctgggtgtgatagccaacgacaaagaatcacggacgatgttgagagacaaccagggccttgatcatttgatcaagatcctggaaactaaagagctcaatgacctgcacatcgaggcattggctgtgatcgccaattgtctggaagatatggataccatggtgcagatccagcagaccggaggtcttaaaaagctactgtccttcgccgagaactcaaccatcccagacatccagaaaaacgctgctaaagcgattacaaaagcagcatatgatccagaaaaccggaagttattccacgagcaggaagtcgaaaaatgtctagtggcgctcctgggaagtgagaatgacggcactaaaatagctgcctcccaagctatcagcgctatgtgcgaaaatagtgggagcaaggattttttcaataatcagggcattccacagctgattcagctcttgaaatcagataatgaggaggtgagagaggcagccgcactcgccctggctaatctcacaacctgcaacccagccaacgccaatgccgctgcagaagctgatggtatagacccccttattaacttattgtcctccaaaagggatggagccatcgctaacgctgctacagtcctgaccaatatggctatgcaagagccactcagattgaacattcaaaatcatgacattatgcatgctatcatctctccacttcgatctgcaaacacagtggtgcagtccaaagccgcattggccgtcactgccactgcttgcgatgtggaagcgcgtacggagcttaggaatagtggaggcctggaaccgttagttgaactcttgcgatcaaaaaatgacgaggtgcgaaagcacgcgagctgggctgtgatggtctgcgccggagacgagttgactgccaatgagctatgcaggctgggagcactggacattctcgaagaggtgaatgtttcaggcacccggaaaaacaaattctcggaggcggcatataataagctcctgaacaacaacctttcgcttaagtactcacaaaccgggtaccttagttccagcaacatcattaacgacgggttttacgactatggccgaatcaaccccggtacaaaactgctgcccctgaaagagctgtgcttgcaggaacctagtgacctccgcgctgttcttcttatcaactccaaatcttacgtgtcacctccgtcctcaatggaagacaaaagcgacgttgggtatggcaggtcaataagctcctccagctcgcttcgccgaagctccaaagagaaaaacaagaaaaacagttaccacttttccgccggatttggctcccctatagaagacaaaagtgaacccgcaagcgggagaaatactgtactgtctaaatctgctacaaaagagaaggggtggagctccctgcccacaagccggtag

SEQ ID NO: 102508 - DNA, 2479 bp, Artificial Sequence
  derived and/or modified sequence
gggtttgcggagcagctagctactcggcgggatctcccggcaggatgggtaaaaagataaagaaggaagtagagcctcctcctaaggatgtgtttgacccattaatgattgaaagcaaaaaagcagcaactgtggtgttaatgcttaattctccagaagaggaaattttggctaaagcatgtgaagccatttataaatttgctttaaaaggtgaggaaaataaaacaaccctccttgaacttggagctgtggaacctttaactaagctactcacccatgaagacaaaattgtaagaagaaatgctactatgatatttggaatcctggcttctaataatgatgttaaaaaattgttaagggagttagatgtcatgaattctgtcattgcccagctcgctccagaagaagaagtagttatccatgagtttgctagtctttgtctagcaaacatgtctgcagagtacaccagtaaagtgcaaatatttgaacatgggggattagagccactcatcagactactgagtagccctgacccggatgtaaagaagaactctatggaatgcatttacaacttggtgcaggattttcagtgtcgagctaaacttcaagaactaaatgcaatacctcctatcttagatctcttgaagtcagaatatccagtgattcagttgttggctctcaaaaccttaggtgttattgcaaatgataaggagtctcgaacaatgctaagagacaatcaaggattggaccatcttattaagatcctagaaactaaggaattgaatgaccttcatatagaagcacttgcagtgatagccaattgccttgaagacatggatactatggtgcagattcagcagacagggggtcttaaaaagctcctgtcatttgcagaaaactctacaattcctgatattcagaagaatgcagcaaaagccattactaaagcagcttatgatcctgaaaatagaaaactttttcatgaacaagaggttgaaaagtgccttgtagcccttttgggttctgaaaatgatggaactaaaattgctgcttcccaagctatttcagcaatgtgtgagaattcaggcagcaaagattttttcaataatcaggggattccacagttaattcagttgctaaaaagtgacaatgaagaggtacgggaagcagcagctctagccctggcaaacctaaccacttgcaaccctgctaatgcaaacgctgctgctgaagctgatggtattgatccattaataaacctcctgtctagtaaacgagatggagccattgccaacgctgctacagtattaacaaacatggccatgcaggagcccctgcgcctgaacatacagaatcacgacatcatgcatgccatcatcagcccactgcgttctgcaaacacagtcgtgcagagcaaagctgctctcgctgtcaccgcaactgcgtgtgacgttgaagcccggactgagttaagaaattctggtggattggagcccctggtagagctgctacgctccaagaatgatgaagtgaggaagcacgccagttgggcagtgatggtctgtgctggtgacgagctgacggccaatgaattatgcaggctcggggctttagatatccttgaagaagttaacgtatcaggaactcggaaaaataaattcagtgaggcagcttataataagttgctcaataacaatctttccctgaaatacagccagactggctatttgtcatcaagtaacataattaacgatggattctatgattatggtcggataaatcccggcaccaaactgttgcctttgaaggagctctgcttacaagaaccaagtgacctacgggctgtactcttaatcaacagtaaatcttacgtttctccaccttcatctatggaagataaatcagatgttggttatggacgaagtatttcttcttcatcttccttaagaagatcaagtaaagaaaagaacaaaaaaaatagttatcattttagtgctggatttggatctcccatagaagacaaatcagagccagcttctggacgaaatactgttctcagcaaaagcgccaccaaagaaaaaggatggagctcactccccacttcaagataaaccctgaagcactcctaggatttaagaggattgttggcatgaggagaacacagagactttggattcagacacaactgggccttggtcttctgaattgtaaatgaaaatgatgatccctgcctcaaagagctgctgtaagaggagagatggtgtcaggaaagtgcctgaccatcacctagcacacttaggggctcaatgtgcgtcccttctctcttcccttcttagcctttggtccattgaggggtagattagccatagccctgttgtcctgttgcctgtcttttggtcaacccttcttgtcttatgactattaaaactttggactcctggaaatagaataaaatattttaactgcattcgtctgaaaa

SEQ ID NO: 102509 - protein, 609 aa, Artificial Sequence
  derived and/or modified sequence
MDTMVQIQQTGGLKKLLSFAENSTIPDIQKNAAKAITKAAYDPENRKLFHEQEVEKCLVALLGSENDGTKIAASQAISAMCENSGSKDFFNNQGIPQLIQLLKSDNEEVREAAALALANLTTCNPANANAAAEADGIDPLINLLSSKRDGAIANAATVLTNMAMQEPLRLNIQNHDIMHAIISPLRSANTVVQSKAALAVTATACDVEARTELRNSGGLEPLVELLRSKNDEVRKHASWAVMVCAGDELTANELCRLGALDILEEVNVSGTRKNKFSEAAYNKLLNNNLSLKYSQTGYLSSSNIINDGFYDYGRINPGTKLLPLKELCLQEPSDLRAVLLINSKSYVSPPSSMEDKSDVGYGRSISSSSSLRRSSKEKNKKNSYHFSAGFGSPIEDKSEPASGRNTVLSKSATKEKGWRKSKGKKEEEKVKEEEEVMVVPKFVGEGSSDKEWCPPSDPDFSMYVYEVTKSILPITNIKEQIEDLAKYVAEKMGGKIPKEKLPDFSWELHISELKFQLKSNVIPIGHVKKGIFYHRALLFKALADRIGIGCSLVRGEYGRAWNEVMLQNDSRKGVIGGLPAPEMYVIDLMFHPGGLMKLRSREADLYRFI

SEQ ID NO: 102510 - protein, 805 aa, Artificial Sequence
  derived and/or modified sequence
MIRDLSKMYPQTRHPAPHQPAQPFKFTISESCDRIKEEFQFLQAQYHSLKLECEKLASEKTEMQRHYVMYYEMSYGLNIEMHKQAEIVKRLNAICAQVIPFLSQEHQQQVVQAVERAKQVTMAELNAIIGQQLQAQHLSHGHGLPVPLTPHPSGLQPPAIPPIGSSAGLLALSSALGGQSHLPIKDEKKHHDNDHQRERDKLNHKSLSPSASFRGAEKHRNSADYSSESKKQKTEEKEIAARYDSDGEKSDDNLVVDVSNEDPSSPRGSPAHSPRENGLDKTRLLKKDAPISPASIASSSSTPSSKSKELSLKRDMGKLSETRLSEDEQCTLGLQRWFCRLWFMNEKSTTPVSKSNTPTPRTDAPTPGSNSTPGLRPVPGKPPGVDPLASSLRTPMAVPCPYPTPFGIVPHAGMNGELTSPGAAYAGLHNISPQMSAAAAAAAAAAAYGRSPVVGFDPHHHMRVPAIPPNLTGIPGGKPAYSFHVSADGQMQPVPFPPDALIGPGIPRHARQINTLNHGEVVCAVTISNPTRHVYTGGKGCVKVWDISHPGNKSPVSQLDCLNRDNYIRSCRLLPDGRTLIVGGEASTLSIWDLAAPTPRIKAELTSSAPACYALAISPDSKVCFSCCSDGNIAVWDLHNQTLVRQFQGHTDGASCIDISNDGTKLWTGGLDNTVRSWDLREGRQLQQHDFTSQIFSLGYCPTGEWLAVGMENSNVEVLHVTKPDKYQLHLHESCVLSLKFAHCGKWFVSTGKDNLLNAWRTPYGASIFQSKESSSVLSCDISVDDKYIVTGSGDKKATVYEVIY

SEQ ID NO: 102511 - protein, 805 aa, Artificial Sequence
  derived and/or modified sequence
MIRDLSKMYPQTRHPAPHQPAQPFKFTISESCDRIKEEFQFLQAQYHSLKLECEKLASEKTEMQRHYVMYYEMSYGLNIEMHKQAEIVKRLNAICAQVIPFLSQEHQQQVVQAVERAKQVTMAELNAIIGQQLQAQHLSHGHGLPVPLTPHPSGLQPPAIPPIGSSAGLLALSSALGGQSHLPIKDEKKHHDNDHQRDRDSIKSSSVSPSASFRGAEKHRNSADYSSESKKQKTEEKEIAARYDSDGEKSDDNLVVDVSNEDPSSPRGSPAHSPRENGLDKTRLLKKDAPISPASIASSSSTPSSKSKELSLKRDMGKLSETRLSEDEQCTLGLQRWFCRLWFMNEKSTTPVSKSNTPTPRTDAPTPGSNSTPGLRPVPGKPPGVDPLASSLRTPMAVPCPYPTPFGIVPHAGMNGELTSPGAAYAGLHNISPQMSAAAAAAAAAAAYGRSPVVGFDPHHHMRVPAIPPNLTGIPGGKPAYSFHVSADGQMQPVPFPPDALIGPGIPRHARQINTLNHGEVVCAVTISNPTRHVYTGGKGCVKVWDISHPGNKSPVSQLDCLNRDNYIRSCRLLPDGRTLIVGGEASTLSIWDLAAPTPRIKAELTSSAPACYALAISPDSKVCFSCCSDGNIAVWDLHNQTLVRQFQGHTDGASCIDISNDGTKLWTGGLDNTVRSWDLREGRQLQQHDFTSQIFSLGYCPTGEWLAVGMENSNVEVLHVTKPDKYQLHLHESCVLSLKFAHCGKWFVSTGKDNLLNAWRTPYGASIFQSKESSSVLSCDISVDDKYIVTGSGDKKATVYEVIY

SEQ ID NO: 102512 - DNA, 2418 bp, Artificial Sequence
  derived and/or modified sequence
atgatccgcgatctttctaaaatgtatcctcagacccgacacccggccccacatcagcccgcacagcccttcaaattcaccatcagcgagtcttgcgatagaataaaggaggagttccaatttttgcaggctcagtatcatagcttaaagctcgaatgcgagaagttagccagtgaaaagacagagatgcaacgacattacgttatgtactatgaaatgagctatgggctcaacatcgaaatgcataagcaggcagagattgtcaagcgcttgaacgctatttgtgctcaggtgattcccttcctgtcccaggaacaccagcagcaagtggtgcaggcagtggaacgggcaaagcaggtgaccatggcagagctgaacgccatcataggccagcagctgcaagctcagcacctcagtcacggacatgggctcccagtgcccttaaccccacaccccagcggcttgcagcccccagccattcccccgatagggtcatccgcggggctgctggcgctgtcctccgcccttgggggtcagagccatctgcctatcaaagacgaaaagaagcatcacgataatgatcaccaacgcgaacgcgacaagttgaatcataaaagtctttcaccatcagcctctttccggggggcggagaaacatcggaactctgccgattatagttccgaatccaaaaaacagaaaaccgaagaaaaagagatcgctgccagatatgattcagacggcgagaaatcagatgacaatcttgtggtcgacgtctccaatgaggaccccagctccccccgcggctcacccgctcactctcctagggagaatggcctggacaagacacggttgctgaagaaggacgctcctatttcacccgccagcatcgcctcttcttctagtacaccgagcagcaaatcaaaggagctgagccttaaaagagatatggggaaactgtcagaaactcgcctcagcgaggacgagcagtgcacactcggactccaacgttggttctgccgcctttggttcatgaacgagaagtctacaacacccgtcagcaagagcaacactcctacaccaaggaccgatgcccccacgccaggtagcaactccaccccaggacttcgtcccgtcccggggaagccacccggtgttgatcccttggcatcctctttgaggaccccaatggcggtgccctgtccctatcccaccccatttggtattgtccctcatgcaggtatgaacggagagctgacatcgcccggtgccgcctacgctggcctacacaacatctcaccccagatgtccgctgccgctgccgccgctgccgctgcagctgcctacggccgatctcctgttgtgggctttgatccacaccaccacatgcgcgtccccgccatcccgcccaatctgaccggaattcccggcggaaagccagcatatagcttccacgtctcagcagacggtcaaatgcagcccgtccctttcccgcccgacgccctgattggaccaggaattcctagacacgcccggcagatcaatactcttaaccacggagaggtcgtatgcgcagttactatcagcaaccctacacgtcatgtatacacaggaggcaagggctgcgtgaaagtctgggacatatcacatccaggaaataaaagcccggtaagccagttggactgcctcaaccgggacaactacattcggagttgtaggctcctacctgatgggcggactctgatcgtagggggcgaggcttctaccctgtctatctgggacctggccgcacctacccctagaataaaagccgaactgacaagctccgcacccgcttgctacgctttggccattagccccgactcaaaagtgtgtttctcgtgctgctccgatggcaacatcgctgtgtgggacctccataaccagacactagtgaggcagtttcaagggcacaccgacggggctagctgtatagatatatctaacgacggcacaaagctgtggacaggcggcctggataacacagtaagaagctgggacctacgtgagggtcggcaattgcagcaacatgacttcacttcgcaaattttcagtctcggatattgccccacaggggaatggctcgctgttggcatggagaactctaacgtcgaagtattgcatgtgactaagcctgataaataccagcttcacctacacgagtcctgcgtcctttctctcaaattcgcccattgcggaaagtggttcgtgagtacaggtaaagacaatttactgaacgcctggcggacgccttacggggcatcaatattccaatcaaaggagtcttcaagcgttctgtcctgtgacatatcggtggatgacaagtacatcgtgactgggagtggggacaaaaaagctaccgtgtatgaggttatatattag

SEQ ID NO: 102513 - DNA, 2418 bp, Artificial Sequence
  derived and/or modified sequence
atgattcgggatctgtctaaaatgtatccgcagacccggcatcctgcaccccaccagcccgcccagccatttaagtttaccattagtgaaagttgtgaccgcatcaaggaggagttccaattcctccaagctcagtatcattcattgaaattggagtgtgagaagctcgcctccgagaaaacagagatgcagagacattacgtcatgtattacgaaatgtcttatgggcttaacattgagatgcataaacaggctgagatagttaagcgcttaaacgctatctgtgcccaagtcatcccatttctgtcccaggaacatcagcagcaggtcgtacaagctgtagaaagagcgaagcaggttaccatggcagaactcaatgctattatcgggcagcagctccaagcgcagcacctgagccacggacacggactgccagtgcctctcacaccccatccgtcaggcctccagccccccgcgattccccctatcggtagcagtgccggcttattggcgctgagtagtgccctgggtggccagagtcatctaccgattaaggacgagaaaaagcaccacgacaatgatcatcagcgcgaccgcgatagcataaaatcaagctcagtgtccccatccgcatcgtttaggggggccgagaaacataggaatagtgcggactattcatcagagtctaaaaagcagaagactgaggaaaaagagatagctgctaggtacgattcagacggggagaaaagtgatgacaatcttgtcgtggatgtgtccaacgaggatcctagcagcccgcgcggttcaccggcccattccccccgcgaaaatgggcttgataagactcgactgctgaagaaagacgcacccattagtcctgcctcgatcgcttcttcatctagcaccccatcctccaagtcaaaagagctgagcttgaagagagacatgggtaagctgagcgagactcgcctgagtgaggacgagcagtgcaccctcggcttacagcggtggttttgtcgcctctggttcatgaatgagaaatcaacgacccctgtgtcgaagagtaatactccgaccccccgaactgacgcccccactcctgggtccaactcaactcctggcctacggccagtccctggcaaaccacctggtgtcgacccattagcttcttctctcaggacacccatggccgttccttgtccataccctacgccctttgggattgtgccacacgccggcatgaacggcgaacttacttctccaggtgccgcctatgccggcttgcacaacatcagtccccagatgtcagccgcagcggcagccgcggcagccgccgccgcttacgggaggagcccggtggtagggttcgacccacaccatcacatgagagtcccagcaatcccaccgaacctgacggggatacctgggggaaaaccggcatactcattccacgtgtccgctgatggtcagatgcagccggtgccttttcccccagacgctctgatcggaccagggatcccccgccacgccaggcagattaatacactgaatcatggtgaggtggtgtgtgccgtcaccatttccaatccaacgaggcatgtgtacaccggcggcaaggggtgtgtcaaggtgtgggacatctcgcatcctggaaacaagagccctgtgtcccagttggattgtctgaacagagacaactatattcgtagctgtcgcctcctgcctgacgggagaacacttatcgtcggcggtgaagcaagcaccctgagtatctgggacctggccgccccgacgccccgcatcaaggctgaactgacaagttcagctccagcctgttatgccctggctatctctccagactccaaggtgtgtttttcttgttgctctgacggcaacatcgcggtttgggacctgcacaaccagacgctggtcagacagtttcaaggccacacggacggagcttcctgtatagatatttccaacgacggaaccaaactgtggaccggcggcctggacaacacggtccgcagctgggacctgagagaaggtcgccagctgcagcagcatgatttcacctcacagatcttcagtctcggctactgcccaacaggcgagtggctggcagttggtatggagaactctaacgtggaggtgttgcacgtgaccaaacctgacaagtatcagttgcatctgcacgagtcttgtgtgctgtctctgaagttcgcccactgtggcaaatggtttgtctcaactggaaaagataatctccttaacgcatggagaaccccctacggcgcaagtatttttcagagcaaagaaagttcctccgtgctgtcctgcgacatttccgtggatgataaatatatcgtgaccgggtctggcgacaaaaaggctaccgtgtacgaggtgatctactag

SEQ ID NO: 102514 - DNA, 2418 bp, Artificial Sequence
  derived and/or modified sequence
atgatccgggacctgagcaagatgtacccccagaccaggcacccagccccccaccagcctgcccagcccttcaagttcaccatcagcgagagctgtgaccgcatcaaggaggagttccagttcctgcaggcccagtaccacagcctgaagctggagtgtgagaagctggccagcgagaagacagagatgcagaggcactacgtgatgtactatgagatgtcctatggcctgaacatcgagatgcacaagcaggccgagatcgtgaagaggctgaatgccatctgtgcccaggtgatccccttcctgagccaggagcaccagcagcaggtggtgcaggccgtggagcgggccaagcaggtgaccatggccgagctgaatgccatcatcggccagcagctgcaggcccagcacctgagccacggccacggcctgcctgtgcccctgaccccccaccccagcggcctgcagcccccagccatcccccccatcggcagcagcgctggcctgctggccctgagcagcgccctgggcggccagagccacctgcccatcaaggatgagaagaagcaccacgacaatgaccaccagcgggagcgggacaagctgaaccacaagagcctgagccccagcgccagcttcagaggagctgagaagcacaggaacagcgctgactacagcagcgagagcaagaagcagaagacagaggagaaggagattgctgcccgctatgacagtgatggagagaagagtgatgacaacctggtggtggatgtgtccaatgaagaccccagcagcccccggggcagccctgcccacagcccccgggagaatggcctggacaagacccggctgctgaagaaggatgcccccatcagccctgccagcatcgccagcagcagcagcacccccagcagcaagagcaaggagctgagcctgaagagggacatgggcaagctgtctgagacccggctgtctgaagatgagcagtgcaccctgggcctgcagcgctggttctgccgcctgtggttcatgaatgagaagagcaccacccctgtgtccaagagcaacacccccacccccaggacagatgcccccaccccaggcagcaacagcaccccaggcctgcggcctgtgcctgggaagcccccaggagtggaccccctggccagcagcctgcggacccccatggctgtgccctgcccctaccccacccccttcggcatcgtgccccacgccggcatgaatggagagctgaccagccctggagctgcctatgccggcctgcacaacatcagcccccagatgtctgctgctgctgctgctgctgctgctgctgctgcctacggccgcagccctgtggtgggctttgacccccaccaccacatgagggtgcctgccatcccccccaacctgaccggcatccctgggggcaagccagcctacagcttccacgtgtctgcagatggccagatgcagcctgtgcccttccccccagatgccctgattggccctggcatccccaggcatgcccggcagatcaacaccctgaaccacggggaggtggtgtgtgctgtgaccatcagcaaccccaccaggcatgtgtacacaggaggcaagggctgtgtgaaggtgtgggacatcagccaccctggcaacaagagccctgtgtcccagctggactgcctgaacagagacaactacatccgcagctgccgcctgctgcctgatggccgcaccctgattgtgggcggggaggccagcaccctgagcatctgggacctggccgcccccaccccccgcatcaaggccgagctgaccagcagcgccccagcctgctacgccctggccatcagcccagacagcaaggtgtgcttcagctgctgcagtgatggcaacattgctgtgtgggacctgcacaaccagaccctggtgcggcagttccagggccacacagatggagccagctgcatcgacatcagcaatgatggcaccaagctgtggacaggaggcctggacaacacagtgcgctcctgggacctgcgggagggccggcagctgcagcagcacgacttcaccagccagatcttcagcctgggctactgccccactggagagtggctggccgtgggcatggagaacagcaatgtggaggtgctgcacgtgaccaagccagacaagtaccagctgcacctgcacgagagctgtgtgctgagcctgaagtttgcccactgtgggaagtggtttgtgtccacaggcaaggacaacctgctgaatgcctggaggaccccctacggggccagcatcttccagagcaaggagagcagctctgtgctgagctgtgacatctctgtggatgacaagtacatcgtgactggaagtggggacaagaaggccaccgtgtatgaagtcatctactag

SEQ ID NO: 102515 - DNA, 2418 bp, Artificial Sequence
  derived and/or modified sequence
atgatccgggacctgagcaagatgtacccccagaccaggcacccagccccccaccagcctgcccagcccttcaagttcaccatcagcgagagctgtgaccgcatcaaggaggagttccagttcctgcaggcccagtaccacagcctgaagctggagtgtgagaagctggccagcgagaagacagagatgcagaggcactacgtgatgtactatgagatgtcctatggcctgaacatcgagatgcacaagcaggccgagatcgtgaagaggctgaatgccatctgtgcccaggtgatccccttcctgagccaggagcaccagcagcaggtggtgcaggccgtggagcgggccaagcaggtgaccatggccgagctgaatgccatcatcggccagcagctgcaggcccagcacctgagccacggccacggcctgcctgtgcccctgaccccccaccccagcggcctgcagcccccagccatcccccccatcggcagcagcgctggcctgctggccctgagcagcgccctgggcggccagagccacctgcccatcaaggatgagaagaagcaccacgacaatgaccaccagagggaccgggacagcatcaagagcagctctgtgagccccagcgccagcttcagaggagctgagaagcacaggaacagcgctgactacagcagcgagagcaagaagcagaagacagaggagaaggagattgctgcccgctatgacagtgatggagagaagagtgatgacaacctggtggtggatgtgtccaatgaagaccccagcagcccccggggcagccctgcccacagcccccgggagaatggcctggacaagacccggctgctgaagaaggatgcccccatcagccctgccagcatcgccagcagcagcagcacccccagcagcaagagcaaggagctgagcctgaagagggacatgggcaagctgtctgagacccggctgtctgaagatgagcagtgcaccctgggcctgcagcgctggttctgccgcctgtggttcatgaatgagaagagcaccacccctgtgtccaagagcaacacccccacccccaggacagatgcccccaccccaggcagcaacagcaccccaggcctgcggcctgtgcctgggaagcccccaggagtggaccccctggccagcagcctgcggacccccatggctgtgccctgcccctaccccacccccttcggcatcgtgccccacgccggcatgaatggagagctgaccagccctggagctgcctatgccggcctgcacaacatcagcccccagatgtctgctgctgctgctgctgctgctgctgctgctgcctacggccgcagccctgtggtgggctttgacccccaccaccacatgagggtgcctgccatcccccccaacctgaccggcatccctgggggcaagccagcctacagcttccacgtgtctgcagatggccagatgcagcctgtgcccttccccccagatgccctgattggccctggcatccccaggcatgcccggcagatcaacaccctgaaccacggggaggtggtgtgtgctgtgaccatcagcaaccccaccaggcatgtgtacacaggaggcaagggctgtgtgaaggtgtgggacatcagccaccctggcaacaagagccctgtgtcccagctggactgcctgaacagagacaactacatccgcagctgccgcctgctgcctgatggccgcaccctgattgtgggcggggaggccagcaccctgagcatctgggacctggccgcccccaccccccgcatcaaggccgagctgaccagcagcgccccagcctgctacgccctggccatcagcccagacagcaaggtgtgcttcagctgctgcagtgatggcaacattgctgtgtgggacctgcacaaccagaccctggtgcggcagttccagggccacacagatggagccagctgcatcgacatcagcaatgatggcaccaagctgtggacaggaggcctggacaacacagtgcgctcctgggacctgcgggagggccggcagctgcagcagcacgacttcaccagccagatcttcagcctgggctactgccccactggagagtggctggccgtgggcatggagaacagcaatgtggaggtgctgcacgtgaccaagccagacaagtaccagctgcacctgcacgagagctgtgtgctgagcctgaagtttgcccactgtgggaagtggtttgtgtccacaggcaaggacaacctgctgaatgcctggaggaccccctacggggccagcatcttccagagcaaggagagcagctctgtgctgagctgtgacatctctgtggatgacaagtacatcgtgactggaagtggggacaagaaggccaccgtgtatgaagtcatctactag

SEQ ID NO: 102516 - DNA, 2418 bp, Artificial Sequence
  derived and/or modified sequence
atgatccgggacctgagcaagatgtacccccagacccggcaccccgctcctcaccagccagctcaaccctttaaattcacaatctcagaaagctgcgaccggattaaggaggagttccagttcctgcaggcccagtatcattcactcaagttagaatgtgagaagctcgcttctgaaaaaaccgagatgcagaggcactacgttatgtactacgagatgagctacggattgaatatcgagatgcacaaacaagcagaaattgtaaagaggctgaacgcaatctgtgcccaggtaataccttttctttctcaagagcatcagcagcaggtcgtccaggccgtcgaacgggccaagcaggtcacaatggccgagctcaatgctattatagggcagcaactgcaagcccaacatctgtcacatggacatggcctcccggtgcctctgacaccccatcccagcggactgcaacccccggccatacccccaatcgggtctagcgcaggacttctcgctctctctagtgccctggggggccagtcccatctgcctattaaagacgagaagaagcaccacgacaacgatcatcaacgggagcgggataagcttaatcacaaatcccttagtcccagtgcatcgttcagaggagctgagaagcatcggaactccgccgactatagcagtgaaagcaagaaacagaagacagaggaaaaggaaattgctgccagatatgactctgacggcgagaaatccgatgataacctggtggtcgacgtaagcaatgaagacccttctagccctagggggtcccccgcccactcccccagagagaatggactggataagacccggctcctcaaaaaagatgcccctattagcccagcttccatcgccagctctagcagtaccccaagctctaaatctaaagagttgtcactgaaacgcgacatgggcaaactttccgaaacgcggttgagcgaggatgagcagtgtacactgggattgcagcgatggttctgtcgtttgtggttcatgaacgaaaagtcaacaacgcccgtgtctaagagcaacacccccaccccacggactgatgcacccaccccaggcagcaattcgacaccgggacttagacctgtacctggtaaaccccctggcgttgatcccctggcgagctccctcagaaccccaatggctgtgccttgcccgtatcccactccattcgggattgtacctcatgcagggatgaacggcgaactaacctcccccggcgcagcctacgcaggacttcacaacatttctccgcagatgtctgctgctgcggccgccgccgctgcagccgccgcgtatgggcgctccccagtggtcggctttgatccccaccatcacatgcgcgtgccagcaatccccccgaaccttacaggcatccccggagggaagccagcttatagcttccacgtgtctgccgacgggcagatgcagcccgtgccattcccccccgatgcactgatcggtcccggcatacccaggcatgctcgccaaatcaataccctgaatcacggcgaagtggtctgtgcggtcaccatcagtaacccaacgagacacgtctacactggcggaaaaggctgtgttaaagtttgggacattagccacccaggcaataagagtcctgtatcccagttggattgcctcaatcgtgataattatatccgctcctgccgtctgctgcccgacggaagaacgctgattgtgggcggcgaggctagcacattatccatctgggacctagcagcccccacgcccaggatcaaagctgaattaacgagttctgctccagcttgttatgctctggccattagccctgactcaaaagtgtgcttttcatgttgttccgacggaaatatagctgtctgggacctgcacaaccagactctggtgcgccagtttcaggggcacactgatggggcttcctgtatcgacatcagcaatgatggcacaaaattgtggacaggcggactggacaacactgtgcgatcttgggacctgcgagaagggcggcagctgcaacaacacgatttcacgtctcaaattttctcattaggatactgcccaaccggtgaatggctggccgtcgggatggagaactcaaacgtggaggtgctccatgttaccaaaccagataagtatcagctgcacctccacgagagttgtgtgctgtcccttaaattcgctcactgtggcaagtggtttgtcagtacaggcaaggataacctgctcaacgcgtggcgtactccttatggcgcctctatattccagagtaaagaatcatcgtcagtgttgagctgcgacatctccgttgacgacaagtatattgttactggctccggagacaagaaagccactgtatatgaagtaatttactag

SEQ ID NO: 102517 - DNA, 2418 bp, Artificial Sequence
  derived and/or modified sequence
atgatccgggacctgagcaagatgtacccccagacccggcaccccgctccacaccagcctgcccagccctttaaattcactattagcgagagttgcgatagaatcaaagaggagtttcagtttctgcaggcacagtatcattctctgaagcttgaatgtgaaaagctggcaagtgagaagaccgagatgcaaagacactatgtcatgtactatgaaatgagttacgggcttaacattgaaatgcacaagcaggcagagattgttaagcggctgaacgcaatctgcgcacaggtgatacctttcctgtctcaggagcaccagcaacaggtggtccaagctgttgaaagagccaagcaggtgactatggcggagttgaatgccatcatcgggcagcagttgcaagcgcagcatctgagtcatgggcatggtctacctgtgccactgacaccgcacccatctgggctgcagccaccagccatcccccctattgggtccagcgccggactactggcccttagcagcgccctcggggggcaatcacatttacctattaaggacgaaaaaaagcaccacgacaacgatcaccaacgcgatcgggattcgataaagagctcctccgtttcaccttctgcaagctttcgaggggcggagaagcaccggaattccgcggactacagctctgaaagcaaaaagcaaaagacagaggaaaaggagattgccgcccgctatgattcggatggtgagaagtcagatgataatctggtcgtggacgtctccaacgaagacccaagcagccctagagggtcacctgctcactcgccacgggagaacggactggataagacccggctcctgaagaaggacgctcccattagccccgcttccatagcctcctcctcgtccactccctcatcaaagagcaaggaactctcattgaagcgagacatgggcaagttgtccgagacccggctgtccgaggatgagcagtgtaccctgggtctgcagagatggttctgtcgactttggtttatgaacgaaaaatcgaccactcctgtgagcaagtcaaacaccccaactccacgaaccgatgcacctacacctggatcgaattctacaccagggctgagacccgtacccggaaagcccccaggggtcgaccccctggccagttctctgcgaacccccatggctgtgccttgcccttacccaacgccctttgggatagtcccacatgcaggaatgaacggagagctcacgtcccccggcgccgcatacgccggtctgcataacatctccccgcagatgagcgccgctgccgctgcggccgccgcagcagcagcatacgggaggtcccctgtagtcggctttgaccctcaccaccatatgcgcgtgcctgctatcccccccaatctgacgggaataccaggggggaagcctgcttatagtttccacgtttcagccgatggccaaatgcaaccagtgccgtttccccccgatgccctgataggcccggggatcccacgtcatgccaggcagatcaacactcttaatcatggcgaggttgtctgcgccgtcactattagtaatcctacgaggcatgtctacaccggtgggaagggatgtgtgaaagtgtgggatatttcacatcctggcaataagtcacctgttagtcaactcgactgcttgaacagggacaattatataagaagctgccggctccttccggatggccggacactgatcgtgggtggcgaggcatcaaccctgagtatttgggatttggcggctcctacaccccggatcaaggccgaactgacaagcagcgcaccagcgtgttacgctctggcaatctcccccgacagtaaggtgtgcttcagctgttgcagcgacggaaacatcgctgtgtgggacctacacaatcaaacccttgtgaggcaatttcaaggccacaccgacggagccagctgcattgatatctccaatgatggaactaagctgtggactggaggactcgacaacaccgtccgctcatgggacctcagggagggcagacaactgcagcagcatgattttactagtcaaatcttcagcctgggatactgtcctacaggagagtggcttgccgtcggaatggagaattcaaatgttgaagtgcttcacgtgaccaagcccgataagtaccaactacacttgcacgagtcatgcgtattgagcttaaagtttgctcactgcggcaaatggtttgtgtctacaggaaaggataatcttctaaatgcgtggagaaccccttatggcgctagtatattccagagcaaagagagctcctctgtattgtcctgcgatatttctgtggacgataagtatatagtcacaggctccggcgacaagaaggctaccgtctatgaggtcatctactag

SEQ ID NO: 102518 - DNA, 2418 bp, Artificial Sequence
  derived and/or modified sequence
atgatcagggatctctctaagatgtatccccaaactagacaccccgcaccgcatcagccagcccagccttttaaatttactatcagtgagagttgcgaccggataaaagaagagttccagttcctgcaggcccagtaccacagtctgaagctagagtgtgagaagctggcttcggagaagacagagatgcagcgccattatgtgatgtattacgaaatgtcctacggactaaacatcgagatgcacaagcaggccgagattgtaaagaggctgaacgcaatttgcgcgcaagtgattccattcttgtcccaagagcatcaacaacaggtcgtccaggctgtggagcgagcaaaacaggtgaccatggccgaactgaacgccataataggtcagcagctgcaggctcagcacctttcacatggacacgggttgcccgtgcctctgaccccacatccatctggtctgcaaccacctgctattccaccaatcggttcttccgcagggttgctggccctgagttcagctttgggcggtcagtctcatctgccaatcaaggacgagaagaaacaccatgacaacgatcaccagagagagcgcgataaactcaaccataaaagtctctcccctagcgcctcttttaggggcgcagagaaacaccgaaattcagccgattacagctccgagagcaaaaagcaaaaaaccgaggagaaggagattgcagcccgatatgatagcgatggcgagaagagtgacgacaaccttgtcgtggacgtgagcaatgaagatcctagttctcccagggggtcacctgctcacagcccacgagaaaacggactcgataagactcggctgctgaagaaggatgccccaatcagcccggcatcgatcgcctctagctcaagcactccttcgagtaaaagtaaagagctcagtctgaaacgtgatatgggaaagctgtccgagacccgtctgtctgaggacgagcagtgcactcttgggctccagcgatggttttgcaggctgtggtttatgaacgagaagtcaacaactccagtgtctaagtccaatacacccaccccgagaactgatgctcctacaccaggatccaatagtacccctgggttgcgccctgtgcccggaaagccaccaggcgtggaccccctggcttctagccttaggaccccaatggcggtaccttgcccctacccaacgccctttggaatcgtcccacatgctggcatgaacggagagctgacctcaccaggcgctgcttatgctgggctgcacaacatttctccacagatgtccgctgcagccgcagcagcagccgcagctgctgcctatggacgctcaccggtggtaggctttgatcctcatcaccacatgcgggtccctgctatccctccaaacctgaccggaatccctgggggaaagccggcatatagctttcatgttagcgccgacgggcagatgcagcccgtcccattccctcccgatgccctgattggtccaggcatacctaggcatgctcggcagataaatacgctcaatcatggcgaagtggtatgcgccgtcactatctccaacccaaccaggcatgtgtacacagggggaaaaggatgtgtgaaagtttgggatatctctcaccccggaaacaaatcacctgtcagccagttggactgcttgaatcgggacaattacattagaagttgtcggctgctccctgacggacgtactctgattgtcggtggggaggcctccactctgtcaatatgggacctggccgcaccaacgcccaggatcaaggccgaattgactagtagtgccccagcctgttacgctctggctatttctcccgactctaaggtgtgtttcagctgctgttcagatggaaacatcgctgtgtgggatctccacaaccaaacccttgtgagacagtttcagggacataccgatggcgcttcctgtatcgacatatctaatgacggcacaaagctttggaccggtggcctggacaacactgtaagatcttgggatctccgagagggtagacagctgcagcagcatgatttcacctcacagatcttctcactcggatactgtcctacgggagaatggctggccgtcggcatggaaaattctaatgtggaagtcttgcacgtcacaaagcccgacaagtatcagctccaccttcacgagtcatgcgtcctcagcctcaagtttgcccattgcgggaagtggttcgtgagcactggcaaagataacctcctcaatgcctggcgcacaccctacggcgcaagcattttccagtccaaagagagctcatctgtcctgtcatgtgacatttccgtggatgacaaatatattgtgacagggagcggtgacaagaaggctactgtttacgaggtaatttactag

SEQ ID NO: 102519 - DNA, 2418 bp, Artificial Sequence
  derived and/or modified sequence
atgatccgtgatctgtccaagatgtacccacaaaccaggcatcctgctccccatcagcccgctcaaccctttaagttcacaatttctgaatcgtgcgataggataaaggaggaatttcagttcctgcaggcacagtaccacagcctgaagttagagtgcgaaaaattagcaagcgagaagactgagatgcagcggcattatgtcatgtattacgagatgagctatgggctgaacatcgagatgcacaagcaggctgagatcgttaaaaggctcaacgccatttgtgcccaggtcattccatttctgagccaggagcaccagcagcaggtagtgcaagccgtggagcgcgctaaacaagttactatggccgagctcaatgcaattattggacagcaattgcaagcacaacatttgtctcacggacatggcttacccgtgcctctcaccccccacccctcaggtttgcagccgcctgcaattcctcctattggttctagtgccggactcctcgctctatcttccgctctgggcggtcagagccacttaccaataaaagacgagaaaaagcatcacgataacgatcaccagcgagatcgagattctatcaagagctcctcagtgagccccagcgctagctttcggggagctgaaaaacacagaaactccgcagactattccagcgagtctaaaaagcaaaagactgaggagaaagaaatagctgccaggtatgactccgacggcgagaagagtgatgataatctggtcgttgacgtgagcaatgaagatccatccagtccgaggggctcccccgcacacagcccgagggagaacggtttggataagactcgactacttaaaaaggatgcccctattagccccgctagtattgcctcatcatcttccacaccatccagtaaatccaaggagctttccttaaagagagatatgggaaaactcagcgagacccggttgtccgaggatgaacaatgtacactggggctccagaggtggttctgtagactctggttcatgaacgagaaatctactaccccggtctcaaaatctaatacacctactccacgcacagacgccccaaccccgggaagcaacagcactccgggactccggcctgtccctgggaagcctcctggggtggatcctctggccagcagtctgcggactcccatggcagtaccgtgcccatatcctactccgtttgggattgtgccacacgcagggatgaacggcgaactcaccagcccaggagctgcatacgctggcctgcataatatcagtccccagatgtctgctgcagccgcagctgccgcagccgcagctgcctacggtcgttctcctgtggtggggttcgatccgcatcatcatatgcgggttccggctatacccccaaacctgacaggcatccccggaggcaagccggcatactctttccacgtgtccgccgacgggcagatgcagcctgtgccctttcccccagacgcattgattggacctgggattcccagacacgctaggcagattaacaccctgaaccatggggaagttgtgtgtgccgtgactatcagcaacccaacacgtcacgtctatacagggggaaaggggtgcgtaaaggtgtgggacattagtcacccagggaacaaatctcccgtgtctcagcttgactgtctgaatagagataattacatcagaagctgtcgtctgttacctgatggtcgtaccctgatcgtcgggggagaagccagcaccctatccatctgggatctggcagctcctacgcccaggatcaaagctgaactgacttcttcagccccagcttgctacgctctggccatcagcccagacagcaaagtctgtttttcctgctgcagcgatggcaatatcgccgtatgggatctgcacaaccaaacacttgtgcgacaattccagggtcatacggatggtgcatcatgtattgacatcagcaatgacgggacaaaactctggactggcggtctcgataatacagtgcggtcttgggatctgcgggaaggacgccagttgcagcagcacgattttacctcccagattttctcccttggatactgccccacaggagaatggctggcagtgggaatggagaacagtaatgtggaagtcttgcatgtaactaagccagataagtaccagctccatctgcatgaatcatgtgtcttaagcctgaagttcgcccattgtggcaagtggttcgtttccactgggaaggacaacttactaaacgcttggagaaccccatacggagcctccatttttcagtccaaggagtcttcgagcgtgcttagctgcgatatctcggtcgacgataaatatatcgtgactggctcgggtgataaaaaagcaactgtttatgaggtcatttactag

SEQ ID NO: 102520 - DNA, 4845 bp, Artificial Sequence
  derived and/or modified sequence
acagagcgtgttgttagagctgtgctgagcgggtgtttgggttgttggctgctttcttccccctttctcacacacttgtatattattttgaggtggtgttcgcagagtttgaaaggagagagaattaaaaaaaaaagccgcaagcgtttcactcttttatttttataatccccttcaatttggggttaaaaaaaagacaagaaaacaggaaggaagagaaataaggaaatgagatgtggtaaaagaagctaaaaggtgccttttaaaagatcgttgctgtgaagtgaaaaaaatctccagagaaaccaaaaagcaccgccgagacctcttccgaaccaaaggagtttgtgtttgcttttagggaagaagaaagatcattcattcggaggaataacaaccaattaaaagacaaataaaaaaagtttggagtgggacgcagagcgagcgagaggagctgccggcgggcggtggggcgcggagcccgcactttcccggccgggtgagcggcggccgcggcgccgggctcggcgggtgcgcctcggcggagcgaacgtcggagcgttgccttgggagacgcgcgccggacaatgcccgcggcgggccagtgacgcccgcggggaatgcggagcggcccggcagccggcacccagccgccgccgcgcgttcctgccgcccgtgtcacgcgagacccggcgggggccgggaccgcccgagccgcccctcagaccgagccggccgcctccgctgccgcggccgcctcctcttcggggtcattaaagccaatgagccgcgcgcctctgccgagcgcagccaactaaatcggcttggatgattcgcgacctgagcaagatgtacccgcagaccagacacccagcaccgcatcagcctgctcaaccctttaaatttacaatttccgaatcctgtgatcggattaaggaagagtttcagtttttacaggctcaataccacagtctgaagctggaatgtgagaaactcgccagtgagaagacagagatgcagcggcattatgtcatgtattatgaaatgtcctatgggttgaatatagaaatgcacaagcaggcagagattgtcaagaggctgaatgctatctgtgcacaagtcattcctttcctgtcccaagagcaccagcaacaagtggtgcaggctgtggaacgggccaagcaggtgaccatggcagaactgaacgccatcattgggcaacaactccaggcccagcatttatcacatggacatggtctccccgtacctctgactccacacccttcagggctccagccccctgccattccacccatcggtagcagtgccgggcttctggccctctccagtgctctaggaggtcagtcccatcttccaattaaagatgagaagaagcaccatgacaatgatcaccaaagagagagagacaaactcaaccacaaaagtttatccccatcagccagtttccgaggtgctgagaagcacagaaactccgcagactactcctcagagagcaaaaagcagaaaactgaagaaaaggaaattgcagctcgttatgacagcgatggtgagaaaagtgatgacaacttggtggttgacgtttccaatgaggatccatcttcccctcgagggagcccagcacattcccccagagagaatggcctagacaagacacgcctgctcaagaaagatgccccgattagtccagcctctattgcatcttccagcagtactccctcctccaaatccaaagaacttagccttaagagggatatggggaaattgagtgaaacacgtcttagcgaagatgaacaatgcacattggggttacagagatggttttgtcgcctgtggtttatgaatgaaaaatctactactcccgtctcaaagtccaatacccctactccacgaactgatgcgcccaccccaggcagtaactctactcccggattgaggcctgtacctggaaaaccaccaggagttgaccctttggcctcaagcctaaggaccccaatggcagtaccttgtccatatccaactccatttgggattgtgccccatgctggaatgaacggagagctgaccagccccggagcggcctacgctgggctccacaacatctcccctcagatgagcgcagctgctgccgccgccgctgctgctgctgcctatgggagatcaccagtggtgggatttgatccacaccatcacatgcgtgtgccagcaatacctccaaacctgacaggcattccaggaggaaaaccagcatactccttccatgttagcgcagatggtcagatgcagcctgtcccttttccacccgacgccctcatcggacctggaatcccccggcatgctcgccagatcaacaccctcaaccacggggaggtggtgtgcgcggtgaccatcagcaaccccacgagacacgtgtacacgggtgggaagggctgcgtcaaggtctgggacatcagccacccaggcaataagagtcctgtctcccagctcgactgtctgaacagggataactacatccgttcctgcagattgctccctgatggtcgcaccctaattgttggaggggaagccagtactttgtccatttgggacctggcggctccaaccccacgcatcaaggcagagctgacatcctcggcccccgcctgctatgccctggccatcagccccgattccaaggtctgcttctcatgctgcagcgacggcaacatcgctgtgtgggatctgcacaaccagaccttggtgaggcaattccagggccacacagatggagccagctgtattgacatttctaatgatggcaccaagctctggacaggtggtttggacaacacggtcaggtcctgggacctgcgcgaggggcggcagctgcagcagcacgacttcacctcccagatcttttctctgggctactgcccaactggagagtggcttgcagtggggatggagaacagcaatgtggaagttttgcatgtcaccaagccagacaaataccaactacatcttcatgagagctgtgtgctgtcgctcaagtttgcccattgtggcaaatggtttgtaagcactggaaaggacaaccttctgaatgcctggagaacaccttatggggccagtatattccagtccaaagaatcctcatcggtgcttagctgtgacatctccgtggacgacaaatacattgtcactggctctggggataagaaggccacagtttatgaagttatttattaaagacaaatcttcatgcagactggacttctcctcctggtagcactttgctctgtcatcctttttgttcacccccatccccgcatctaaaaccaaggatttcagatactcattgcagttgtggagtttaatcccctttcttaacctcacttcccacttgctattgaattgtgaatagtcattaaaaacctgtgataccaaatcttcagctgtctacttggaagaacatggaataagcatacttaacagtgaaaagaatctttaattatgtattatatctgtaatatatttattttgtttaaagaaggctttctaacaatgactgactaaataaagctgtctgctcctgcattgataatgaaggtgcgttgtatttgatacccctccccccctttttttggcaaaggaggggaaaggaaggtttaaaataattgatttaaaatgtcactaagtgtagactgatgactgtatagagatgtgaaatgtataattacacatggaagcaatatgttgctgtgttgttattaggttttttttgtttttgttttctacatcttttaaagacttttggaaatttggctgaacaattagaacacaacaggccaactcatactcatttggatctatttagacaacgttaaccaatatatctatagctttagattatattcgataaaagtaattggactttttttctttttttgactcgttgacaagtgtctttgtaatatgtttttagttccctttttttgttgtattataggcagatgaacaaattaaatttggcctcaaagagagaacttactcccttctggatatttttgccacatttctttgcaaaaggagatatatatatctttagtcagttttgttgttatgagaaattatgggttattttgtggcatgctctttgggagctgcacagttatggggaggactcccactgctgtgcaagttaagtcttttacaaaacaaggacagcagaggagggtttgcagagacctccctctgaaaaacacaaagaatggactctctcctgggatgaggacttgctttctttacctccggttctttccatgtcttagttggatgtccctgaaatggacacaggctgtgccattgtgccagaaacattgtgttatcttttatgttgttgttgttgctgttaaactataatatgtgacttctttttttattattttttgtttgaatgctttaaaaatcttttaagtctgtggatctgctgatgtacagtgcctttgctgctatggatcaaaatcaaaagaaccgtgtagatatactttattgtataagtagaaaattacttaatttcatactagaaatggatggatgctgcaagttgaaatggactgtccattgacgttcctaatgtggtagcagaaaaaaaaaaatggtgtcttaagtgcttagtgtttgatgtcattaacagtttcgtaaaactctacagtgtagaaagattttgatactaaactgtgcgttgtacatagttctaatgcattgtattgaccaccagtacttctataatggtagattgtttgtgaattcagacttttaagcattaaacataaataacttctagta

SEQ ID NO: 102521 - DNA, 2793 bp, Artificial Sequence
  derived and/or modified sequence
gccgccgcgcgttcctgccgcccgtgtcacgcgagacccggcgggggccgggaccgcccgagccgcccctcagaccgagccggccgcctccgctgccgcggccgcctcctcttcggggtcattaaagccaatgagccgcgcgcctctgccgagcgcagccaactaaatcggcttggatgattcgcgacctgagcaagatgtacccgcagaccagacacccagcaccgcatcagcctgctcaaccctttaaatttacaatttccgaatcctgtgatcggattaaggaagagtttcagtttttacaggctcaataccacagtctgaagctggaatgtgagaaactcgccagtgagaagacagagatgcagcggcattatgtcatgtattatgaaatgtcctatgggttgaatatagaaatgcacaagcaggcagagattgtcaagaggctgaatgctatctgtgcacaagtcattcctttcctgtcccaagagcaccagcaacaagtggtgcaggctgtggaacgggccaagcaggtgaccatggcagaactgaacgccatcattgggcaacaactccaggcccagcatttatcacatggacatggtctccccgtacctctgactccacacccttcagggctccagccccctgccattccacccatcggtagcagtgccgggcttctggccctctccagtgctctaggaggtcagtcccatcttccaattaaagatgagaagaagcaccatgacaatgatcaccaaagagacagagactccatcaagagctcttcagtatccccatcagccagtttccgaggtgctgagaagcacagaaactccgcagactactcctcagagagcaaaaagcagaaaactgaagaaaaggaaattgcagctcgttatgacagcgatggtgagaaaagtgatgacaacttggtggttgacgtttccaatgaggatccatcttcccctcgagggagcccagcacattcccccagagagaatggcctagacaagacacgcctgctcaagaaagatgccccgattagtccagcctctattgcatcttccagcagtactccctcctccaaatccaaagaacttagccttaagagggatatggggaaattgagtgaaacacgtcttagcgaagatgaacaatgcacattggggttacagagatggttttgtcgcctgtggtttatgaatgaaaaatctactactcccgtctcaaagtccaatacccctactccacgaactgatgcgcccaccccaggcagtaactctactcccggattgaggcctgtacctggaaaaccaccaggagttgaccctttggcctcaagcctaaggaccccaatggcagtaccttgtccatatccaactccatttgggattgtgccccatgctggaatgaacggagagctgaccagccccggagcggcctacgctgggctccacaacatctcccctcagatgagcgcagctgctgccgccgccgctgctgctgctgcctatgggagatcaccagtggtgggatttgatccacaccatcacatgcgtgtgccagcaatacctccaaacctgacaggcattccaggaggaaaaccagcatactccttccatgttagcgcagatggtcagatgcagcctgtcccttttccacccgacgccctcatcggacctggaatcccccggcatgctcgccagatcaacaccctcaaccacggggaggtggtgtgcgcggtgaccatcagcaaccccacgagacacgtgtacacgggtgggaagggctgcgtcaaggtctgggacatcagccacccaggcaataagagtcctgtctcccagctcgactgtctgaacagggataactacatccgttcctgcagattgctccctgatggtcgcaccctaattgttggaggggaagccagtactttgtccatttgggacctggcggctccaaccccacgcatcaaggcagagctgacatcctcggcccccgcctgctatgccctggccatcagccccgattccaaggtctgcttctcatgctgcagcgacggcaacatcgctgtgtgggatctgcacaaccagaccttggtgaggcaattccagggccacacagatggagccagctgtattgacatttctaatgatggcaccaagctctggacaggtggtttggacaacacggtcaggtcctgggacctgcgcgaggggcggcagctgcagcagcacgacttcacctcccagatcttttctctgggctactgcccaactggagagtggcttgcagtggggatggagaacagcaatgtggaagttttgcatgtcaccaagccagacaaataccaactacatcttcatgagagctgtgtgctgtcgctcaagtttgcccattgtggcaaatggtttgtaagcactggaaaggacaaccttctgaatgcctggagaacaccttatggggccagtatattccagtccaaagaatcctcatcggtgcttagctgtgacatctccgtggacgacaaatacattgtcactggctctggggataagaaggccacagtttatgaagttatttattaaagacaaatcttcatgcagactggacttctcctcctggtagcactttgctctgtcatcctttttgttcacccccatccccgcatctaaaaccaaggatttcagatactcattgcagttgtggagtttaatcccctttcttaacctcacttcccacttgctattgaattgtgaatagtcattaaaaacctgtgataccaaa

SEQ ID NO: 102522 - DNA, 2418 bp, Artificial Sequence
  derived and/or modified sequence
atgatcagagacctgagcaagatgtacccccagaccagacaccccgccccccaccagcccgcccagcccttcaagttcaccatcagcgagagctgcgacagaatcaaggaggagttccagttcctgcaggcccagtaccacagcctgaagctggagtgcgagaagctggccagcgagaagaccgagatgcagagacactacgtgatgtactacgagatgagctacggcctgaacatcgagatgcacaagcaggccgagatcgtgaagagactgaacgccatctgcgcccaggtgatccccttcctgagccaggagcaccagcagcaggtggtgcaggccgtggagagagccaagcaggtgaccatggccgagctgaacgccatcatcggccagcagctgcaggcccagcacctgagccacggccacggcctgcccgtgcccctgaccccccaccccagcggcctgcagccccccgccatcccccccatcggcagcagcgccggcctgctggccctgagcagcgccctgggcggccagagccacctgcccatcaaggacgagaagaagcaccacgacaacgaccaccagagagagagagacaagctgaaccacaagagcctgagccccagcgccagcttcagaggcgccgagaagcacagaaacagcgccgactacagcagcgagagcaagaagcagaagaccgaggagaaggagatcgccgccagatacgacagcgacggcgagaagagcgacgacaacctggtggtggacgtgagcaacgaggaccccagcagccccagaggcagccccgcccacagccccagagagaacggcctggacaagaccagactgctgaagaaggacgcccccatcagccccgccagcatcgccagcagcagcagcacccccagcagcaagagcaaggagctgagcctgaagagagacatgggcaagctgagcgagaccagactgagcgaggacgagcagtgcaccctgggcctgcagagatggttctgcagactgtggttcatgaacgagaagagcaccacccccgtgagcaagagcaacacccccacccccagaaccgacgcccccacccccggcagcaacagcacccccggcctgagacccgtgcccggcaagccccccggcgtggaccccctggccagcagcctgagaacccccatggccgtgccctgcccctaccccacccccttcggcatcgtgccccacgccggcatgaacggcgagctgaccagccccggcgccgcctacgccggcctgcacaacatcagcccccagatgagcgccgccgccgccgccgccgccgccgccgccgcctacggcagaagccccgtggtgggcttcgacccccaccaccacatgagagtgcccgccatcccccccaacctgaccggcatccccggcggcaagcccgcctacagcttccacgtgagcgccgacggccagatgcagcccgtgcccttcccccccgacgccctgatcggccccggcatccccagacacgccagacagatcaacaccctgaaccacggcgaggtggtgtgcgccgtgaccatcagcaaccccaccagacacgtgtacaccggcggcaagggctgcgtgaaggtgtgggacatcagccaccccggcaacaagagccccgtgagccagctggactgcctgaacagagacaactacatcagaagctgcagactgctgcccgacggcagaaccctgatcgtgggcggcgaggccagcaccctgagcatctgggacctggccgcccccacccccagaatcaaggccgagctgaccagcagcgcccccgcctgctacgccctggccatcagccccgacagcaaggtgtgcttcagctgctgcagcgacggcaacatcgccgtgtgggacctgcacaaccagaccctggtgagacagttccagggccacaccgacggcgccagctgcatcgacatcagcaacgacggcaccaagctgtggaccggcggcctggacaacaccgtgagaagctgggacctgagagagggcagacagctgcagcagcacgacttcaccagccagatcttcagcctgggctactgccccaccggcgagtggctggccgtgggcatggagaacagcaacgtggaggtgctgcacgtgaccaagcccgacaagtaccagctgcacctgcacgagagctgcgtgctgagcctgaagttcgcccactgcggcaagtggttcgtgagcaccggcaaggacaacctgctgaacgcctggagaaccccctacggcgccagcatcttccagagcaaggagagcagcagcgtgctgagctgcgacatcagcgtggacgacaagtacatcgtgaccggcagcggcgacaagaaggccaccgtgtacgaggtgatctactag

SEQ ID NO: 102523 - DNA, 2418 bp, Artificial Sequence
  derived and/or modified sequence
atgatcagagacctgagcaagatgtacccccagaccagacaccccgccccccaccagcccgcccagcccttcaagttcaccatcagcgagagctgcgacagaatcaaggaggagttccagttcctgcaggcccagtaccacagcctgaagctggagtgcgagaagctggccagcgagaagaccgagatgcagagacactacgtgatgtactacgagatgagctacggcctgaacatcgagatgcacaagcaggccgagatcgtgaagagactgaacgccatctgcgcccaggtgatccccttcctgagccaggagcaccagcagcaggtggtgcaggccgtggagagagccaagcaggtgaccatggccgagctgaacgccatcatcggccagcagctgcaggcccagcacctgagccacggccacggcctgcccgtgcccctgaccccccaccccagcggcctgcagccccccgccatcccccccatcggcagcagcgccggcctgctggccctgagcagcgccctgggcggccagagccacctgcccatcaaggacgagaagaagcaccacgacaacgaccaccagagagacagagacagcatcaagagcagcagcgtgagccccagcgccagcttcagaggcgccgagaagcacagaaacagcgccgactacagcagcgagagcaagaagcagaagaccgaggagaaggagatcgccgccagatacgacagcgacggcgagaagagcgacgacaacctggtggtggacgtgagcaacgaggaccccagcagccccagaggcagccccgcccacagccccagagagaacggcctggacaagaccagactgctgaagaaggacgcccccatcagccccgccagcatcgccagcagcagcagcacccccagcagcaagagcaaggagctgagcctgaagagagacatgggcaagctgagcgagaccagactgagcgaggacgagcagtgcaccctgggcctgcagagatggttctgcagactgtggttcatgaacgagaagagcaccacccccgtgagcaagagcaacacccccacccccagaaccgacgcccccacccccggcagcaacagcacccccggcctgagacccgtgcccggcaagccccccggcgtggaccccctggccagcagcctgagaacccccatggccgtgccctgcccctaccccacccccttcggcatcgtgccccacgccggcatgaacggcgagctgaccagccccggcgccgcctacgccggcctgcacaacatcagcccccagatgagcgccgccgccgccgccgccgccgccgccgccgcctacggcagaagccccgtggtgggcttcgacccccaccaccacatgagagtgcccgccatcccccccaacctgaccggcatccccggcggcaagcccgcctacagcttccacgtgagcgccgacggccagatgcagcccgtgcccttcccccccgacgccctgatcggccccggcatccccagacacgccagacagatcaacaccctgaaccacggcgaggtggtgtgcgccgtgaccatcagcaaccccaccagacacgtgtacaccggcggcaagggctgcgtgaaggtgtgggacatcagccaccccggcaacaagagccccgtgagccagctggactgcctgaacagagacaactacatcagaagctgcagactgctgcccgacggcagaaccctgatcgtgggcggcgaggccagcaccctgagcatctgggacctggccgcccccacccccagaatcaaggccgagctgaccagcagcgcccccgcctgctacgccctggccatcagccccgacagcaaggtgtgcttcagctgctgcagcgacggcaacatcgccgtgtgggacctgcacaaccagaccctggtgagacagttccagggccacaccgacggcgccagctgcatcgacatcagcaacgacggcaccaagctgtggaccggcggcctggacaacaccgtgagaagctgggacctgagagagggcagacagctgcagcagcacgacttcaccagccagatcttcagcctgggctactgccccaccggcgagtggctggccgtgggcatggagaacagcaacgtggaggtgctgcacgtgaccaagcccgacaagtaccagctgcacctgcacgagagctgcgtgctgagcctgaagttcgcccactgcggcaagtggttcgtgagcaccggcaaggacaacctgctgaacgcctggagaaccccctacggcgccagcatcttccagagcaaggagagcagcagcgtgctgagctgcgacatcagcgtggacgacaagtacatcgtgaccggcagcggcgacaagaaggccaccgtgtacgaggtgatctactag

SEQ ID NO: 102524 - protein, 748 aa, Artificial Sequence
  derived and/or modified sequence
MIRDLSKMYPQTRHPAPHQPAQPFKFTISESCDRIKEEFQFLQAQYHSLKLECEKLASEKTEMQRHYVMYYEMSYGLNIEMHKQAEIVKRLNAICAQVIPFLSQEQQLQAQHLSHGHGLPVPLTPHPSGLQPPAIPPIGSSAGLLALSSALGGQSHLPIKDEKKHHDNDHQRDRDSIKSSSVSPSASFRGAEKHRNSADYSSESKKQKTEEKEIAARYDSDGEKSDDNLVVDVSNEDPSSPRGSPAHSPRENGLDKTRLLKKDAPISPASIASSSSTPSSKSKELSLNEKSTTPVSKSNTPTPRTDAPTPGSNSTPGLRPVPGKPPGVDPLASSLRTPMAVPCPYPTPFGIVPHAGMNGELTSPGAAYAGLHNISPQMSAAAAAAAAAAAYGRSPVVGFDPHHHMRVPAIPPNLTGIPGGKPAYSFHVSADGQMQPVPFPPDALIGPGIPRHARQINTLNHGEVVCAVTISNPTRHVYTGGKGCVKVWDISHPGNKSPVSQLDCLNRDNYIRSCRLLPDGRTLIVGGEASTLSIWDLAAPTPRIKAELTSSAPACYALAISPDSKVCFSCCSDGNIAVWDLHNQTLVRQFQGHTDGASCIDISNDGTKLWTGGLDNTVRSWDLREGRQLQQHDFTSQIFSLGYCPTGEWLAVGMENSNVEVLHVTKPDKYQLHLHESCVLSLKFAHCGKWFVSTGKDNLLNAWRTPYGASIFQSKESSSVLSCDISVDDKYIVTGSGDKKATVYEVIY

SEQ ID NO: 102525 - DNA, 2247 bp, Artificial Sequence
  derived and/or modified sequence
atgatcagagacctgagtaagatgtacccccagaccaggcaccctgctcctcatcagccggcacaacctttcaaatttaccatcagtgagagctgtgatcgcattaaagaggagtttcagtttctgcaggctcagtatcattcattgaagctggaatgcgagaagctagcatctgagaagacggagatgcagcgacactacgtcatgtattatgagatgtcatacggtcttaatatcgagatgcataagcaagcggagatagtgaaaaggttaaatgccatctgcgcccaggtgatccccttcttgtcccaggagcagcagctgcaggcccagcacctttcccatggccacggtcttccagtgcccctcactccccacccgtcaggactgcagccccccgccattcctccgatcggaagcagcgccggcctgctggccctgagctctgcactgggcggccaaagccatctacccattaaggatgaaaaaaagcatcacgataatgatcaccaaagggatagagactctattaaatcctccagcgtgtccccttctgctagctttagaggagcagagaagcacagaaatagcgccgactactctagtgagagtaaaaagcagaagacagaggaaaaggagatcgctgcaaggtacgacagcgatggcgagaaatctgatgataatctggtagtagacgtctccaatgaagatccatcatctccccgaggtagtcctgctcacagcccaagggaaaacgggcttgacaagactcgtttactgaaaaaggacgcccccataagccccgctagtatagcttcaagctccagtacccctagcagtaagagcaaggagctctctcttaatgaaaagagtactactcctgtgagcaagtcaaacacaccaactccccggaccgacgctccaactcctggatctaattctactcctggtctgcggccagtgcctggcaagccccccggggtggatccactggccagctctctgcggacacccatggctgttccctgtccctatcccactcctttcggaattgtgccacacgctgggatgaacggtgaattgacctccccaggggcggcgtacgcggggcttcacaatatttccccgcagatgagcgcggccgcagctgccgccgctgcagccgctgcatatggcagaagtccagtggtcgggtttgatccacatcatcacatgcgagtaccagccatccctccaaacctcaccgggattccagggggaaagcccgcatattcttttcacgttagcgcagatggtcagatgcagccagtgccgttcccccctgacgctttgatcggaccggggattccgcgccacgcacgacagattaataccctgaaccacggcgaagtggtttgcgcagtgacaatttcgaaccccacaaggcatgtgtatacgggaggaaaaggctgcgtcaaagtctgggatatcagccatcctggcaacaagagtcccgtaagtcaactggattgcctgaatcgggacaactatatcagaagctgtcggctgttaccggatggccgtacacttattgtgggaggagaagcctcaacactgtccatctgggacctggcggcccccacgccaagaattaaagccgagttgacttcgtctgcccctgcctgttatgccttagccatctcaccagatagcaaagtgtgcttttcctgctgtagtgatgggaacattgccgtgtgggatctgcacaaccaaactctggtcaggcagttccagggccacactgatggcgcatcatgcatcgatatcagcaacgacggaaccaagctgtggacagggggtctggacaacacagtaagaagttgggacctcagagagggccggcagctccagcaacacgattttacaagtcaaattttctccctgggatactgcccaactggcgagtggcttgcagtgggcatggagaatagcaatgtggaggtgctgcacgtgacaaagcccgacaaataccagctccacctccatgagtcatgcgtcctttccctcaagttcgcccattgtgggaagtggtttgtgagcacaggtaaagataatcttctgaacgcatggcgcacaccttatggagcttcaatattccagtcgaaggagtcctcctcggtgctttcttgtgatatctctgtggacgacaagtacatagttaccgggtccggcgataaaaaagcaactgtatacgaggtcatttactag

SEQ ID NO: 102526 - DNA, 2247 bp, Artificial Sequence
  derived and/or modified sequence
atgatccgggacctgagcaagatgtacccccagaccaggcacccagccccccaccagcctgcccagcccttcaagttcaccatcagcgagagctgtgaccgcatcaaggaggagttccagttcctgcaggcccagtaccacagcctgaagctggagtgtgagaagctggccagcgagaagacagagatgcagaggcactacgtgatgtactatgagatgtcctatggcctgaacatcgagatgcacaagcaggccgagatcgtgaagaggctgaatgccatctgtgcccaggtgatccccttcctgagccaggagcagcagctgcaggcccagcacctgagccacggccacggcctgcctgtgcccctgaccccccaccccagcggcctgcagcccccagccatcccccccatcggcagcagcgctggcctgctggccctgagcagcgccctgggcggccagagccacctgcccatcaaggatgagaagaagcaccacgacaatgaccaccagagggaccgggacagcatcaagagcagctctgtgagccccagcgccagcttcagaggagctgagaagcacagaaattctgctgactacagcagcgagagcaagaagcagaagacagaggagaaggagattgctgcccgctatgacagtgatggagagaagagtgatgacaacctggtggtggatgtgtccaatgaagaccccagcagcccccggggcagccctgcccacagccccagagaaaatggcctggacaagacccggctgctgaagaaggatgcccccatcagccctgccagcatcgccagcagcagcagcacccccagcagcaagagcaaggagctgagcctgaatgagaagagcaccacccctgtgtccaagagcaacacccccacccccaggacagatgcccccaccccaggcagcaacagcaccccaggcctgcggcctgtgcctgggaagcccccaggagtggaccccctggccagcagcctgcggacccccatggctgtgccctgcccctaccccaccccatttggaattgtgccccatgctggcatgaatggagagctgaccagccctggggccgcctatgccggcctgcacaacatcagcccccagatgtctgctgctgctgctgctgctgctgctgctgctgcctacggccgcagccctgtggtgggctttgacccccaccaccacatgagggtgcctgccatcccccccaacctgaccggcatccctgggggcaagccagcctacagcttccacgtgtctgcagatggccagatgcagcctgtgcccttccccccagatgccctgattggccctggcatccccaggcatgcccggcagatcaacaccctgaaccacggggaggtggtgtgtgctgtgaccatcagcaaccccaccaggcatgtgtacacaggaggcaagggctgtgtgaaggtgtgggacatcagccaccctggcaacaagagccctgtgtcccagctggactgcctgaacagagacaactacatccgcagctgccgcctgctgcctgatggccgcaccctcatcgtgggcggggaggccagcaccctgagcatctgggacctggccgcccccaccccccgcatcaaggccgagctgaccagcagcgccccagcctgctacgccctggccatcagcccagacagcaaggtgtgcttcagctgctgcagtgatggcaacattgctgtgtgggacctgcacaaccagaccctggtgcggcagttccagggccacacagatggagccagctgcatcgacatcagcaatgatggcaccaagctgtggacaggaggcctggacaacacagtgcgctcctgggacctgcgggagggccggcagctgcagcagcacgacttcaccagccagatcttcagcctgggctactgccccaccggggagtggctggccgtgggcatggagaacagcaatgtggaggtgctgcacgtgaccaagccagacaagtaccagctgcacctgcacgagagctgtgtgctgagcctgaagtttgcccactgcggcaagtggtttgtgtccacaggcaaggacaacctgctgaatgcctggaggaccccctatggagccagcatcttccagagcaaggagagcagctctgtgctgagctgtgacatctctgtggatgacaagtacatcgtgacaggcagcggggacaagaaggccaccgtgtatgaggtgatctactag

SEQ ID NO: 102527 - DNA, 2247 bp, Artificial Sequence
  derived and/or modified sequence
atgatccgggacctgagcaagatgtacccccagacccggcaccccgccccacaccagccagctcaaccgttcaagtttacaatcagcgagtcttgtgataggataaaggaggaatttcaattccttcaggcacagtatcacagcttaaaattagaatgcgagaaacttgcatccgagaagactgaaatgcaacgtcattatgttatgtactacgaaatgtcttacggactgaacatcgagatgcacaagcaggctgaaatcgtaaagcgtctgaacgctatatgcgctcaagtgataccattcctatcacaagagcagcagctccaagcccagcatctatcacacggacatgggctgcctgtcccgctgacaccccacccttccggcctgcagccccctgcaattccccccatcggcagctcagcagggttgttggccctgtccagcgccttaggagggcaatcccaccttccaataaaagatgagaagaagcaccacgacaatgatcatcagagggaccgggacagtataaaaagctcttccgtctcaccaagcgcctctttcaggggagccgaaaagcatcgaaactcggcagattacagcagcgaaagtaaaaagcaaaagacagaggagaaggaaattgcagcccggtatgactcagatggggaaaagtcagacgataatcttgttgtggacgtctccaatgaagacccctctagccctcggggatctccagcacacagtccacgagaaaatggtctggacaagacgagactgctgaagaaagacgcacccattagtcctgcctcgatagcatcgtcaagctcaacaccctcttctaagtccaaagaactctcactgaatgagaagtcaacaacccctgtctcaaagagtaatacccccacaccacggactgatgcacccacgccagggagcaacagtacgcctggactgcgtcctgtccctggtaagccccctggtgtagaccctttggcatcctcccttcgtacccctatggccgttccgtgtccttatcctaccccatttggcattgtccctcacgctggaatgaacggggaactcacgagccccggtgctgcctacgctgggcttcataacatttcgcctcaaatgtctgccgcagcagccgccgcagctgccgccgccgcttatggcagatcccccgtggtgggtttcgatcctcaccaccatatgcgggtccccgccatcccgcctaacctgacgggaattcccggaggcaagccggcgtactcattccacgtgagcgccgatggccagatgcaaccggtcccatttcctccggacgccctgattggtcctggaattccaagacatgctcgacagattaacactctaaaccacggcgaagttgtatgtgcagtcacaattagcaacccgaccaggcacgtatacaccggaggaaaaggctgcgtaaaggtgtgggacatttcccacccaggaaacaagtccccggttagtcagctcgattgtctgaatcgagataattacatacgttcctgtcggttattacccgacggacggacactaatcgttggaggagaagcttctactctctcaatttgggatctggctgcccctacaccacgaattaaggctgagctgacaagctcagctcctgcatgctatgccctcgcgatatcacctgactccaaggtgtgtttctcctgctgttcagatgggaacatcgccgtctgggatcttcacaaccagaccttggtgagacagtttcagggtcatacagatggcgcctcatgtatcgacatctcaaacgatgggaccaaactttggactggcgggctagacaacactgtgcggtcctgggatcttcgtgagggcaggcagctgcagcagcatgatttcacatctcaaatattttccttgggctattgccccactggtgaatggttagccgtgggcatggaaaactccaacgtggaagtactgcacgtcaccaagcctgataaatatcagctgcacttacacgagagctgcgtgcttagtcttaagttcgcacactgtggcaaatggttcgtgtccacgggaaaagataatcttcttaatgcatggcgaacgccatatggggctagcatcttccagtctaaagagtccagcagcgtgctctcttgcgacatttctgtcgacgataaatacatagtgaccggtagcggtgacaaaaaggctaccgtatacgaagtgatctactag

SEQ ID NO: 102528 - DNA, 2247 bp, Artificial Sequence
  derived and/or modified sequence
atgatccgagacctgagtaaaatgtacccccaaacacgacacccagcccctcatcaacctgcccaacctttcaagttcacaatttccgagagctgtgacaggatcaaagaagagtttcagttcctccaggcccagtatcattctctgaaacttgagtgcgagaaactggcaagcgaaaaaactgagatgcagagacactatgtgatgtactatgaaatgtcttatggtctgaacatcgagatgcataaacaggccgagatcgttaagcggctgaatgccatctgcgctcaggtgatacccttccttagtcaggagcagcagttacaggctcagcacctctcacatgggcacggcctacctgtgccactgacaccacacccttcaggactacaaccacctgctataccccctatcggatcttccgccggactactggccctgagtagcgccctggggggtcagtcgcacctcccaattaaggacgagaaaaagcaccacgacaatgatcaccagcgcgatcgtgattcaattaagtcatccagcgtctccccatctgcctcgtttagaggggctgagaaacaccggaactctgcagattacagtagcgagtccaaaaaacaaaaaactgaggaaaaggagatcgccgctagatacgattctgatggcgagaaaagcgacgataacttagtcgtggacgtcagcaatgaagacccctcatcacccagggggtcccctgcccatagccctagagagaacggcttggacaaaactagacttctaaaaaaggacgccccaatttcccctgcatctatagcaagttctagctccaccccatcaagtaagtccaaagaactgagcttaaacgagaagtctactaccccagtgtcaaagagcaacacacctacccccaggacagacgcccctacaccaggcagcaattcaactcccggactgcgccctgttcccggaaagccacccggagtagaccccttggcttcatcgctgagaactccaatggccgtgccttgtccatacccaacgccatttggcattgtgccgcacgcaggaatgaatggcgaacttaccagcccaggggctgcatatgcaggcttgcacaatattagcccccagatgagtgccgcagcggctgcagcagctgccgctgccgcatatggcagaagtccagtcgtcgggtttgatccccaccatcatatgagagtgccagcgatcccacccaatttaactggcatcccaggtggtaagcctgcatactcgtttcacgtaagtgcagacggccagatgcagccagtgccctttccccctgatgctctcatcgggccaggtatacctaggcacgccagacagattaacaccctgaaccacggggaggtggtttgtgcagtcaccatttccaaccccacccgccatgtatatactgggggaaagggatgcgtgaaagtgtgggacatctctcacccaggtaacaaatctcccgtgtcccaattagactgtctgaaccgcgataattatatcagaagctgtagactcctgccagacggtcgtacattaatagtggggggtgaggcaagcacgctgagcatttgggacttagcggctcccactcccagaattaaggccgaactgaccagtagcgctccagcttgttacgccctcgccatcagtcccgactcaaaggtgtgttttagttgctgctcggacggcaacatagctgtctgggacttgcacaaccagaccctggtgcgtcagttccagggccacaccgatggcgctagctgcatcgacatctctaacgatggtacaaaattgtggaccggcggtctggacaacaccgtgagaagttgggatctgcgggaaggacgtcagctccagcaacacgatttcaccagtcagatctttagcctcggttattgcccaacaggtgagtggctagctgtagggatggagaactccaacgtggaggtgttacatgtgacaaagcctgataaataccagttgcacctgcacgagtcttgcgtactgagtctgaagttcgcccattgtggcaagtggtttgtgtcaacagggaaggacaacttgctaaacgcttggcgaactccttatggagctagtatcttccagtctaaagaaagttcaagtgtgctgagctgcgatatttccgtagacgacaagtacatagtgactgggagtggagacaagaaagctaccgtgtacgaggtcatttactag

SEQ ID NO: 102529 - DNA, 2382 bp, Artificial Sequence
  derived and/or modified sequence
atgagccgcgcgcctctgccgagcgcagccaactaaatcggcttggatgattcgcgacctgagcaagatgtacccgcagaccagacacccagcaccgcatcagcctgctcaaccctttaaatttacaatttccgaatcctgtgatcggattaaggaagagtttcagtttttacaggctcaataccacagtctgaagctggaatgtgagaaactcgccagtgagaagacagagatgcagcggcattatgtcatgtattatgaaatgtcctatgggttgaatatagaaatgcacaagcaggcagagattgtcaagaggctgaatgctatctgtgcacaagtcattcctttcctgtcccaagagcaacaactccaggcccagcatttatcacatggacatggtctccccgtacctctgactccacacccttcagggctccagccccctgccattccacccatcggtagcagtgccgggcttctggccctctccagtgctctaggaggtcagtcccatcttccaattaaagatgagaagaagcaccatgacaatgatcaccaaagagacagagactccatcaagagctcttcagtatccccatcagccagtttccgaggtgctgagaagcacagaaactccgcagactactcctcagagagcaaaaagcagaaaactgaagaaaaggaaattgcagctcgttatgacagcgatggtgagaaaagtgatgacaacttggtggttgacgtttccaatgaggatccatcttcccctcgagggagcccagcacattcccccagagagaatggcctagacaagacacgcctgctcaagaaagatgccccgattagtccagcctctattgcatcttccagcagtactccctcctccaaatccaaagaacttagccttaatgaaaaatctactactcccgtctcaaagtccaatacccctactccacgaactgatgcgcccaccccaggcagtaactctactcccggattgaggcctgtacctggaaaaccaccaggagttgaccctttggcctcaagcctaaggaccccaatggcagtaccttgtccatatccaactccatttgggattgtgccccatgctggaatgaacggagagctgaccagccccggagcggcctacgctgggctccacaacatctcccctcagatgagcgcagctgctgccgccgccgctgctgctgctgcctatgggagatcaccagtggtgggatttgatccacaccatcacatgcgtgtgccagcaatacctccaaacctgacaggcattccaggaggaaaaccagcatactccttccatgttagcgcagatggtcagatgcagcctgtcccttttccacccgacgccctcatcggacctggaatcccccggcatgctcgccagatcaacaccctcaaccacggggaggtggtgtgcgcggtgaccatcagcaaccccacgagacacgtgtacacgggtgggaagggctgcgtcaaggtctgggacatcagccacccaggcaataagagtcctgtctcccagctcgactgtctgaacagggataactacatccgttcctgcagattgctccctgatggtcgcaccctaattgttggaggggaagccagtactttgtccatttgggacctggcggctccaaccccacgcatcaaggcagagctgacatcctcggcccccgcctgctatgccctggccatcagccccgattccaaggtctgcttctcatgctgcagcgacggcaacatcgctgtgtgggatctgcacaaccagaccttggtgaggcaattccagggccacacagatggagccagctgtattgacatttctaatgatggcaccaagctctggacaggtggtttggacaacacggtcaggtcctgggacctgcgcgaggggcggcagctgcagcagcacgacttcacctcccagatcttttctctgggctactgcccaactggagagtggcttgcagtggggatggagaacagcaatgtggaagttttgcatgtcaccaagccagacaaataccaactacatcttcatgagagctgtgtgctgtcgctcaagtttgcccattgtggcaaatggtttgtaagcactggaaaggacaaccttctgaatgcctggagaacaccttatggggccagtatattccagtccaaagaatcctcatcggtgcttagctgtgacatctccgtggacgacaaatacattgtcactggctctggggataagaaggccacagtttatgaagttatttattaaagacaaatcttcatgcagactggacttctcctcctggtagcactttgctctgtcatcctttttgttcacccccatccccgcatctaaaa

SEQ ID NO: 102530 - DNA, 2247 bp, Artificial Sequence
  derived and/or modified sequence
atgatcagagacctgagcaagatgtacccccagaccagacaccccgccccccaccagcccgcccagcccttcaagttcaccatcagcgagagctgcgacagaatcaaggaggagttccagttcctgcaggcccagtaccacagcctgaagctggagtgcgagaagctggccagcgagaagaccgagatgcagagacactacgtgatgtactacgagatgagctacggcctgaacatcgagatgcacaagcaggccgagatcgtgaagagactgaacgccatctgcgcccaggtgatccccttcctgagccaggagcagcagctgcaggcccagcacctgagccacggccacggcctgcccgtgcccctgaccccccaccccagcggcctgcagccccccgccatcccccccatcggcagcagcgccggcctgctggccctgagcagcgccctgggcggccagagccacctgcccatcaaggacgagaagaagcaccacgacaacgaccaccagagagacagagacagcatcaagagcagcagcgtgagccccagcgccagcttcagaggcgccgagaagcacagaaacagcgccgactacagcagcgagagcaagaagcagaagaccgaggagaaggagatcgccgccagatacgacagcgacggcgagaagagcgacgacaacctggtggtggacgtgagcaacgaggaccccagcagccccagaggcagccccgcccacagccccagagagaacggcctggacaagaccagactgctgaagaaggacgcccccatcagccccgccagcatcgccagcagcagcagcacccccagcagcaagagcaaggagctgagcctgaacgagaagagcaccacccccgtgagcaagagcaacacccccacccccagaaccgacgcccccacccccggcagcaacagcacccccggcctgagacccgtgcccggcaagccccccggcgtggaccccctggccagcagcctgagaacccccatggccgtgccctgcccctaccccacccccttcggcatcgtgccccacgccggcatgaacggcgagctgaccagccccggcgccgcctacgccggcctgcacaacatcagcccccagatgagcgccgccgccgccgccgccgccgccgccgccgcctacggcagaagccccgtggtgggcttcgacccccaccaccacatgagagtgcccgccatcccccccaacctgaccggcatccccggcggcaagcccgcctacagcttccacgtgagcgccgacggccagatgcagcccgtgcccttcccccccgacgccctgatcggccccggcatccccagacacgccagacagatcaacaccctgaaccacggcgaggtggtgtgcgccgtgaccatcagcaaccccaccagacacgtgtacaccggcggcaagggctgcgtgaaggtgtgggacatcagccaccccggcaacaagagccccgtgagccagctggactgcctgaacagagacaactacatcagaagctgcagactgctgcccgacggcagaaccctgatcgtgggcggcgaggccagcaccctgagcatctgggacctggccgcccccacccccagaatcaaggccgagctgaccagcagcgcccccgcctgctacgccctggccatcagccccgacagcaaggtgtgcttcagctgctgcagcgacggcaacatcgccgtgtgggacctgcacaaccagaccctggtgagacagttccagggccacaccgacggcgccagctgcatcgacatcagcaacgacggcaccaagctgtggaccggcggcctggacaacaccgtgagaagctgggacctgagagagggcagacagctgcagcagcacgacttcaccagccagatcttcagcctgggctactgccccaccggcgagtggctggccgtgggcatggagaacagcaacgtggaggtgctgcacgtgaccaagcccgacaagtaccagctgcacctgcacgagagctgcgtgctgagcctgaagttcgcccactgcggcaagtggttcgtgagcaccggcaaggacaacctgctgaacgcctggagaaccccctacggcgccagcatcttccagagcaaggagagcagcagcgtgctgagctgcgacatcagcgtggacgacaagtacatcgtgaccggcagcggcgacaagaaggccaccgtgtacgaggtgatctactag

SEQ ID NO: 102531 - DNA, 3027 bp, Artificial Sequence
  derived and/or modified sequence
atgtcccagcccattatggttcagcggaggagcggccaggggtttcatggcaactccgaagtgaatgcgattctgtctccccgaagtgagtcggggggactgggggtatcgatggtggaatatgttctgtccagcagcccggctgacaagttagatagccgtttcagaaaggggaattttggcactcgcgatgctgagacagatggtcctgaaaaaggcgatcagaaggggaaggcgtcaccctttgaagaagaccagaaccgcgaccttaagcagggcgatgacgatgactctaaaataaatggtcgcgggctgcccaatggaatggacgctgactgcaaagactttaatcgcactccagggagcagacaggcaagcccaactgaagtggtggagcgcctggggccaaatacaaacccgtctgaggggcttgggccactgcccaacccgacagccaataagccactcgttgaggaattctccaatcccgagacgcaaaatctggatgccatggaacaggtcggtctggagagcctgcagtttgattatcccggaaatcaggtacctatggactcctctggtgctacagttggcctctttgactataattcgcaacaacagctgttccagcgaaccaatgcactgaccgtgcagcagttgaccgcagctcagcaacaacagtacgctctggccgccgcacagcagcctcatatcgctggggtattttcagcaggcctcgctccggcagcattcgtccccaacccctatattatcagcgctgcccctccggggaccgacccctatactgccgccgggctcgccgcggctgctacgcttgctggacccgccgtcgtacctccccaatactacggcgtcccctggggcgtgtatcctgcgaacttgtttcaacagcaggcagccgctgcagccaacaacaccgcatcacagcaagctgcctctcaggctcagcccggccaacagcaggtgctgcgcgcaggcgctggtcaacgacccctgacccccaaccaggggcagcaggggcaacaggcggaatcactggccgcagccgctgctgctaatccaaccctggccttcggccaggggctcgcaaccggtatgcccggctatcaggtgttggctcccacagcctattatgatcaaacgggtgccctcgtggttgggccaggcgctagaaccggcctgggagcccctgtcaggctgatggcccctaccccggtgctcatctcttccgccgccgcccaggctgccgccgcagccgcagcagggggaaccgccagctccctgactggctccacaaacggactgttcaggcccataggaactcaaccaccgcaacagcagcagcaacagcccagcacaaaccttcagtcaaactctttttatgggtcttcttctcttacaaatagctcgcagtcaagttccctatttagtcacgggccaggtcaaccaggctccacttccctcggtttcgggagcggtaatagcttaggagcagccattggatctgcgctgtcagggtttggtagcagcgtcggcagcagcgccagttcttcggctactagaagggagtccttgagcacatctagtgatctctacaagagatcttcctccagtctagcaccaatcggacagcctttttataatagtctgggttttagttccagtccgagccctatcggcatgccactcccctctcagacacccggtcactctcttacaccacctccaagcctgagttcgcatgggtcctcttcctcactccacctcggggggctcaccaacggatccgggaggtacatttctgctgccccaggcgccgaagcgaaataccggtcagcaagttctacatcctccctgtttagcagctcttctcagttgttccctccgtcccgcctaaggtataacagaagcgatattatgccaagtggacgcagtcggctgttagaagattttcgaaacaatcgttttcctaatctccagctgcgcgacctcattggacatattgtggaattcagccaggatcagcatggtagccgctttatccagcaaaaacttgaaagagcaacccctgccgagcgtcagatggtctttaacgagattctccaagccgcgtatcagctcatgactgatgtctttggaaactatgtcatccagaagttttttgagtttgggtccctggaccaaaagctggccctggcaactcgcattagagggcatgttttaccactggcacttcagatgtacgggtgccgcgtgatccagaaggcactggaaagtatttccagcgatcagcagtcagaaatggttaaagaattagatggccacgtgctgaaatgtgtgaaggaccagaacggcaatcatgtggtgcagaaatgtatcgagtgcgtgcaaccacagtctctgcagtttatcatcgacgcattcaaaggccaggtgttcgtgcttagtacccatccatacggctgccgggtcattcagcgaattttggaacattgcacagccgagcagaccctgccaatcttagaggagcttcaccagcacaccgagcagctcgtccaagaccagtacggaaactacgtaatacaacacgttctggaacacgggcgaccagaggataagagcaaaatcgtctctgaaattaggggcaaagttctggcactgagccagcataagttcgcgtctaacgttgtggagaaatgcgttactcacgcctctagggctgagagagccctcctcattgatgaagtttgctgtcaaaacgatgggccacactctgccttgtatacgatgatgaaggatcagtacgccaattacgtcgtgcaaaagatgattgacatggctgagcctgctcaacgcaagatcattatgcacaaaatacgtcctcacattactaccctccggaagtacacctacggcaagcacatacttgctaagctggagaaatattatttaaaaaacagtccagacctaggacccattggggggcccccgaatggtatgctgtag

SEQ ID NO: 102532 - DNA, 3027 bp, Artificial Sequence
  derived and/or modified sequence
atgagccagcccatcatggtgcagaggagaagtggccagggcttccacggcaacagcgaggtgaatgccatcctgagccccaggtctgagagcggcggcctgggcgtgtccatggtggagtatgtgctgagcagcagccctgctgacaagctggacagccgcttcagaaaaggaaactttggcaccagagatgctgagacagatggccctgagaagggggaccagaagggcaaggccagcccctttgaggaggaccagaacagagacctgaagcagggagatgatgatgacagcaagatcaatggccggggcctgcccaacggcatggatgctgactgcaaggacttcaacagaacacctggcagccggcaggccagccccacagaggtggtggagcggctgggccccaacaccaaccccagcgagggcctgggccccctgcccaaccccacagccaacaagcccctggtggaggagttcagcaaccctgagacccagaacctggatgccatggagcaggtgggcctggagagcctgcagtttgactacccaggcaaccaggtgcccatggacagcagcggggccaccgtgggcctgtttgactacaacagccagcagcagctgttccagaggaccaatgccctgactgtgcagcagctgacagctgcccagcagcagcagtatgccctggccgccgcccagcagccccacatcgccggggtcttctctgctggcctggccccagctgcctttgtgcccaacccctacatcatctctgctgcccctcctggaacagacccctacacagctgctggcctggccgccgccgccaccctggccggccctgctgtggtgcccccccagtactacggcgtgccctggggcgtgtacccagccaacctcttccagcagcaggccgctgctgctgccaacaacacagccagccagcaggccgccagccaggcccagcccggccagcagcaggtgctgcgggccggggccggccagaggcccctgacccccaaccagggccagcagggccagcaggccgagagcctggccgctgctgctgctgccaaccccaccctggccttcggccagggcctggccaccggcatgcctggctaccaggtgctggcccccacagcctactatgaccagacaggagccctggtggtgggccctggggccaggacaggcctgggcgcccctgtgcggctgatggcccccacccctgtgctgatcagcagcgctgctgcccaggccgctgctgctgctgctgctgggggcacagccagcagcctgaccggcagcaccaacggcctcttccggcccatcggcacccagcccccccagcagcagcagcagcagcccagcaccaacctgcagagcaacagcttctacggcagcagcagcctgaccaacagcagccagagcagcagcctcttcagccacggccctggccagcccggcagcaccagcctgggctttggaagtggcaacagcctgggcgccgccatcggcagcgccctgagcggcttcggcagctctgtgggcagcagcgccagcagcagcgccacccggcgggagagcctgagcaccagcagtgacctgtacaagaggagcagcagcagcctggcccccatcggccagcccttctacaacagcctgggcttcagcagcagccccagccccatcggcatgcccctgcccagccagaccccaggccacagcctgaccccaccacccagcctgagcagccacggcagcagcagcagcctgcacctgggcggcctgaccaatggaagtggccgctacatctctgctgcccctggagctgaggccaagtacagaagtgccagcagcaccagcagcctcttcagcagcagcagccagctgtttcctcccagccggctgcgctacaacagaagtgacatcatgcccagcggccgcagccggctgctggaggacttcaggaacaaccgcttccccaacctgcagctgcgggacctgattggccacatcgtggagttcagccaggaccagcacggcagccgcttcatccagcagaagctggagcgggccaccccagctgagcggcagatggtgttcaatgagatcctgcaggccgcctaccagctgatgacagatgtgtttggaaactacgtgatccagaagttctttgaatttggcagcctggaccagaagctggccctggccacccgcatccggggccacgtgctgcccctggccctgcagatgtatggctgcagggtcatccagaaggccctggagagcatcagcagtgaccagcagagcgagatggtgaaggagctggatggccacgtgctgaagtgtgtgaaggaccagaatggaaaccacgtggtgcagaagtgcattgaatgtgtgcagccccagagcctgcagttcatcattgatgccttcaagggccaggtgtttgtgctgagcacccacccctacggctgcagggtcatccagaggatcctggagcactgcacagctgagcagaccctgcccatcctggaggagctgcaccagcacacagagcagctggtgcaggaccagtatggcaactacgtgatccagcacgtgctggagcacggccggcctgaggacaagagcaagatcgtgtctgagatccggggcaaggtgctggccctgagccagcacaagtttgccagcaatgtggtggagaagtgtgtgacccacgccagcagagctgagcgggccctgctgattgatgaggtgtgctgccagaatgatggcccccacagcgccctgtacaccatgatgaaggaccagtatgccaactacgtggtgcagaagatgattgacatggccgagcccgcccagaggaagatcatcatgcacaagatccggccccacatcaccaccctgaggaagtacacctacggcaagcacatcctggccaagctggagaagtactacctgaagaacagcccagacctgggccccatcggcggccccccaaatggcatgctgtag

SEQ ID NO: 102533 - DNA, 3027 bp, Artificial Sequence
  derived and/or modified sequence
atgagccagcccatcatggtgcagcggcggagcggccagggcttccatgggaacagcgaagtgaacgccattttgagtccccggagcgagtcgggaggactgggcgtgagcatggtagagtacgtgcttagtagctctcctgccgacaagcttgattctaggtttcggaaagggaacttcggtacaagggatgccgagactgatggtcctgagaagggtgatcagaaaggcaaggcctctccttttgaggaggatcagaatagggacctaaagcagggcgatgacgacgacagcaaaatcaacggaagggggctgccaaacggtatggatgcagattgcaaagatttcaaccggacccccggctctcgacaagcctcacctaccgaggtagtagaacggctgggtcctaacaccaatccgtcggaggggctgggaccattgccgaaccccaccgccaacaagccactagtggaagagttctctaatcccgagactcagaatctggacgcaatggagcaggttggcctcgagtcattgcaatttgattaccccggcaaccaggtcccaatggactcaagtggggccacagtgggtctgttcgactataactctcagcaacagctgtttcagcgcactaatgcgctgactgttcagcagttaactgctgcccagcagcagcagtacgctctggccgccgcacagcagccacatattgctggagtattcagtgccgggttggcccctgccgccttcgtaccaaacccatacatcataagcgcagctcctcctggtactgacccgtacaccgcagccggcctggcggcagccgccaccctcgcgggaccggctgtggtgccaccgcagtactatggagtcccatggggtgtgtaccctgcaaacctgtttcaacagcaagcagccgccgctgcaaataataccgcctcccaacaagcagcctctcaggcccagcctggccagcagcaggtgcttcgcgctggggctggacaaagacctctgacaccaaatcagggacagcagggtcagcaggccgaatctcttgcggcggctgctgcggcaaatccgacgctcgcatttgggcaaggactcgctaccggcatgcctggataccaggttttggccccgaccgcttactacgatcagaccggggcattggtggttggtcctggcgctcgtacggggctcggagccccagttcggcttatggcacctacaccagtgctcatctccagtgccgctgcgcaggcggcggcggcggctgcggctggaggaaccgccagctcactgactggctccactaatggactgttcaggccaatcggtacccagcccccccagcaacagcagcagcaacctagcacaaatctgcagagcaactctttctacggctccagctctcttacaaacagcagtcagtcctcctccctattctcacatggccccggacagccgggctccactagcctgggattcgggtcaggaaatagtctgggtgcagccatcggctccgcactctcgggattcggcagcagtgtgggcagttccgcttctagttccgcgacaaggcgtgaatctctgagtacgtcctccgacctctacaagcgctcgagtagttctcttgctcccatcggccagcccttctacaactcactgggattctccagcagcccttcaccaatcgggatgcccctcccttcccagaccccagggcacagcctgaccccccccccctcgctctctagccacggttccagtagttccctgcatctgggagggctgaccaacgggagcggtaggtatatctctgctgccccaggcgcagaggcaaaatacagaagcgcgtcgagcacttcttcattgtttagctcgtcatcccagctcttcccccctagccgactccgatacaacaggtccgatattatgcccagtggtcgctctcgacttcttgaagactttaggaacaaccgtttccccaaccttcagctcagggacctgattgggcatattgtggagttctcacaggaccagcacggatctagatttattcagcagaaattggaacgggcaacccccgctgaaagacagatggtcttcaatgagatcctacaggctgcttatcaactgatgactgatgtgttcggcaactacgtgatccagaaattctttgaattcggtagtctggatcagaaattggcactggctactcggattaggggtcatgtgctgccgctggccttacaaatgtatggatgtcgagtgatccaaaaggccctcgagtcaatttcatcagaccagcagtctgaaatggtgaaagagctagatggtcacgtgttaaagtgtgtgaaggaccagaatgggaatcacgtcgtgcagaagtgcatcgagtgcgtccaaccacagagcttgcaatttattattgatgctttcaagggccaggtgttcgtgctctcaacacacccttacggatgcagagtcattcagagaatccttgaacattgcactgccgagcaaactctccccatcctggaggaactgcatcagcatactgagcagctggtccaggatcagtacggaaactacgtgatccagcatgtgctggagcacggccggcctgaggacaagtcaaagatcgtgtccgagatccgaggcaaagtgctcgccctgtctcagcataaatttgcctcgaacgtggtggagaagtgtgttacacacgcgagccgggccgaaagagccctactgattgacgaggtgtgctgccaaaatgatggtccccactctgccctctacacaatgatgaaagaccaatatgcgaattacgtggtccaaaagatgattgacatggcagagccagctcagcgcaagatcatcatgcacaaaatccgcccgcacatcaccacactgagaaagtacacatacggtaaacacatcctcgccaaacttgagaaatactatctgaaaaactcaccagatctgggcccgatcggaggcccgcccaacgggatgctctag

SEQ ID NO: 102534 - DNA, 3027 bp, Artificial Sequence
  derived and/or modified sequence
atgtcacaaccgataatggtgcaaagacgcagcggccaaggattccatggtaattccgaagttaacgcgatcctgtctccgaggagtgaatcaggaggactcggggtatcgatggtggagtacgtgctctcaagcagtcccgcagacaagctggattcacgatttcgaaagggcaactttggtacccgggatgccgagaccgacggcccagagaagggcgaccagaaaggcaaggcaagcccattcgaggaagatcagaacagagatcttaaacagggtgacgacgacgacagcaaaattaacggacgtggcctcccgaatggtatggatgctgactgtaaggattttaacaggacaccaggatcacgccaagcatctccaaccgaagttgtagagagactgggacccaacacaaacccctccgaagggctcggccctctccccaatcctacggccaataaaccactagttgaggaattcagcaatccagaaacacaaaacctcgatgcgatggagcaggtcggactggagtccctccagttcgactatcctggcaaccaagtgccgatggactcatcaggtgcaactgttggtctgttcgattacaatagtcagcaacaacttttccaacgcacaaacgcactcacggtgcagcaactcacagccgctcaacaacagcagtacgctctcgccgctgcccagcagccccatattgctggggtctttagtgccggattagcacccgctgcgtttgtgccaaacccctacataatctcggcggctcctcccggaactgacccttatacagctgcgggactggcggctgctgccacacttgctggcccagccgtggtacccccacagtattacggcgtcccctggggggtgtatcccgcaaacctctttcagcagcaagctgcggctgcagccaacaacaccgcctcacagcaagccgcaagtcaggcgcagcccggtcaacagcaggtcctgcgggctggcgcaggacagagacccctaacccctaaccaaggacagcagggtcaacaggctgagagcttggccgctgctgctgcggctaacccgaccttagcttttggtcaagggcttgcaaccgggatgcccggttaccaggtgctggcacctacagcctactacgatcaaactggggcactggttgtgggccctggcgcaaggacgggtctcggagcccctgtcagactgatggcacccactcccgttttaatatcctccgctgcagcccaggcagcagccgctgcggctgcgggagggacggcctcctctctgaccgggagtacaaatgggttgttccgcccaattggtactcagcctcctcagcagcagcagcagcagccctctacaaacctccaatccaacagcttttatgggagcagtagtctgactaactctagccaaagcagctcacttttttcacatgggcctgggcagccgggaagcaccagtctgggattcggctccggtaatagcctcggcgcagcgatcgggtctgctttgagtggctttggtagctcagtgggtagcagcgcttcctctagcgctacccgaagggaaagtctgtcaacatctagcgacctgtataagagatcgtcttcaagcctcgcgccaattgggcagccgttctataacagtctcggtttttcctcatctccttctcccattgggatgcctttgccctcacagacccctgggcattcactgacgcctccccctagtctgagtagtcacggatctagttccagtctgcacctagggggtttaactaatggctcaggccgatacatctccgctgctcccggagccgaggcaaaatatcgtagcgcctcttcaacctcttccctattttcaagctcatcacagctcttcccgccatctaggctgaggtacaaccggtccgatatcatgccttcaggtcgaagccgccttctggaagacttcaggaataacagattccctaacctgcagctccgggatctgatagggcacatcgtggaattctcccaggatcagcacggatcgcgtttcatacagcagaaattagaaagggccactccagcagaacggcaaatggtctttaatgagatcttgcaagcagcctatcagctgatgaccgatgtgttcggaaactacgtgatccagaaattttttgaattcggctcgctggatcagaaactggctttggctaccaggatccggggacacgtgctgccactagcgttgcagatgtacgggtgcagggttatccagaaggcactggagagtatctccagcgatcagcagtccgaaatggttaaagaactggatggacacgtgctcaaatgcgtgaaggatcagaacggcaaccacgttgtccaaaagtgtatcgagtgtgttcagccacagtccctacagtttataatcgatgcctttaagggtcaggtgttcgttctctcaactcacccatatgggtgccgcgtgatccagcgaattttggagcactgcacagctgaacagacactgccgatcctggaggagctgcaccaacacacagaacagctggtgcaagaccagtatggtaactatgtgatccagcacgtgttggaacacggcagacccgaagataaatcaaaaattgtctcggaaatacggggtaaggtgcttgcattaagccagcacaaatttgccagcaacgtggttgagaagtgtgtcacacacgcctctagggcagagagggcccttctgatcgatgaagtgtgctgtcagaacgacggccctcacagtgcgctgtatacaatgatgaaagatcagtacgctaactacgttgtacagaagatgattgacatggccgaacccgctcagaggaaaatcataatgcacaaaattagacctcatatcacgaccctgcgcaagtatacgtacggcaagcatatcttggctaagcttgagaagtattacctcaaaaactctccagatctcggcccaataggaggaccccctaatggcatgctgtag

SEQ ID NO: 102535 - DNA, 3027 bp, Artificial Sequence
  derived and/or modified sequence
atgagccagcccatcatggtgcagagaagaagcggccagggcttccacggcaacagcgaggtgaacgccatcctgagccccagaagcgagagcggcggcctgggcgtgagcatggtggagtacgtgctgagcagcagccccgccgacaagctggacagcagattcagaaagggcaacttcggcaccagagacgccgagaccgacggccccgagaagggcgaccagaagggcaaggccagccccttcgaggaggaccagaacagagacctgaagcagggcgacgacgacgacagcaagatcaacggcagaggcctgcccaacggcatggacgccgactgcaaggacttcaacagaacccccggcagcagacaggccagccccaccgaggtggtggagagactgggccccaacaccaaccccagcgagggcctgggccccctgcccaaccccaccgccaacaagcccctggtggaggagttcagcaaccccgagacccagaacctggacgccatggagcaggtgggcctggagagcctgcagttcgactaccccggcaaccaggtgcccatggacagcagcggcgccaccgtgggcctgttcgactacaacagccagcagcagctgttccagagaaccaacgccctgaccgtgcagcagctgaccgccgcccagcagcagcagtacgccctggccgccgcccagcagccccacatcgccggcgtgttcagcgccggcctggcccccgccgccttcgtgcccaacccctacatcatcagcgccgccccccccggcaccgacccctacaccgccgccggcctggccgccgccgccaccctggccggccccgccgtggtgcccccccagtactacggcgtgccctggggcgtgtaccccgccaacctgttccagcagcaggccgccgccgccgccaacaacaccgccagccagcaggccgccagccaggcccagcccggccagcagcaggtgctgagagccggcgccggccagagacccctgacccccaaccagggccagcagggccagcaggccgagagcctggccgccgccgccgccgccaaccccaccctggccttcggccagggcctggccaccggcatgcccggctaccaggtgctggcccccaccgcctactacgaccagaccggcgccctggtggtgggccccggcgccagaaccggcctgggcgcccccgtgagactgatggcccccacccccgtgctgatcagcagcgccgccgcccaggccgccgccgccgccgccgccggcggcaccgccagcagcctgaccggcagcaccaacggcctgttcagacccatcggcacccagcccccccagcagcagcagcagcagcccagcaccaacctgcagagcaacagcttctacggcagcagcagcctgaccaacagcagccagagcagcagcctgttcagccacggccccggccagcccggcagcaccagcctgggcttcggcagcggcaacagcctgggcgccgccatcggcagcgccctgagcggcttcggcagcagcgtgggcagcagcgccagcagcagcgccaccagaagagagagcctgagcaccagcagcgacctgtacaagagaagcagcagcagcctggcccccatcggccagcccttctacaacagcctgggcttcagcagcagccccagccccatcggcatgcccctgcccagccagacccccggccacagcctgacccccccccccagcctgagcagccacggcagcagcagcagcctgcacctgggcggcctgaccaacggcagcggcagatacatcagcgccgcccccggcgccgaggccaagtacagaagcgccagcagcaccagcagcctgttcagcagcagcagccagctgttcccccccagcagactgagatacaacagaagcgacatcatgcccagcggcagaagcagactgctggaggacttcagaaacaacagattccccaacctgcagctgagagacctgatcggccacatcgtggagttcagccaggaccagcacggcagcagattcatccagcagaagctggagagagccacccccgccgagagacagatggtgttcaacgagatcctgcaggccgcctaccagctgatgaccgacgtgttcggcaactacgtgatccagaagttcttcgagttcggcagcctggaccagaagctggccctggccaccagaatcagaggccacgtgctgcccctggccctgcagatgtacggctgcagagtgatccagaaggccctggagagcatcagcagcgaccagcagagcgagatggtgaaggagctggacggccacgtgctgaagtgcgtgaaggaccagaacggcaaccacgtggtgcagaagtgcatcgagtgcgtgcagccccagagcctgcagttcatcatcgacgccttcaagggccaggtgttcgtgctgagcacccacccctacggctgcagagtgatccagagaatcctggagcactgcaccgccgagcagaccctgcccatcctggaggagctgcaccagcacaccgagcagctggtgcaggaccagtacggcaactacgtgatccagcacgtgctggagcacggcagacccgaggacaagagcaagatcgtgagcgagatcagaggcaaggtgctggccctgagccagcacaagttcgccagcaacgtggtggagaagtgcgtgacccacgccagcagagccgagagagccctgctgatcgacgaggtgtgctgccagaacgacggcccccacagcgccctgtacaccatgatgaaggaccagtacgccaactacgtggtgcagaagatgatcgacatggccgagcccgcccagagaaagatcatcatgcacaagatcagaccccacatcaccaccctgagaaagtacacctacggcaagcacatcctggccaagctggagaagtactacctgaagaacagccccgacctgggccccatcggcggcccccccaacggcatgctgtag

SEQ ID NO: 102536 - protein, 704 aa, Artificial Sequence
  derived and/or modified sequence
MIRDLSKMYPQTRHPAPHQPAQPFKFTISESCDRIKEEFQFLQAQYHSLKLECEKLASEKTEMQRHYVMYYEMSYGLNIEMHKQAEIVKRLNAICAQVIPFLSQEHQQQVVQAVERAKQVTMAELNAIIGQQLQAQHLSHGHGLPVPLTPHPSGLQPPAIPPIGSSAGLLALSSALGGQSHLPIKDEKKHHDNDHQRERDKLNHKSLSPSASFRGAEKHRNSADYSSESKKQKTEEKEIAARYNEKSTTPVSKSNTPTPRTDAPTPGSNSTPGLRPVPGKPPGVDPLASSLRTPMAVPCPYPTPFGIVPHAGMNGELTSPGAAYAGLHNISPQMSAAAAAAAAAAAYGRSPVVGFDPHHHMRVPAIPPNLTGIPGGKPAYSFHVSADGQMQPVPFPPDALIGPGIPRHARQINTLNHGEVVCAVTISNPTRHVYTGGKGCVKVWDISHPGNKSPVSQLDCLNRDNYIRSCRLLPDGRTLIVGGEASTLSIWDLAAPTPRIKAELTSSAPACYALAISPDSKVCFSCCSDGNIAVWDLHNQTLVRQFQGHTDGASCIDISNDGTKLWTGGLDNTVRSWDLREGRQLQQHDFTSQIFSLGYCPTGEWLAVGMENSNVEVLHVTKPDKYQLHLHESCVLSLKFAHCGKWFVSTGKDNLLNAWRTPYGASIFQSKESSSVLSCDISVDDKYIVTGSGDKKATVYEVIY

SEQ ID NO: 102537 - DNA, 2115 bp, Artificial Sequence
  derived and/or modified sequence
atgatccgggatctctctaaaatgtaccctcagaccagacatccagccccccaccagcctgcccagccgtttaaatttacaattagcgaaagctgcgacaggatcaaagaggaatttcagttccttcaggcacaatatcactcgctgaagctcgagtgcgagaagctggcatcagaaaaaactgagatgcagcggcattacgtgatgtactacgagatgtcttatggcctgaacatagagatgcacaagcaggccgaaattgtgaaacggctgaacgcaatctgcgcacaggttattccctttctgagccaggaacatcagcagcaggtggtccaagcagtggagagagccaaacaggtcacaatggctgagctcaatgccattatcggtcagcagctgcaggcccaacatctgtctcacggccacggtctccccgtaccattaacgcctcacccctctggtctgcagccaccggccattcccccaatcggctcttccgcaggcttgctcgcccttagcagtgcactgggcgggcagagtcaccttccaattaaagatgaaaaaaagcaccacgataacgatcaccagcgagaacgcgataagctgaaccataagtcattgtcaccatcagcctccttccgaggtgccgagaagcatcggaattcagccgactattcgagcgagtccaaaaaacagaaaaccgaagagaaagaaatcgctgcccgctacaacgaaaaaagtaccacaccggtctcgaagtcaaatactccgacaccccggaccgatgctcctacacccgggagtaacagtacacctggtttacggcctgtgccaggaaagcctcctggtgtggaccccctcgcaagttcgctacggactccgatggccgtaccgtgtccatatcctaccccatttggcatagtcccccacgctggaatgaatggcgaactgacatcacccggcgccgcctacgccggcctgcataatatttcaccgcaaatgtctgctgcggcagcggccgccgccgcagccgcagcttatggacggtcccccgtggtgggctttgacccccaccaccatatgcgcgtgccagccatacctcctaatctgacaggtatccctggagggaagccagcctactccttccacgtaagcgctgacggacaaatgcagcccgtgccctttccaccagacgctttaattggacctggcattcctcggcacgcaagacagatcaacacgttgaaccacggagaagttgtgtgtgctgttactatttccaatcccacaaggcacgtgtatacaggcgggaagggctgtgtcaaggtttgggacatatcgcacccagggaataagtcgcctgtgagccagctcgattgtctgaacagagacaactatattcggtcatgcaggttgcttccagatgggagaacactaattgtaggcggagaggccagcacactgtcgatctgggatctggcggcaccaaccccccgaatcaaggctgagttgacctcatctgcccccgcttgttacgcgttagctatctcgcctgatagtaaagtatgttttagttgctgctctgacggaaacatcgccgtatgggatctccataatcaaacactcgtgcggcagtttcaaggacataccgacggggccagctgcatagacatttctaatgatggcaccaaactgtggacaggaggattagacaacaccgttagatcctgggacttaagggagggcaggcaacttcagcagcacgatttcaccagccagatttttagtctgggttactgccctaccggggagtggttggcggtgggcatggaaaacagcaacgtagaagtgctgcacgtaacaaagcccgataagtatcaattgcacctccacgaatcctgcgttttgtctctcaagtttgcccactgtggcaagtggttcgtcagcactgggaaagacaatttattgaatgcctggcggacaccttacggcgcaagcatttttcagtctaaagagagctcttcagtactttcctgcgatatcagcgtggatgataagtacattgtgacagggagcggcgacaaaaaggctacagtttacgaggttatttactag

SEQ ID NO: 102538 - DNA, 2115 bp, Artificial Sequence
  derived and/or modified sequence
atgatccgggacctgagcaagatgtacccccagaccaggcacccagccccccaccagcctgcccagcccttcaagttcaccatcagcgagagctgtgaccgcatcaaggaggagttccagttcctgcaggcccagtaccacagcctgaagctggagtgtgagaagctggccagcgagaagacagagatgcagaggcactacgtgatgtactatgagatgtcctatggcctgaacatcgagatgcacaagcaggccgagatcgtgaagaggctgaatgccatctgtgcccaggtgatccccttcctgagccaggagcaccagcagcaggtggtgcaggccgtggagcgggccaagcaggtgaccatggccgagctgaatgccatcatcggccagcagctgcaggcccagcacctgagccacggccacggcctgcctgtgcccctgaccccccaccccagcggcctgcagcccccagccatcccccccatcggcagcagcgctggcctgctggccctgagcagcgccctgggcggccagagccacctgcccatcaaggatgagaagaagcaccacgacaatgaccaccagcgggagcgggacaagctgaaccacaagagcctgagccccagcgccagcttcagaggagctgagaagcacaggaacagcgctgactacagcagcgagagcaagaagcagaagacagaggagaaggagattgctgcccgctacaatgagaagagcaccacccctgtgtccaagagcaacacccccacccccaggacagatgcccccaccccaggcagcaacagcaccccaggcctgcggcctgtgcctgggaagcccccaggagtggaccccctggccagcagcctgcggacccccatggctgtgccctgcccctaccccaccccatttggaattgtgccccatgctggcatgaatggagagctgaccagccctggggccgcctatgccggcctgcacaacatcagcccccagatgtctgctgctgctgctgctgctgctgctgctgctgcctacggccgcagccctgtggtgggctttgacccccaccaccacatgagggtgcctgccatcccccccaacctgaccggcatccctgggggcaagccagcctacagcttccacgtgtctgcagatggccagatgcagcctgtgcccttccccccagatgccctgattggccctggcatccccaggcatgcccggcagatcaacaccctgaaccacggggaggtggtgtgtgctgtgaccatcagcaaccccaccaggcatgtgtacacaggaggcaagggctgtgtgaaggtgtgggacatcagccaccctggcaacaagagccctgtgtcccagctggactgcctgaacagagacaactacatccgcagctgccgcctgctgcctgatggccgcaccctcatcgtgggcggggaggccagcaccctgagcatctgggacctggccgcccccaccccccgcatcaaggccgagctgaccagcagcgccccagcctgctacgccctggccatcagcccagacagcaaggtgtgcttcagctgctgcagtgatggcaacattgctgtgtgggacctgcacaaccagaccctggtgcggcagttccagggccacacagatggagccagctgcatcgacatcagcaatgatggcaccaagctgtggacaggaggcctggacaacacagtgcgctcctgggacctgcgggagggccggcagctgcagcagcacgacttcaccagccagatcttcagcctgggctactgccccaccggggagtggctggccgtgggcatggagaacagcaatgtggaggtgctgcacgtgaccaagccagacaagtaccagctgcacctgcacgagagctgtgtgctgagcctgaagtttgcccactgcggcaagtggtttgtgtccacaggcaaggacaacctgctgaatgcctggaggaccccctatggagccagcatcttccagagcaaggagagcagctctgtgctgagctgtgacatctctgtggatgacaagtacatcgtgacaggcagcggggacaagaaggccaccgtgtatgaggtgatctactag

SEQ ID NO: 102539 - DNA, 2115 bp, Artificial Sequence
  derived and/or modified sequence
atgatccgggacctgagcaagatgtacccccagacccggcaccccgctccccatcagcccgcccaaccgtttaagtttacaatcagtgagtcctgtgacagaattaaggaagagtttcaatttttgcaggcacagtaccactcactcaaacttgagtgtgaaaaactagcttctgaaaagacagaaatgcagagacattacgtcatgtattacgagatgtcatacgggctgaacattgagatgcataaacaggcggagatagtgaaaaggctgaatgctatctgtgcccaagtcatacccttcttgtcccaggagcatcagcagcaggtcgtgcaggcagtggaacgcgctaagcaagttacaatggccgagctcaatgctataataggacagcagctacaggctcagcacctatcacacgggcacgggctgcctgtcccactgactccacaccccagcggactgcagccaccagctattccacccataggctcttccgcgggcctcttagctctgtccagtgctctgggtggccagtcccacttgcccatcaaggacgagaagaagcaccacgacaatgaccatcagcgcgaacgagacaaactcaaccataaatctctctccccgtcagcatcatttcgaggagccgagaaacaccggaactctgctgactacagtagtgagtccaagaagcagaagacagaagaaaaggagattgctgcgcgatacaatgagaagagcactacacccgtgtccaagagcaatactcccacccccaggactgatgcacctactccaggtagcaactctacccctgggttgcgacccgtccctggtaaacccccaggggtggatcctttggcgtcgagcttaagaacaccgatggccgtcccctgtccataccccaccccgttcggcattgtgcctcatgccggaatgaacggcgagctgaccagtcctggggcagcatacgccggcttgcataatatctcaccacagatgtctgccgccgccgccgctgccgctgctgcagctgcctacggtcggagcccagtggtgggtttcgacccacatcaccatatgagggtgcccgctatcccgccaaatttaaccggaattccaggggggaagcccgcttacagttttcatgtgtccgctgacggccaaatgcaacccgtgccctttcccccagacgcactgatcggacccggaatacctcggcacgccaggcagattaataccctcaaccatggcgaggtggtgtgcgcggtcaccatcagtaatcccacacgccatgtttatacagggggaaaagggtgtgtaaaggtttgggacatctcacacccaggcaacaagagcccggtatcacaactggactgcctgaatcgggataattatataaggagttgccggctgctcccagacggcaggactctgatagtcgggggcgaggcctctaccttaagcatatgggatctcgccgctcctacaccccgtatcaaagctgaactgacatctagcgccccagcctgctacgccctggccatctcccccgactctaaagtttgtttcagctgttgttctgatggtaatatcgccgtttgggaccttcataatcagaccctggtgcgacagttccaaggccacactgacggtgcctcgtgtatcgacatatcaaacgatgggacaaagttgtggacaggcggcctggacaatactgtgaggtcatgggaccttcgggagggcagacagctccaacagcacgacttcaccagccagattttcagtctcgggtactgccctacaggcgaatggctcgctgtgggtatggagaactcgaacgtggaggttctccacgttacgaagccagacaagtaccaactccaccttcacgagagctgcgtgctgtccctgaaattcgcacattgcggcaagtggtttgtgtccaccggcaaggacaacctgctcaatgcttggagaacgccatacggcgcttctattttccagtcaaaggagagttcttcagtgttgtcatgtgacatctctgtggacgacaaatacattgtgacaggctccggagataaaaaagccacagtatatgaagtgatatactag

SEQ ID NO: 102540 - DNA, 2115 bp, Artificial Sequence
  derived and/or modified sequence
atgattagagatttgagcaagatgtatccccaaacccgtcacccagcgcctcaccagcctgcccagcccttcaagtttaccatctctgagtcctgtgataggattaaagaggagtttcaattcctgcaagcacagtatcacagtctgaaactggaatgtgagaagctggcatctgagaagactgagatgcaaaggcactatgtcatgtattatgagatgagctatggcctcaacatcgaaatgcacaagcaggctgaaatagtcaaaagattgaatgcaatttgcgcccaggtcatcccctttctgtcccaagagcaccagcagcaggtggtccaggctgtcgagcgcgctaagcaggtgaccatggcggagctcaatgccatcatcggtcagcaacttcaggctcagcacctgtcccatggacacgggctgcctgtgcccctgacgcctcaccccagcggtctgcaaccaccagcaatcccccctatcggctcgtccgcgggtttgctcgcattatcatcggctctgggcggtcagagccatctgcccatcaaagacgaaaaaaagcaccacgataacgatcatcagcgcgagcgggataagctgaaccacaagtcgctttctcctagtgcctctttcaggggagccgagaagcaccgcaactccgctgattatagctcagaatcgaagaaacagaagactgaggagaaggagatcgccgcaagatataatgaaaagtctacgactccagtatcaaaatctaatactcctacaccaagaactgatgcacctactcccggtagcaacagcaccccaggtttgcgccctgtccccggaaagcccccaggggtggaccccctcgcctcctctctacggacaccaatggcagtcccctgcccatacccgacgcctttcgggattgtaccccacgctggcatgaatggcgagctgaccagccctggcgcagcgtatgctgggctgcacaatattagtccccaaatgagcgccgctgctgcggctgcagccgctgccgcagcttatggtcggagtcccgtggtcgggtttgatcctcaccaccatatgcgcgtgcccgcaattcctcccaatctgaccggaatccccggaggaaagccggcttatagctttcacgtgtctgcagacggccaaatgcaaccggtgccatttccaccagacgctcttatcggaccaggcatcccgaggcatgcgagacagattaatactttgaaccatggggaggttgtctgtgctgttactatttctaatccgactagacatgtttatacagggggtaagggctgcgtgaaggtctgggacatctcacaccccggaaacaagagcccagtgtcccagctcgactgtcttaaccgggacaactatatcaggagttgtaggttgctacctgacggccgtacactaatcgtggggggtgaagcgtcgaccctcagcatttgggatctggctgcacccacaccaaggatcaaggcagagttaactagctctgctcccgcttgttatgccctcgccatctctcccgactctaaggtgtgctttagctgttgcagcgatggcaacattgccgtgtgggatttgcacaaccagactttggtcagacaattccaaggacatactgatggagcctcttgcatagacattagcaacgacggtactaagctctggactggcggactcgataacaccgtacggagttgggatctgcgcgaaggcaggcaattgcagcagcacgactttacctcacagattttcagcttaggttattgcccaacaggcgagtggcttgcagtcggaatggagaatagcaacgtcgaggttctccacgtgaccaaaccggataagtatcagctgcatctgcatgaaagttgcgtactatctctgaaatttgcccattgcgggaagtggttcgttagtacgggcaaggacaacctacttaatgcgtggcgtaccccctatggagctagtatcttccagtcgaaggaaagttcaagtgtcctcagttgtgacatatccgtggatgacaagtatattgtgacaggctcaggagataagaaagccacagtttacgaggttatatactag

SEQ ID NO: 102541 - DNA, 4542 bp, Artificial Sequence
  derived and/or modified sequence
acagagcgtgttgttagagctgtgctgagcgggtgtttgggttgttggctgctttcttccccctttctcacacacttgtatattattttgaggtggtgttcgcagagtttgaaaggagagagaattaaaaaaaaaagccgcaagcgtttcactcttttatttttataatccccttcaatttggggttaaaaaaaagacaagaaaacaggaaggaagagaaataaggaaatgagatgtggtaaaagaagctaaaaggtgccttttaaaagatcgttgctgtgaagtgaaaaaaatctccagagaaaccaaaaagcaccgccgagacctcttccgaaccaaaggagtttgtgtttgcttttagggaagaagaaagatcattcattcggaggaataacaaccaattaaaagacaaataaaaaaagtttggagtgggacgcagagcgagcgagaggagctgccggcgggcggtggggcgcggagcccgcactttcccggccgggtgagcggcggccgcggcgccgggctcggcgggtgcgcctcggcggagcgaacgtcggagcgttgccttgggagacgcgcgccggacaatgcccgcggcgggccagtgacgcccgcggggaatgcggagcggcccggcagccggcacccagccgccgccgcgcgttcctgccgcccgtgtcacgcgagacccggcgggggccgggaccgcccgagccgcccctcagaccgagccggccgcctccgctgccgcggccgcctcctcttcggggtcattaaagccaatgagccgcgcgcctctgccgagcgcagccaactaaatcggcttggatgattcgcgacctgagcaagatgtacccgcagaccagacacccagcaccgcatcagcctgctcaaccctttaaatttacaatttccgaatcctgtgatcggattaaggaagagtttcagtttttacaggctcaataccacagtctgaagctggaatgtgagaaactcgccagtgagaagacagagatgcagcggcattatgtcatgtattatgaaatgtcctatgggttgaatatagaaatgcacaagcaggcagagattgtcaagaggctgaatgctatctgtgcacaagtcattcctttcctgtcccaagagcaccagcaacaagtggtgcaggctgtggaacgggccaagcaggtgaccatggcagaactgaacgccatcattgggcaacaactccaggcccagcatttatcacatggacatggtctccccgtacctctgactccacacccttcagggctccagccccctgccattccacccatcggtagcagtgccgggcttctggccctctccagtgctctaggaggtcagtcccatcttccaattaaagatgagaagaagcaccatgacaatgatcaccaaagagagagagacaaactcaaccacaaaagtttatccccatcagccagtttccgaggtgctgagaagcacagaaactccgcagactactcctcagagagcaaaaagcagaaaactgaagaaaaggaaattgcagctcgttataatgaaaaatctactactcccgtctcaaagtccaatacccctactccacgaactgatgcgcccaccccaggcagtaactctactcccggattgaggcctgtacctggaaaaccaccaggagttgaccctttggcctcaagcctaaggaccccaatggcagtaccttgtccatatccaactccatttgggattgtgccccatgctggaatgaacggagagctgaccagccccggagcggcctacgctgggctccacaacatctcccctcagatgagcgcagctgctgccgccgccgctgctgctgctgcctatgggagatcaccagtggtgggatttgatccacaccatcacatgcgtgtgccagcaatacctccaaacctgacaggcattccaggaggaaaaccagcatactccttccatgttagcgcagatggtcagatgcagcctgtcccttttccacccgacgccctcatcggacctggaatcccccggcatgctcgccagatcaacaccctcaaccacggggaggtggtgtgcgcggtgaccatcagcaaccccacgagacacgtgtacacgggtgggaagggctgcgtcaaggtctgggacatcagccacccaggcaataagagtcctgtctcccagctcgactgtctgaacagggataactacatccgttcctgcagattgctccctgatggtcgcaccctaattgttggaggggaagccagtactttgtccatttgggacctggcggctccaaccccacgcatcaaggcagagctgacatcctcggcccccgcctgctatgccctggccatcagccccgattccaaggtctgcttctcatgctgcagcgacggcaacatcgctgtgtgggatctgcacaaccagaccttggtgaggcaattccagggccacacagatggagccagctgtattgacatttctaatgatggcaccaagctctggacaggtggtttggacaacacggtcaggtcctgggacctgcgcgaggggcggcagctgcagcagcacgacttcacctcccagatcttttctctgggctactgcccaactggagagtggcttgcagtggggatggagaacagcaatgtggaagttttgcatgtcaccaagccagacaaataccaactacatcttcatgagagctgtgtgctgtcgctcaagtttgcccattgtggcaaatggtttgtaagcactggaaaggacaaccttctgaatgcctggagaacaccttatggggccagtatattccagtccaaagaatcctcatcggtgcttagctgtgacatctccgtggacgacaaatacattgtcactggctctggggataagaaggccacagtttatgaagttatttattaaagacaaatcttcatgcagactggacttctcctcctggtagcactttgctctgtcatcctttttgttcacccccatccccgcatctaaaaccaaggatttcagatactcattgcagttgtggagtttaatcccctttcttaacctcacttcccacttgctattgaattgtgaatagtcattaaaaacctgtgataccaaatcttcagctgtctacttggaagaacatggaataagcatacttaacagtgaaaagaatctttaattatgtattatatctgtaatatatttattttgtttaaagaaggctttctaacaatgactgactaaataaagctgtctgctcctgcattgataatgaaggtgcgttgtatttgatacccctccccccctttttttggcaaaggaggggaaaggaaggtttaaaataattgatttaaaatgtcactaagtgtagactgatgactgtatagagatgtgaaatgtataattacacatggaagcaatatgttgctgtgttgttattaggttttttttgtttttgttttctacatcttttaaagacttttggaaatttggctgaacaattagaacacaacaggccaactcatactcatttggatctatttagacaacgttaaccaatatatctatagctttagattatattcgataaaagtaattggactttttttctttttttgactcgttgacaagtgtctttgtaatatgtttttagttccctttttttgttgtattataggcagatgaacaaattaaatttggcctcaaagagagaacttactcccttctggatatttttgccacatttctttgcaaaaggagatatatatatctttagtcagttttgttgttatgagaaattatgggttattttgtggcatgctctttgggagctgcacagttatggggaggactcccactgctgtgcaagttaagtcttttacaaaacaaggacagcagaggagggtttgcagagacctccctctgaaaaacacaaagaatggactctctcctgggatgaggacttgctttctttacctccggttctttccatgtcttagttggatgtccctgaaatggacacaggctgtgccattgtgccagaaacattgtgttatcttttatgttgttgttgttgctgttaaactataatatgtgacttctttttttattattttttgtttgaatgctttaaaaatcttttaagtctgtggatctgctgatgtacagtgcctttgctgctatggatcaaaatcaaaagaaccgtgtagatatactttattgtataagtagaaaattacttaatttcatactagaaatggatggatgctgcaagttgaaatggactgtccattgacgttcctaatgtggtagcagaaaaaaaaaaatggtgtcttaagtgcttagtgtttgatgtcattaacagtttcgtaaaactctacagtgtagaaagattttgatactaaactgtgcgttgtacatagttctaatgcattgtattgaccaccagtacttctataatggtagattgtttgtgaattcagacttttaagcattaaacataaataacttctagta

SEQ ID NO: 102542 - DNA, 2115 bp, Artificial Sequence
  derived and/or modified sequence
atgatcagagacctgagcaagatgtacccccagaccagacaccccgccccccaccagcccgcccagcccttcaagttcaccatcagcgagagctgcgacagaatcaaggaggagttccagttcctgcaggcccagtaccacagcctgaagctggagtgcgagaagctggccagcgagaagaccgagatgcagagacactacgtgatgtactacgagatgagctacggcctgaacatcgagatgcacaagcaggccgagatcgtgaagagactgaacgccatctgcgcccaggtgatccccttcctgagccaggagcaccagcagcaggtggtgcaggccgtggagagagccaagcaggtgaccatggccgagctgaacgccatcatcggccagcagctgcaggcccagcacctgagccacggccacggcctgcccgtgcccctgaccccccaccccagcggcctgcagccccccgccatcccccccatcggcagcagcgccggcctgctggccctgagcagcgccctgggcggccagagccacctgcccatcaaggacgagaagaagcaccacgacaacgaccaccagagagagagagacaagctgaaccacaagagcctgagccccagcgccagcttcagaggcgccgagaagcacagaaacagcgccgactacagcagcgagagcaagaagcagaagaccgaggagaaggagatcgccgccagatacaacgagaagagcaccacccccgtgagcaagagcaacacccccacccccagaaccgacgcccccacccccggcagcaacagcacccccggcctgagacccgtgcccggcaagccccccggcgtggaccccctggccagcagcctgagaacccccatggccgtgccctgcccctaccccacccccttcggcatcgtgccccacgccggcatgaacggcgagctgaccagccccggcgccgcctacgccggcctgcacaacatcagcccccagatgagcgccgccgccgccgccgccgccgccgccgccgcctacggcagaagccccgtggtgggcttcgacccccaccaccacatgagagtgcccgccatcccccccaacctgaccggcatccccggcggcaagcccgcctacagcttccacgtgagcgccgacggccagatgcagcccgtgcccttcccccccgacgccctgatcggccccggcatccccagacacgccagacagatcaacaccctgaaccacggcgaggtggtgtgcgccgtgaccatcagcaaccccaccagacacgtgtacaccggcggcaagggctgcgtgaaggtgtgggacatcagccaccccggcaacaagagccccgtgagccagctggactgcctgaacagagacaactacatcagaagctgcagactgctgcccgacggcagaaccctgatcgtgggcggcgaggccagcaccctgagcatctgggacctggccgcccccacccccagaatcaaggccgagctgaccagcagcgcccccgcctgctacgccctggccatcagccccgacagcaaggtgtgcttcagctgctgcagcgacggcaacatcgccgtgtgggacctgcacaaccagaccctggtgagacagttccagggccacaccgacggcgccagctgcatcgacatcagcaacgacggcaccaagctgtggaccggcggcctggacaacaccgtgagaagctgggacctgagagagggcagacagctgcagcagcacgacttcaccagccagatcttcagcctgggctactgccccaccggcgagtggctggccgtgggcatggagaacagcaacgtggaggtgctgcacgtgaccaagcccgacaagtaccagctgcacctgcacgagagctgcgtgctgagcctgaagttcgcccactgcggcaagtggttcgtgagcaccggcaaggacaacctgctgaacgcctggagaaccccctacggcgccagcatcttccagagcaaggagagcagcagcgtgctgagctgcgacatcagcgtggacgacaagtacatcgtgaccggcagcggcgacaagaaggccaccgtgtacgaggtgatctactag

SEQ ID NO: 102543 - protein, 695 aa, Artificial Sequence
  derived and/or modified sequence
MEAETGSSVETGKKANRGTRIALVVFVGGTLVLGTILFLVSQGLLSLQAKQEYCLKPECIEAAAAILSKVNLSVDPCDNFFRFACDGWISNNPIPEDMPSYGVYPWLRHNVDLKLKELLEKSISRRRDTEAIQKAKILYSSCMNEKAIEKADAKPLLHILRHSPFRWPVLESNIGPEGVWSERKFSLLQTLATFRGQYSNSVFIRLYVSPDDKASNEHILKLDQATLSLAVREDYLDNSTEAKSYRDALYKFMVDTAVLLGANSSRAEHDMKSVLRLEIKIAEIMIPHENRTSEAMYNKMNISELSAMIPQFDWLGYIKKVIDTRLYPHLKDISPSENVVVRVPQYFKDLFRILGSERKKTIANYLVWRMVYSRIPNLSRRFQYRWLEFSRVIQGTTTLLPQWDKCVNFIESALPYVVGKMFVDVYFQEDKKEMMEELVEGVRWAFIDMLEKENEWMDAGTKRKAKEKARAVLAKVGYPEFIMNDTHVNEDLKAIKFSEADYFGNVLQTRKYLAQSDFFWLRKAVPKTEWFTNPTTVNAFYSASTNQIRFPAGELQKPFFWGTEYPRSLSYGAIGVIVGHEFTHGFDNNGRKYDKNGNLDPWWSTESEEKFKEKTKCMINQYSNYYWKKAGLNVKGKRTLGENIADNGGLREAFRAYRKWINDRRQGLEEPLLPGITFTNNQLFFLSYAHGQWCN

SEQ ID NO: 102544 - DNA, 2088 bp, Artificial Sequence
  derived and/or modified sequence
atggaggctgagacggggtcttccgtggaaaccggcaaaaaggctaatagagggacgcggattgcacttgtggtctttgtcggcgggacattggtcctgggcaccatcctgttcttagtcagtcaaggcttgctcagcctacaggcgaaacaagaatactgcctgaagccagagtgtatcgaagctgctgccgccattctgagtaaggttaacctgtccgttgacccctgtgataacttcttccggttcgcatgcgatggctggatctcaaacaatcccatccctgaggatatgccctcatatggggtgtacccatggttaaggcataacgtcgatttgaagctcaaggagttgctcgaaaagagcattagtagaaggagggacaccgaggctatccagaaggctaagatcttatacagcagctgtatgaatgaaaaagccattgaaaaggctgatgccaaaccattattgcatatcctgaggcactccccgtttcgctggcctgtcctcgagtcgaacatcggtcccgagggggtctggtcagaaagaaagtttagcttactccaaaccctggctaccttcaggggtcaatactcaaatagtgtgttcatccgcttgtacgtgtcgcccgacgacaaggccagcaacgaacatattctgaaacttgaccaggcaaccttgtccttggccgttcgagaggactacctggataattcaactgaggccaaaagctaccgagatgccctctacaagttcatggtggacaccgcggtactgctcggtgccaacagcagcagagccgaacacgatatgaaaagcgttctaagactggagatcaagatcgccgagatcatgatcccgcacgaaaacaggacatccgaggctatgtacaataagatgaatatcagtgagctctctgcgatgatccctcaatttgactggctgggttacatcaaaaaagtcatcgacacgcgtctttacccccatctgaaagacatttccccgtcagagaatgtagttgtgcgagtgccgcagtattttaaggacttattccgcattttggggagcgaaagaaaaaagacaatcgcaaactacctggtgtggagaatggtgtactcccgcatcccaaatctcagtagacgtttccagtacaggtggttagagttttccagggtgatacaggggactaccaccctgctccctcagtgggataagtgtgtgaatttcatcgagagcgctctgccttacgtggtgggcaagatgtttgtggatgtgtattttcaggaggataaaaaggagatgatggaggagttagtcgagggagtaaggtgggcctttatagatatgctggaaaaagaaaacgaatggatggacgctggaaccaaacgaaaagccaaagagaaggcaagagccgtgctcgccaaggtggggtaccctgagttcatcatgaatgacacccacgtcaatgaggatctaaaggctatcaagtttagcgaggctgactatttcgggaacgtcttgcagaccagaaagtatctggctcagtcagacttcttctggctgcgtaaggctgtgcctaagaccgaatggtttaccaaccccaccacggtgaacgcattctactctgcatcaactaaccaaattaggtttccagccggtgagctgcagaaaccattcttctgggggaccgaatacccacggtcgttatcatatggagcgataggagtgatcgtgggccacgaatttacgcatgggtttgataacaatggccgcaaatatgacaagaatggaaacttggacccctggtggtcaactgagagtgaggagaaatttaaagagaaaacaaaatgcatgatcaatcagtacagtaactactactggaaaaaggccggactcaatgtcaaaggaaagcgtaccctgggcgagaacatcgccgataacggaggcctaagagaggctttccgcgcatacagaaaatggattaatgatagacgccaggggctggaagaaccgttgttaccaggtatcacctttaccaataaccaattgttcttcctaagttacgctcacggacagtggtgcaactag

SEQ ID NO: 102545 - DNA, 2088 bp, Artificial Sequence
  derived and/or modified sequence
atggaggccgagaccggcagctctgtggagaccgggaagaaggccaacagaggcaccagaattgccctggtggtgtttgtgggcggcaccctggtgctgggcaccatcctcttcctggtgtcccagggcctgctgagcctgcaggccaagcaggagtactgcctgaagccagagtgcatcgaggccgccgccgccatcctgagcaaggtgaacctgtctgtggacccctgtgacaacttcttccgctttgcctgtgatggctggatcagcaacaaccccatccctgaggacatgcccagctatggagtgtacccctggctgcggcacaacgtggacctgaagctgaaggagctgctggagaagagcatcagcagaagaagagacacagaggccatccagaaggccaagatcctgtacagcagctgcatgaatgagaaggccatcgagaaggcagatgccaagcccctgctgcacatcctgcggcacagccccttccgctggcctgtgctggagagcaacatcggccctgagggcgtgtggagcgagaggaagttcagcctgctgcagaccctggccaccttccggggccagtacagcaacagcgtcttcatccggctgtatgtgtccccagatgacaaggccagcaatgagcacatcctgaagctggaccaggccaccctgagcctggccgtgcgggaggactacctggacaacagcacagaggccaagagctacagagatgccctgtacaagttcatggtggacacagctgtgctgctgggcgccaacagcagcagagctgagcatgacatgaagtctgtgctgcggctggagatcaagattgctgagatcatgatcccccatgaaaatagaacatctgaggccatgtacaacaagatgaacatcagcgagctgagcgccatgatcccccagtttgactggctgggctacatcaagaaggtgattgacacccggctgtacccccacctgaaggacatcagccccagtgaaaatgtggtggtgcgggtgccccagtacttcaaggacctcttccgcatcctgggcagcgagaggaagaagaccatcgccaactacctggtgtggaggatggtgtacagccgcatccccaacctgagccgccgcttccagtaccgctggctggagttcagcagggtcatccagggcaccaccaccctgctgccccagtgggacaagtgtgtgaacttcatcgagagcgccctgccctacgtggtgggcaagatgtttgtggatgtgtacttccaggaggacaagaaggagatgatggaggagctggtggagggcgtgcgctgggccttcatcgacatgctggagaaggaaaatgagtggatggatgctggcaccaagaggaaggccaaggagaaggcccgggctgtgctggccaaggtgggctacccagagttcatcatgaatgacacccacgtgaatgaagacctgaaggccatcaagttcagcgaggccgactactttggaaatgtgctgcagaccaggaagtacctggcccagagcgacttcttctggctgaggaaggctgtgcccaagacagagtggttcaccaaccccaccaccgtgaatgccttctacagcgccagcaccaaccagatccgcttccctgctggggagctgcagaagcccttcttctggggcacagagtaccccaggagcctgtcctatggagccatcggcgtgattgtgggccacgagttcacccacggctttgacaacaatggaagaaaatatgacaagaatggaaacctggacccctggtggagcacagaaagtgaggagaagttcaaggagaagaccaagtgcatgatcaaccagtacagcaactactactggaagaaggccggcctgaatgtgaagggcaagaggaccctgggggagaacattgctgacaatggaggcctgcgggaggccttccgggcctacaggaagtggatcaatgaccggcggcagggcctggaggagcccctgctgcccggcatcaccttcaccaacaaccagctgttcttcctgtcctatgcccacggccagtggtgcaactag

SEQ ID NO: 102546 - DNA, 2088 bp, Artificial Sequence
  derived and/or modified sequence
atggaggccgagaccggcagcagcgtggagaccggcaagaaggccaatcgcggaactaggatcgcacttgtagtctttgttggcggtaccctcgtgttgggtacaatattgttcttggtgagtcagggactcttgagtctccaggccaaacaagagtattgtctcaaacccgagtgcatagaagccgctgccgccattctgtccaaggtgaatctgagcgtcgatccttgtgacaatttcttcagattcgcctgtgatggctggataagcaacaatccaattccagaggatatgcctagttacggggtgtatccatggctgcgtcacaacgtggatcttaagttaaaggaactgcttgaaaaatcaattagccgccgacgggacactgaagccattcagaaagcaaaaatattgtactcctcttgcatgaatgagaaagctatagagaaggccgatgccaaaccattgctacacatcttacggcatagtcctttccgatggcccgtactggaatcaaatattggaccagagggggtctggtcagaaaggaagttttctttgctgcagaccctcgccacatttcggggacagtatagcaatagtgtgtttatccggctgtatgtttcaccagatgacaaagctagcaatgaacatatcctgaaattggaccaggcaaccctgagtctggctgtccgagaggactatctggataattctactgaggcaaagagttaccgcgacgccctgtacaagtttatggtggacacggctgttctcctgggtgccaactcatccagggccgagcatgatatgaaatcagtcctccggctggagatcaagattgcagaaattatgatcccccacgaaaatcggacgagcgaggcaatgtacaacaaaatgaacatttccgaactgagtgctatgattccacagtttgactggttgggatatatcaaaaaggtcatcgacactagactatacccccatctgaaagatatttcaccaagtgagaatgtcgtcgtcagggtacctcagtatttcaaggacttatttaggatccttggatccgagcggaagaagacaattgcaaactatctggtgtggcggatggtttactctaggatcccaaatctgagtcgaagatttcagtaccgatggctggagttttcccgcgtgatccaaggaacaactactctgttacctcagtgggataaatgtgtaaacttcattgagtcagcactgccttatgtcgtgggcaagatgtttgtcgacgtctatttccaggaggataagaaagaaatgatggaggaactggtcgagggcgtgcgctgggcttttattgatatgctggagaaggaaaatgagtggatggacgccggtaccaagcgaaaagccaaggagaaagccagggcggtgttggccaaagtcgggtacccagaatttatcatgaacgacacacacgtgaatgaggacctgaaggcaatcaagtttagcgaggctgactatttcggcaatgttctgcagactcggaaatacctggcccagagcgactttttttggttaaggaaggcggttccaaaaacagagtggttcactaaccccaccacagtcaatgcattctattcagcctcaaccaatcagattaggttccccgcaggcgagcttcaaaaaccatttttttgggggacagagtacccaagaagcctgtcgtacggcgctataggcgtgattgtgggtcacgagttcactcacggatttgacaacaacggcaggaagtatgacaagaatggcaacctggacccctggtggagcaccgagtcagaggagaaattcaaggaaaaaaccaagtgcatgatcaatcagtattcaaactactattggaaaaaggctggactcaatgtgaagggaaagcgcacgcttggggaaaatattgctgacaacgggggtctgagagaggcttttcgcgcctaccgcaagtggattaatgacaggaggcagggactggaagagcctctgctccccgggattacattcacaaacaaccagctgtttttcctgagctacgcccacggccagtggtgcaactag

SEQ ID NO: 102547 - DNA, 2511 bp, Artificial Sequence
  derived and/or modified sequence
attagtagaagagcaagaaagccttggatgtcaacgcctcgctcttgagaccagccaccaaaccacgaaaagtgactttcttctcgtgtgctctctacggcccttctgatggaagcagaaacagggagcagcgtggagactggaaagaaggccaacagaggcactcgaattgccctggtcgtgtttgtcggtggcaccctagttctgggcacgatcctctttctagtgagtcaaggtctcttaagtctccaagctaaacaggagtactgcctgaagccagaatgcatcgaagcggctgctgccatcttaagtaaagtaaatctgtctgtggatccttgtgataatttcttccggttcgcttgtgatggctggataagcaataatccaattcccgaagatatgccaagctatggggtttatccttggctgagacataatgttgacctcaagttgaaggaacttttggagaaatcaatcagtagaaggcgggacaccgaagccatacagaaagccaaaatcctttattcatcctgcatgaatgagaaagcgattgaaaaagcagatgccaagccactgctacacatcctacggcattcacctttccgctggcccgtgcttgaatctaatattggccctgaaggggtttggtcagagagaaagttcagccttctgcagacacttgcaacgtttcgtggtcaatacagcaattctgtgttcatccgtttgtatgtgtcccctgatgacaaagcatccaatgaacatatcttgaagctggaccaagcaacactctccctggccgtgagggaagactaccttgataacagtacagaagccaagtcttatcgggatgccctttacaagttcatggtggatactgccgtgcttttaggagctaacagttccagagcagagcatgacatgaagtcagtgctcagattggaaattaagatagctgagataatgattccacatgaaaaccgaaccagcgaggccatgtacaacaaaatgaacatttctgaactgagtgctatgattccccagttcgactggctgggctacatcaagaaggtcattgacaccagactctacccccatctgaaagacatcagcccctccgagaatgtggtggtccgcgtcccgcagtactttaaagatttgtttaggatattagggtctgagagaaagaagaccattgccaactatttggtgtggagaatggtttattccagaattccaaaccttagcaggcgctttcagtatagatggctggaattctcaagggtaatccaggggaccacaactttgctgcctcaatgggacaaatgtgtaaactttattgaaagtgccctcccttatgttgttggaaagatgtttgtagatgtgtacttccaggaagataagaaggaaatgatggaggaattggttgagggcgttcgctgggcctttattgacatgctagagaaagaaaatgagtggatggatgcaggaacgaaaaggaaagccaaagaaaaggcgagagctgttttggcaaaagttggctatccagagtttataatgaatgatactcatgttaatgaagacctcaaagctatcaagttttcagaagccgactactttggcaacgtcctacaaactcgcaagtatttagcacagtctgatttcttctggctaagaaaagccgttccaaaaacagagtggtttacaaatccgacgactgtcaatgccttctacagtgcatccaccaaccagatccgatttccagcaggagagctccagaagcctttcttttggggaacagaatatcctcgatctctgagttatggtgctataggagtaattgtcggacatgaatttacacatggatttgataataatggtagaaaatatgataaaaatggaaacctggatccttggtggtctactgaatcagaagaaaagtttaaggaaaaaacaaaatgcatgattaaccagtatagcaactattattggaagaaagctggcttaaatgtcaaggggaagaggaccctgggagaaaatattgctgataatggaggcctgcgggaagcttttagggcttacaggaaatggataaatgacagaaggcagggacttgaggagcctcttctaccaggcatcacattcaccaacaaccagctcttcttcctgagttatgctcatggtcaatggtgcaattagtaactttgaagaattccagaaagcttttaactgtccacccaattccacgatgaacagaggcatggactcctgccgactctggtagctgggacgctggtttatggcatcctgagacagttgcacagtgccagcggaggctgcactgagccttcatcgcccattgctttaggcctggagactttcatttttagtgcattttcattatttgggtaggtgacctgcttggatctagacagcatctgttcaaagttgtagggcttataaagtggaatataagaatgaactaagtatgtttctttagaaaatcaaaccaac

SEQ ID NO: 102548 - DNA, 2088 bp, Artificial Sequence
  derived and/or modified sequence
atggaggctgagactggctcttctgtggaaacaggtaaaaaagccaacaggggtactcgtatcgccctggtggtgttcgttggcggaaccctggttcttggcaccatcttattcttagtgtctcagggacttctctccctgcaggcgaagcaggaatactgtctgaaacccgagtgcatcgaggccgcagcagccatcctctccaaagttaatctgtctgtggacccatgtgacaatttctttagatttgcctgtgatggatggatatccaataatccgatcccggaggatatgccttcatacggggtctatccttggctgaggcacaacgtggaccttaagctgaaggagctactcgaaaagtccatttcccgacggagggatacagaagctattcagaaggccaaaattctgtactcttcatgtatgaacgagaaggcaatagagaaagctgacgccaaacccctgctgcacatcttgcgccactctcccttccgatggcctgtcctggagtcaaacataggcccagaaggggtatggagcgagagaaagttcagtcttcttcagaccttggcaaccttcaggggacagtactcaaacagtgtgttcatccgactgtacgtcagccccgatgataaggcaagcaacgaacatattctcaagctggaccaggcaacactgagtcttgctgtgagagaagattaccttgataattccaccgaggccaagagctaccgagacgccttatataagtttatggtggatacagccgtacttctgggggcaaatagttccagagcagagcacgacatgaaatctgtcctgagacttgagatcaaaattgccgaaattatgatccctcacgagaatcgtacctccgaagcgatgtacaataagatgaacatctctgaactctccgctatgatccctcagttcgactggctgggatatatcaaaaaagtaatcgatacaagactctaccctcatctgaaggatatttcgcccagtgagaacgtggtagtcagagtgcctcagtactttaaggacctatttcgtatcttggggtcagagagaaagaaaactatcgcaaattacttagtgtggcggatggtctacagccgcataccgaatctgtccagacgtttccaatatcgttggctagaattctccagagtcattcagggcacaaccaccctgctcccgcagtgggacaagtgtgtcaattttatcgaatccgcattgccttatgtggtcggaaaaatgtttgtggatgtttactttcaggaggataagaaggaaatgatggaagaactggtcgaaggagtccgatgggctttcatcgacatgttggagaaagagaacgagtggatggacgccggtaccaaaagaaaggccaaggaaaaagctagggcagttctggccaaggtcggttatccagagttcataatgaacgatacacacgtgaacgaggacctgaaggcaataaaatttagtgaagccgactattttgggaatgtgttacagactcggaaatatctagcccaatctgactttttctggttgaggaaggcagttcctaaaactgagtggttcactaacccaaccacagtcaacgcattttatagtgcttcaaccaaccagatcaggtttcctgcgggtgagctgcagaagccgttcttttggggaactgagtacccaagatcactgagctatggggcaatcggtgtgattgtggggcatgaatttacccatggcttcgataataacggccgtaagtatgacaagaatggaaatttagatccgtggtggtcaaccgagtccgaggaaaagttcaaggagaagactaagtgcatgattaaccaatactctaactactactggaaaaaagccggacttaacgtaaaaggcaaacgcacacttggtgagaatatagcggacaatgggggactgagggaggcattccgggcttaccgaaagtggatcaacgacagaaggcagggacttgaggagcccctgttgccaggtattaccttcaccaataaccagctcttcttcctgagttatgcacacggtcagtggtgcaattag

SEQ ID NO: 102549 - DNA, 2088 bp, Artificial Sequence
  derived and/or modified sequence
atggaggccgagaccggcagcagcgtggagaccggcaagaaggccaacagaggcaccagaatcgccctggtggtgttcgtgggcggcaccctggtgctgggcaccatcctgttcctggtgagccagggcctgctgagcctgcaggccaagcaggagtactgcctgaagcccgagtgcatcgaggccgccgccgccatcctgagcaaggtgaacctgagcgtggacccctgcgacaacttcttcagattcgcctgcgacggctggatcagcaacaaccccatccccgaggacatgcccagctacggcgtgtacccctggctgagacacaacgtggacctgaagctgaaggagctgctggagaagagcatcagcagaagaagagacaccgaggccatccagaaggccaagatcctgtacagcagctgcatgaacgagaaggccatcgagaaggccgacgccaagcccctgctgcacatcctgagacacagccccttcagatggcccgtgctggagagcaacatcggccccgagggcgtgtggagcgagagaaagttcagcctgctgcagaccctggccaccttcagaggccagtacagcaacagcgtgttcatcagactgtacgtgagccccgacgacaaggccagcaacgagcacatcctgaagctggaccaggccaccctgagcctggccgtgagagaggactacctggacaacagcaccgaggccaagagctacagagacgccctgtacaagttcatggtggacaccgccgtgctgctgggcgccaacagcagcagagccgagcacgacatgaagagcgtgctgagactggagatcaagatcgccgagatcatgatcccccacgagaacagaaccagcgaggccatgtacaacaagatgaacatcagcgagctgagcgccatgatcccccagttcgactggctgggctacatcaagaaggtgatcgacaccagactgtacccccacctgaaggacatcagccccagcgagaacgtggtggtgagagtgccccagtacttcaaggacctgttcagaatcctgggcagcgagagaaagaagaccatcgccaactacctggtgtggagaatggtgtacagcagaatccccaacctgagcagaagattccagtacagatggctggagttcagcagagtgatccagggcaccaccaccctgctgccccagtgggacaagtgcgtgaacttcatcgagagcgccctgccctacgtggtgggcaagatgttcgtggacgtgtacttccaggaggacaagaaggagatgatggaggagctggtggagggcgtgagatgggccttcatcgacatgctggagaaggagaacgagtggatggacgccggcaccaagagaaaggccaaggagaaggccagagccgtgctggccaaggtgggctaccccgagttcatcatgaacgacacccacgtgaacgaggacctgaaggccatcaagttcagcgaggccgactacttcggcaacgtgctgcagaccagaaagtacctggcccagagcgacttcttctggctgagaaaggccgtgcccaagaccgagtggttcaccaaccccaccaccgtgaacgccttctacagcgccagcaccaaccagatcagattccccgccggcgagctgcagaagcccttcttctggggcaccgagtaccccagaagcctgagctacggcgccatcggcgtgatcgtgggccacgagttcacccacggcttcgacaacaacggcagaaagtacgacaagaacggcaacctggacccctggtggagcaccgagagcgaggagaagttcaaggagaagaccaagtgcatgatcaaccagtacagcaactactactggaagaaggccggcctgaacgtgaagggcaagagaaccctgggcgagaacatcgccgacaacggcggcctgagagaggccttcagagcctacagaaagtggatcaacgacagaagacagggcctggaggagcccctgctgcccggcatcaccttcaccaacaaccagctgttcttcctgagctacgcccacggccagtggtgcaactag

SEQ ID NO: 102550 - protein, 180 aa, Artificial Sequence
  derived and/or modified sequence
MSNRRRHTGSRANPDPNTCLGVFGLSLYTTERDLREVFSRYGPLSGVNVVYDQRTGRSRGFAFVYFERIDDSKEAMERANGMELDGRRIRVDYSITKRAHTPTPGIYMGRPTHSGGGGGGGGGGGGGGGGRRRDSYYDRGYDRGYDRYEDYDYRYRRSPSPYYSRYRSRSRSRSYSPRRY

SEQ ID NO: 102551 - DNA, 849 bp, Artificial Sequence
  derived and/or modified sequence
atgagcgatgtggaggaaaacaactttgaggggagggagtcaagatcccaatctaaatctccaacagggacccccgcaagagtcaaatctgagagccgttccggatctcgttctccgtctagggtcagcaagcactcagagtcacactcaaggagccgatccaagtcacgcagtcgcagccgccggcattcccataggaggtacacccgcagtcgctctcactcccattcccacagacgtcggtccagaagccgatcatatactcccgagtacaggcggagacggagcaggagccattctcctatgagcaaccggagaaggcacaccggcagccgagctaatcctgatcctaacacatgcctgggagtcttcggcctgtctctgtatactacagaacgggacctgagagaggtattttcccgatacggtcctctgagcggggtgaacgttgtctacgaccagcggaccggacggagccgcggctttgcctttgtttactttgagcggatcgacgatagtaaggaggctatggagagggccaacggcatggagctggacggaaggcggattcgcgtagattatagtatcaccaagcgagcacacacgccgactcctggtatttatatgggaaggcctacccactccgggggaggcggcggaggcggggggggggggggtggaggtgggggaggaagacgacgcgatagttactacgaccgcggctatgaccgggggtatgacagatacgaagactacgattaccgatatcgccgcagaagtccctcgccttactattcccggtataggagcaggagccgatcccgttcctattccccaaggagatactag

SEQ ID NO: 102552 - DNA, 543 bp, Artificial Sequence
  derived and/or modified sequence
atgtccaataggagacgccacaccgggtcaagagcaaatcccgatcccaacacatgtctgggggtgtttggcctttctctgtatactactgagcgtgatctgcgcgaagtgttttcccggtacggcccactctcaggcgttaatgtcgtgtacgatcagaggactggccgcagtcgagggttcgctttcgtgtactttgagcggattgatgacagtaaggaggccatggagcgcgcgaatggaatggaactagatggtagaaggattagggttgattactctatcacgaaaagagcacacacccctactcctggaatctacatgggccgacccacccattccgggggtggaggcggaggaggtggtggaggtggcggagggggcggcggtcgccgaagggactcatactacgaccggggatatgacagaggatacgaccgttatgaggactacgactaccggtaccggaggtcgccaagcccgtattacagccgctatcgatctcgttcacgcagcagatcctacagcccaagaaggtactag

SEQ ID NO: 102553 - DNA, 546 bp, Artificial Sequence
  derived and/or modified sequence
atgagcaacaggcgtagacacaccggttcccgtgccaatccagatccaaatacctgtctcggcgttttcggcctgtctctctacacgaccgagagggatctccgtgaagtcttcagtcggtacggcccactgtccggtgtgaatgtggtgtacgatcagcgaacaggcaggtcacgggggtttgctttcgtatacttcgaacggatcgatgattccaaagaggctatggaacgggccaacggcatggagcttgacggacggcgcatccgcgtggattacagcatcacaaagagggcacacaccccaacaccggggatatacatgggcagacccacgcactccggcggcggaggcggaggaggtggaggcggcggcggcggcggcggaggtaggcgccgcgacagctactacgatcgcgggtacgatcgagggtacgacaggtacgaagactatgattacaggtaccggcggcggtcaccatctccatattatagtcgatacaggagtcgctctcgctctcggtcctacagtccaagaaggtattag

SEQ ID NO: 102554 - DNA, 849 bp, Artificial Sequence
  derived and/or modified sequence
atgtctgatgtggaggagaacaactttgagggccgggagagccgcagccagagcaagagccccaccggcaccccagcccgggtgaagtctgagagccgcagcggcagccgcagccccagccgggtgtccaagcacagcgagagccacagccgcagccgcagcaagagccgcagccgcagcagaagacacagccaccggcgctacaccaggagccgcagccacagccacagccacagaagaagaagccgcagccgcagctacaccccagagtacagaagaagaagaagccgcagccacagccccatgagcaacagaagaagacacacaggcagccgggccaacccagaccccaacacctgcctgggcgtgtttggcctgagcctgtacaccacagagcgggacctgcgggaggtgttcagccgctatggccccctgagcggcgtgaatgtggtgtatgaccagaggacaggccgcagccggggctttgcctttgtgtactttgaaagaattgatgacagcaaggaggccatggagcgggccaacggcatggagctggatggccgccgcatccgggtggactacagcatcaccaagagggcccacacccccaccccaggcatctacatgggccggcccacccacagcggcggcggcggcggcggcggcggcggcggcggcggcggcggcggcggcagaagaagagacagctactatgaccggggctatgaccggggctatgacagatatgaggactatgactaccgctacagaagaagaagccccagcccctactacagccgctaccgcagccgcagccgcagccgcagctacagcccccggcgctactag

SEQ ID NO: 102555 - DNA, 543 bp, Artificial Sequence
  derived and/or modified sequence
atgagcaacagaagaagacacacaggcagccgggccaacccagaccccaacacctgcctgggcgtgtttggcctgagcctgtacaccacagagcgggacctgcgggaggtgttcagccgctatggccccctgtctggagtgaatgtggtgtatgaccagaggacaggccgcagccggggctttgcctttgtgtactttgaaagaattgatgacagcaaggaggccatggagcgggccaacggcatggagctggatggaagacgcatccgggtggactacagcatcaccaagagggcccacacccccaccccaggcatctacatgggccggcccacccacagcggcggcggcggcggcggcggcggcggcggcggcggcggcggcggcggcagaagaagagacagctactatgaccggggctatgaccggggctatgacagatatgaagattatgactaccgctaccgccgcagccccagcccctactacagccgctaccgcagccgcagccgcagccgcagctacagcccccggcgctactag

SEQ ID NO: 102556 - DNA, 546 bp, Artificial Sequence
  derived and/or modified sequence
atgagcaacagaagaagacacacaggcagccgggccaacccagaccccaacacctgcctgggcgtgtttggcctgagcctgtacaccacagagcgggacctgcgggaggtgttcagccgctatggccccctgtctggagtgaatgtggtgtatgaccagaggacaggccgcagccggggctttgcctttgtgtactttgaaagaattgatgacagcaaggaggccatggagcgggccaacggcatggagctggatggaagacgcatccgggtggactacagcatcaccaagagggcccacacccccaccccaggcatctacatgggccggcccacccacagcggcggcggcggcggcggcggcggcggcggcggcggcggcggcggcggcagaagaagagacagctactatgaccggggctatgaccggggctatgacagatatgaagattatgactaccgctacagaagaagaagccccagcccctactacagccgctaccgcagccgcagccgcagccgcagctacagcccccggcgctactag

SEQ ID NO: 102557 - DNA, 849 bp, Artificial Sequence
  derived and/or modified sequence
atgagcgacgtggaggagaacaacttcgagggccgggagagccggtcccagagcaagagtcccactggtacacccgcgcgggttaagtcggagtcccgcagcggtagcaggagcccatctcgcgtgtccaagcacagcgaatctcattcacgatccaggagcaaatccaggtctcgatcgaggagacactctcacaggagatacactagatcacggtctcatagtcacagtcacaggagacgctctaggagccgatcctacaccccagagtacagaagaaggagatcacgctctcacagccctatgagcaaccgcaggaggcatactgggtccagagcaaacccagacccaaacacatgccttggcgtattcggcctgtccctatataccactgaacgggacctgagagaagtgttctcacgttatggaccgctgtcgggggtcaacgtcgtgtacgaccagagaactggtcggagtcgaggcttcgccttcgtctatttcgaaagaattgatgattccaaggaagcaatggagcgggcgaacggcatggagcttgatggacgacgcatacgggtcgattattcaatcaccaaacgcgcccacacacctacccccggtatttacatgggaaggcctacccatagtggaggagggggcggcggaggaggcggcggcggtggcggaggagggggtcgaaggagggatagttattatgacaggggctatgatcggggatatgataggtatgaagactacgattaccggtacaggcgacgcagcccttcgccgtattacagcaggtatcgttctcggagcaggtcccgctcttacagcccacgccgctactag

SEQ ID NO: 102558 - DNA, 543 bp, Artificial Sequence
  derived and/or modified sequence
atgagcaaccggcggcggcacaccggcagccgggccaaccccgaccccaatacatgtctgggcgtatttgggttgtccctgtatactactgagcgggacctgcgggaggttttctcgcgctatggacccttaagcggcgtgaatgtggtgtacgatcagcgtaccgggaggagcagaggcttcgcttttgtctacttcgagagaatcgatgactccaaggaggccatggagagggcaaatggaatggaactagacgggcggcgcatcagggtagattactccattacaaaacgagcccatacacccacaccaggtatctacatgggacgtcccacacacagcggggggggagggggtggcgggggggggggaggaggcggagggggaggtcgtagaagagatagttattacgatcgaggatacgacagaggctacgacaggtacgaggactacgattatcgctacaggcgatccccaagtccctattactcaagataccgatcgcggagccgcagccggtcatactctccacgaaggtattag

SEQ ID NO: 102559 - DNA, 546 bp, Artificial Sequence
  derived and/or modified sequence
atgagcaaccggcggcggcacaccggcagccgggccaaccccgaccccaacacttgtttgggggtgtttggcctgtcgctatatactaccgagcgcgatctccgcgaggtattcagtcggtacgggcccttgtccggtgtcaatgtggtgtatgatcagcgaacgggtaggtctcgtgggtttgcctttgtctatttcgaacgcatagacgattctaaggaggcgatggaaagagccaacggtatggaactggacggacgcaggatccgcgtggactactcaattacaaaacgagctcatactcccaccccagggatttacatgggacgaccaactcacagcggcggaggcggcggcgggggtggaggtggggggggaggcggcgggggacgcaggagagacagctattatgatagaggctacgacagaggttacgaccgctacgaggattacgactaccgatatcggcgcagatcccccagcccctactattccagatataggtctcgcagccgttctcgctcttacagccctcgaagatactag

SEQ ID NO: 102560 - DNA, 849 bp, Artificial Sequence
  derived and/or modified sequence
atgagcgacgtggaagagaataactttgagggcagagaaagtcggtcccagtccaaatctcccaccgggacgcctgctcgggtgaagtctgaatcccgatctggatctcgtagcccctctcgtgttagcaagcattccgaatcacatagcaggagtaggtccaagtcccgatccagaagtcgtaggcacagtcatcgaagatacacaagaagcagatcgcattcacactcccacagacgaagatccaggtctcggtcctatacacctgaatatcggagacggaggtctcggtctcattccccaatgtccaacagaaggaggcatactggtagcagggcaaatccagacccaaatacttgcctgggcgtgttcggtctgtcactctacaccactgagcgggatctgcgggaggtgttttcccggtacgggccactgagtggagtgaacgtcgtgtacgaccagagaacaggtcgctcaagaggctttgcttttgtttactttgagagaatcgacgattctaaagaggctatggagcgagctaatggcatggaattagatggccgacgcattcgcgtggactattccatcacaaagagggcccacaccccgacaccgggtatctacatgggccgacccacacactccggcggtggaggcggtggcggtggagggggtggcggtggtggaggcggtaggcggagggacagctactacgaccgcggttacgaccggggatacgatagatacgaagactatgattaccgttacagaagaaggtcaccctctccttattactcgagatataggagccgttctcgttcacggtcctactctccacgccgatactag

SEQ ID NO: 102561 - DNA, 543 bp, Artificial Sequence
  derived and/or modified sequence
atgtccaaccggaggagacataccggctcaagggccaatcctgatcctaatacgtgcttgggcgtttttggcctctcattgtacacaactgaaagggatctgagggaggtgttcagccgatacgggcctctgtcaggggttaacgtggtgtatgaccaacgcactggcagaagccgcggatttgccttcgtctatttcgaaaggatcgacgacagcaaggaagcaatggagagagcaaacggcatggaactggatggaagacggatccgtgtggattacagcatcaccaaacgtgcgcacactcccacccctggtatctacatgggcagacccacccatagcggaggaggcggagggggaggcggaggaggaggcggtggaggaggtggaagacgacgcgattcatactacgacagaggatatgacagggggtacgaccggtatgaggactatgattatagatatagacggtccccctctccttattactcccgatatcggtcccggtctaggagcaggtcatacagcccacgccgatattag

SEQ ID NO: 102562 - DNA, 546 bp, Artificial Sequence
  derived and/or modified sequence
atgtcaaatcgcaggaggcataccggctctcgtgccaatcccgaccccaacacatgtcttggcgtattcgggttgtctctttacaccaccgagagagatctaagggaggttttcagccgctacggccctctctcgggagtgaacgttgtctacgatcagagaactggcagaagtaggggctttgccttcgtgtacttcgaacgcattgatgattcaaaggaagcaatggagcgggctaatggtatggagttagatggccgaagaattagagtagactattctattactaaacgggctcacaccccaacccccggaatttacatggggcgacccacacactccggcggtgggggaggtggaggaggcggtggaggcggtggtgggggaggaagacgaagggactcttactatgaccgtggctatgatagggggtatgaccgttatgaggattacgactaccgctaccggagaagaagcccttctccctactactctcgctacaggagtaggtcgcgttctaggtcttattcccccagacggtattag

SEQ ID NO: 102563 - DNA, 1845 bp, Artificial Sequence
  derived and/or modified sequence
gcccgccccctttacgtcgtgctctgaggaggccaggagatttctggcggcgccggcgccattttgctggagcctgcgaccgagtgggagtggagtggagcggctgtggttgccgactctttcctcttccccacggtccagtcagcgggttaattaggccatcggccctcgagccgagacttgtctcttatttagttctggggagcgcctcgtcgacatgagtgatgtggaggaaaacaacttcgagggcagagagtctcgctctcagtcaaaatctccaacgggaactcctgctcgtgtaaaatcggagagcaggtcaggatctcgtagtccatcaagggtttccaaacactctgaatcccattctcgatcaagatcaaaatccaggtcgaggtcaaggagacattctcatagacgttacactcgatccagatcccactctcactctcataggagacgatctcgaagtagatcatatacaccagaataccggcggcgaaggagccgaagccattctccaatgtctaaccggagaagacatactggcagcagggcaaatccagatcccaacacttgccttggagtgtttggcctcagtttgtacacaacagagagggatcttcgtgaagtattttctcgatatggaccattgagtggtgtcaatgtggtttatgatcagcgaactgggcgatctcgaggatttgcttttgtgtattttgagagaatagatgactcaaaggaggctatggaaagggcaaatggaatggagctggatggtagaagaattcgggtggattattctataaccaagagagcgcacacaccaacaccaggcatctacatgggcagaccaactcatagtggtgggggtggtggaggaggcggcggcggtggaggtggaggtggtggcagacgtcgagattcttactatgatagaggatatgatcgtgggtatgacagatatgaagactatgattaccgatacagaagacgatcaccttctccttattatagtcgatatagatcacgatcaagatctcgttcctacagcccaagacgctattgataacggaatggttgcaattaaggacattttttttcctcttttttttttttttttttttaattctgagatttccccaagctgtggattcttcctactccttaagaaaaaaactttggtttatttagcatctacacttttgtcagttgtgttgctgttttccacccattttattatactcttaaaagatgtaattgttgtcattttgaacagttaaacatcttgagtataaaaagaaccccaatgttatgttatgctttgtaaatttttttttttgcttttacctagataaacttctagctaatcaaataaggaaagaaactgtctttttaaagcttcttttgtgttagatactgtattagagatctgcatttatcatgagttcctttttttttttaactttatttttgggaaagtaacacatgaagtagttcagtcatgtcaggtttgtctggggtggaatggaacagtcaggtagttgaaagtttttttttagagatgaaaagcttgtgaactcctgtaaaacatgctgtatttgaaatacatctgttaaaacttaaaaactaaagtgtgattttttttgttgttgttaagtttattgaagtttattcccttaatcagtgaaggacaacccttatttattacctagagcagttgtataattcgctgttagaaattttggtattgggacagtggataagcaggttatcacatagcatagaattcttaaaagatacatgtggggaaaagtagtctcaaataaaagctaatttctttgaaaa

SEQ ID NO: 102564 - DNA, 1824 bp, Artificial Sequence
  derived and/or modified sequence
atttctggcggcgccggcgccattttgctggagcctgcgaccgagtgggagtggagtggagcggctgtggttgccgactctttcctcttccccacggtccagtcagcgggttaattaggccatcggccctcgagccgagacttgtctcttatttagttctggggagcgcctcgtcgacatgagtgatgtggaggaaaacaacttcgagggcagatgagcggccgcgtctctgttggaaccggcggcgttgcgtctaaaaaggcgaaagccttgaggttgaaggtgggacgagcctaatgaagtggttaatgttcgtgaagaaattgaagagttttttccaagaatgtggaagataaatcaagataaaagaaggctaatgaaaagtattaaagatcagaaaattaaaattgaatgggggaaaaaattgaacagaagattggtcagatagaagcacttgaatatttttttaaggctattttgaattgtttgaattggggaagaatacacgaagtatgaaaaatgaaaaactcaatgaagaatgaagagaagtagaaagcaagagtgaagtagaattaaaagaatctggaagaatgaatgggtcctaggagtctcgctctcagtcaaaatctccaacgggaactcctgctcgtgtaaaatcggagagcaggtcaggatctcgtagtccatcaagggtttccaaacactctgaatcccattctcgatcaagatcaaaatccaggtcgaggtcaaggagacattctcatagacgttacactcgatccagatcccactctcactctcataggagacgatctcgaagtagatcatatacaccagaataccggcggcgaaggagccgaagccattctccaatgtctaaccggagaagacatactggcagcagggcaaatccagatcccaacacttgccttggagtgtttggcctcagtttgtacacaacagagagggatcttcgtgaagtattttctcgatatggaccattgagtggtgtcaatgtggtttatgatcagcgaactgggcgatctcgaggatttgcttttgtgtattttgagagaatagatgactcaaaggaggctatggaaagggcaaatggaatggagctggatggtagaagaattcgggtggattattctataaccaagagagcgcacacaccaacaccaggcatctacatgggcagaccaactcatagtggtgggggtggtggaggaggcggcggcggtggaggtggaggtggtggcagacgtcgagattcttactatgatagaggatatgatcgtgggtatgacagatatgaagactatgattaccgatacagacgatcaccttctccttattatagtcgatatagatcacgatcaagatctcgttcctacagcccaagacgctattgataacggaatggttgcaattaaggacattttttttcctcttttttttttttttttttttaattctgagatttccccaagctgtggattcttcctactccttaagaaaaaaactttggtttatttagcatctacacttttgtcagttgtgttgctgttttccacccattttattatactcttaaaagatgtaattgttgtcattttgaacagttaaacatcttgagtataaaaagaaccccaatgttatgttatgctttgtaaatttttttttttgcttttacctagataaacttctagctaatcaaataaggaaagaaactgtctttttaaagcttcttttgtgttagatactgtattagagatctgcatttatcatgagttcctttttttttttaactttatttttggg

SEQ ID NO: 102565 - DNA, 1402 bp, Artificial Sequence
  derived and/or modified sequence
gctggagcctgcgaccgagtgggagtggagtggagcggctgtggttgccgactctttcctcttccccacggtccagtcagcgggttaattaggccatcggccctcgagccgagacttgtctcttatttagttctggggagcgcctcgtcgacatgagtgatgtggaggaaaacaacttcgagggcagagttaatgttcgtgaagaaattgaagagttttttccaagaatgtggaagataaatcaagataaaagaaggctaatgaaaagtattaaagatcagaaaattaaaattgaatgggggaaaaaattgaacagaagattggtcagatagaagcacttgaatatttttttaaggctattttgaattgtttgaattggggaagaatacacgaagtatgaaaaatgaaaaactcaatgaagaatgaagagaagtagaaagcaagagtgaagtagaattaaaagaatctggaagaatgaatgggtcctaggagtctcgctctcagtcaaaatctccaacgggaactcctgctcgtgtaaaatcggagagcaggtcaggatctcgtagtccatcaagggtttccaaacactctgaatcccattctcgatcaagatcaaaatccaggtcgaggtcaaggagacattctcatagacgttacactcgatccagatcccactctcactctcataggagacgatctcgaagtagatcatatacaccagaataccggcggcgaaggagccgaagccattctccaatgtctaaccggagaagacatactggcagcagggcaaatccagatcccaacacttgccttggagtgtttggcctcagtttgtacacaacagagagggatcttcgtgaagtattttctcgatatggaccattgagtggtgtcaatgtggtttatgatcagcgaactgggcgatctcgaggatttgcttttgtgtattttgagagaatagatgactcaaaggaggctatggaaagggcaaatggaatggagctggatggtagaagaattcgggtggattattctataaccaagagagcgcacacaccaacaccaggcatctacatgggcagaccaactcatagtggtgggggtggtggaggaggcggcggcggtggaggtggaggtggtggcagacgtcgagattcttactatgatagaggatatgatcgtgggtatgacagatatgaagactatgattaccgatacagaagacgatcaccttctccttattatagtcgatatagatcacgatcaagatctcgttcctacagcccaagacgctattgataacggaatggttgcaattaaggacattttttttcctcttttttttttttttttttttaattctgagatttccccaagctgtggattcttcctactcctt

SEQ ID NO: 102566 - DNA, 849 bp, Artificial Sequence
  derived and/or modified sequence
atgagcgacgtggaggagaacaacttcgagggcagagagagcagaagccagagcaagagccccaccggcacccccgccagagtgaagagcgagagcagaagcggcagcagaagccccagcagagtgagcaagcacagcgagagccacagcagaagcagaagcaagagcagaagcagaagcagaagacacagccacagaagatacaccagaagcagaagccacagccacagccacagaagaagaagcagaagcagaagctacacccccgagtacagaagaagaagaagcagaagccacagccccatgagcaacagaagaagacacaccggcagcagagccaaccccgaccccaacacctgcctgggcgtgttcggcctgagcctgtacaccaccgagagagacctgagagaggtgttcagcagatacggccccctgagcggcgtgaacgtggtgtacgaccagagaaccggcagaagcagaggcttcgccttcgtgtacttcgagagaatcgacgacagcaaggaggccatggagagagccaacggcatggagctggacggcagaagaatcagagtggactacagcatcaccaagagagcccacacccccacccccggcatctacatgggcagacccacccacagcggcggcggcggcggcggcggcggcggcggcggcggcggcggcggcggcagaagaagagacagctactacgacagaggctacgacagaggctacgacagatacgaggactacgactacagatacagaagaagaagccccagcccctactacagcagatacagaagcagaagcagaagcagaagctacagccccagaagatactag

SEQ ID NO: 102567 - DNA, 543 bp, Artificial Sequence
  derived and/or modified sequence
atgagcaacagaagaagacacaccggcagcagagccaaccccgaccccaacacctgcctgggcgtgttcggcctgagcctgtacaccaccgagagagacctgagagaggtgttcagcagatacggccccctgagcggcgtgaacgtggtgtacgaccagagaaccggcagaagcagaggcttcgccttcgtgtacttcgagagaatcgacgacagcaaggaggccatggagagagccaacggcatggagctggacggcagaagaatcagagtggactacagcatcaccaagagagcccacacccccacccccggcatctacatgggcagacccacccacagcggcggcggcggcggcggcggcggcggcggcggcggcggcggcggcggcagaagaagagacagctactacgacagaggctacgacagaggctacgacagatacgaggactacgactacagatacagaagaagccccagcccctactacagcagatacagaagcagaagcagaagcagaagctacagccccagaagatactag

SEQ ID NO: 102568 - DNA, 546 bp, Artificial Sequence
  derived and/or modified sequence
atgagcaacagaagaagacacaccggcagcagagccaaccccgaccccaacacctgcctgggcgtgttcggcctgagcctgtacaccaccgagagagacctgagagaggtgttcagcagatacggccccctgagcggcgtgaacgtggtgtacgaccagagaaccggcagaagcagaggcttcgccttcgtgtacttcgagagaatcgacgacagcaaggaggccatggagagagccaacggcatggagctggacggcagaagaatcagagtggactacagcatcaccaagagagcccacacccccacccccggcatctacatgggcagacccacccacagcggcggcggcggcggcggcggcggcggcggcggcggcggcggcggcggcagaagaagagacagctactacgacagaggctacgacagaggctacgacagatacgaggactacgactacagatacagaagaagaagccccagcccctactacagcagatacagaagcagaagcagaagcagaagctacagccccagaagatactag

SEQ ID NO: 102569 - DNA, 1233 bp, Artificial Sequence
  derived and/or modified sequence
atggccgtgccatgtccttacccgaccccttttggcatcgtgccacacgccggcatgaatggcgagctcacaagtcccggggccgcctacgccggcttacataatattagcccccagatgagtgcggctgccgccgcagccgccgctgctgcagcatacgggcgctcgccagtggtagggttcgatccgcaccatcatatgcgggtcccagccatccctcccaatcttacaggtatacctgggggcaaacccgcctactctttccacgtctccgcagacggtcagatgcaaccagtccccttcccccctgatgctctgattggacccggcatccccaggcatgcaagacagatcaacacactaaaccacggtgaagtggtttgtgccgtgaccatctcaaaccctacaaggcacgtctatacaggtgggaaggggtgtgtgaaagtgtgggatatcagccatcctgggaacaagagcccagtgagccagctggattgtttaaaccgagataattacatccgatcatgtcgactgctgccggacggtaggacattaattgtgggcggcgaagcaagcaccctttccatttgggatttggccgctcccaccccccgcattaaggccgagctcacctcaagtgcgcctgcctgctacgcactggcgatatctcccgacagtaaagtgtgcttcagctgctgcagtgacggaaacatcgctgtttgggatttgcataatcaaaccctggtgcgccaattccaaggacatactgatggggccagttgcattgatatcagcaatgatggcactaagctttggacagggggactggacaacaccgtgcgtagctgggacctcagagaaggtcgccagctacaacagcatgacttcacttctcagattttcagcttgggatactgtccgaccggcgaatggctggcagtggggatggagaattccaacgtggaagtgcttcatgtgactaaacctgataagtatcagctgcaccttcacgagtcctgtgtcttaagtctgaaatttgcccattgcggaaagtggtttgtgagcaccggcaaggacaatctgctcaatgcatggcggaccccttacggagcgtctatcttccagagcaaggaatccagctccgtcctgtcttgcgacatttccgtggacgacaagtacatagtgaccgggtcgggagataagaaagcgacagtctacgaggtgatttattag

SEQ ID NO: 102570 - DNA, 1233 bp, Artificial Sequence
  derived and/or modified sequence
atggctgtgccctgcccctaccccaccccatttggaattgtgccccatgctggcatgaatggagagctgaccagccctggggccgcctatgccggcctgcacaacatcagcccccagatgtctgctgctgctgctgctgctgctgctgctgctgcctacggccgcagccctgtggtgggctttgacccccaccaccacatgagggtgcctgccatcccccccaacctgaccggcatccctgggggcaagccagcctacagcttccacgtgtctgcagatggccagatgcagcctgtgcccttccccccagatgccctgattggccctggcatccccaggcatgcccggcagatcaacaccctgaaccacggggaggtggtgtgtgctgtgaccatcagcaaccccaccaggcatgtgtacacaggaggcaagggctgtgtgaaggtgtgggacatcagccaccctggcaacaagagccctgtgtcccagctggactgcctgaacagagacaactacatccgcagctgccgcctgctgcctgatggccgcaccctcatcgtgggcggggaggccagcaccctgagcatctgggacctggccgcccccaccccccgcatcaaggccgagctgaccagcagcgccccagcctgctacgccctggccatcagcccagacagcaaggtgtgcttcagctgctgcagtgatggcaacattgctgtgtgggacctgcacaaccagaccctggtgcggcagttccagggccacacagatggagccagctgcatcgacatcagcaatgatggcaccaagctgtggacaggaggcctggacaacacagtgcgctcctgggacctgcgggagggccggcagctgcagcagcacgacttcaccagccagatcttcagcctgggctactgccccaccggggagtggctggccgtgggcatggagaacagcaatgtggaggtgctgcacgtgaccaagccagacaagtaccagctgcacctgcacgagagctgtgtgctgagcctgaagtttgcccactgcggcaagtggtttgtgtccacaggcaaggacaacctgctgaatgcctggaggaccccctatggagccagcatcttccagagcaaggagagcagctctgtgctgagctgtgacatctctgtggatgacaagtacatcgtgacaggcagcggggacaagaaggccaccgtgtatgaggtgatctactag

SEQ ID NO: 102571 - DNA, 1233 bp, Artificial Sequence
  derived and/or modified sequence
atggccgtgccctgcccctaccccacccccttcggcatcgtgccccacgcaggtatgaatggtgagcttacttcacctggggctgcatatgcagggctgcacaatatctccccccagatgtctgcggcagcagctgcggctgccgccgcagcggcttacggcagatctcctgtggtgggctttgatccccatcaccatatgcgggttcctgcaatccccccaaatttgactgggatcccgggcggtaaacctgcttattccttccacgtttctgccgatggccaaatgcagccagtaccctttccaccagatgctctaataggacccggcattccccgccacgcaaggcagatcaatacactgaaccacggcgaggtggtgtgcgctgtaacaatctccaatccaacccgacacgtttacaccggcggaaagggctgcgtaaaagtttgggacatttcacatcctggtaacaagtcacctgtctctcaattggattgcctcaaccgggataattacatccggagctgtagactgttaccagacggaagaacactgatcgtcgggggagaagccagcactctttcaatttgggaccttgcagctcccacaccccgcataaaggctgagctgacttcctccgcccccgcctgttatgcattggccatatcgcccgacagtaaagtctgcttttcctgctgttccgacggcaacattgccgtgtgggacctgcacaatcagacactggtgaggcaattccaagggcataccgatggggcttcttgtatcgacattagcaacgatggtaccaaactgtggaccgggggactcgataacacagtcagaagctgggacctgcgcgagggcaggcagttgcagcagcacgattttacaagccaaattttttcgctcggatactgtcccacgggcgaatggctagccgtcggtatggagaacagtaatgtagaggtgttgcacgtgaccaaacccgataaataccaacttcatctgcacgagagctgtgtcctgtccctcaagttcgcgcattgcggtaaatggttcgtgtctacaggtaaagacaatctgctgaacgcatggcgcacaccctacggcgcatctatttttcagtctaaggagagttcatcagtgctatcgtgcgacatcagtgtggatgacaagtacatcgtgactggctctggggataagaaggcaaccgtgtatgaggttatttattag

SEQ ID NO: 102572 - DNA, 1233 bp, Artificial Sequence
  derived and/or modified sequence
atggccgttccttgtccctacccaaccccgtttggaattgtgccccatgcgggaatgaacggcgaactcacaagtcccggagccgcttacgcgggactgcacaatatttcaccgcaaatgtccgccgctgccgcagctgcagctgctgcagccgcatatggaaggtctccggtggtggggtttgatccacaccatcacatgcgggtcccggcaatccccccaaaccttacggggattcccggtggaaagcccgcatatagctttcatgtgtctgcagacgggcagatgcagcctgtccccttccccccagacgcacttatcggtccaggaattcccagacacgccagacagattaatactctaaaccacggagaggtcgtgtgcgccgttaccatcagcaacccgacccgacacgtctacactggtgggaaagggtgcgtgaaagtctgggacatctcccaccccggaaacaagtcacccgtgtcacaactggactgtctgaatcgcgataattatataaggagttgccgcctgctccctgatggcagaactctgatcgtcggcggagaggctagcacactgagcatctgggatttggcagcgcctaccccccgaatcaaggccgaactgacttcgtctgcaccagcatgttacgcactggctatttcacctgacagcaaggtctgcttctcctgttgttccgacggtaacatcgccgtttgggacctccataaccaaaccctggtgcgccaatttcagggacataccgatggggcatcctgcatcgacatcagcaacgacggcaccaagctctggactgggggactggataacacagtaagaagctgggatctacgagaagggaggcagctgcagcaacatgattttactagtcagatcttctcactgggttattgcccaacgggagagtggttggctgtgggtatggagaattccaacgtcgaggtattacatgtaacaaagcccgacaagtaccaacttcacctccacgagtcttgtgtcctctccctgaagttcgcccattgcggaaagtggttcgtctctaccgggaaagataacttgctcaatgcctggcggaccccctacggagcctccatttttcagagcaaggagagcagctcagtgctgtcatgcgacatttccgtcgacgacaagtatatcgtgaccggcagcggtgataaaaaagctacagtctatgaagttatatactag

SEQ ID NO: 102573 - DNA, 1233 bp, Artificial Sequence
  derived and/or modified sequence
atggccgtgccctgcccctaccccacccccttcggcatcgtgccccacgccggcatgaacggcgagctgaccagccccggcgccgcctacgccggcctgcacaacatcagcccccagatgagcgccgccgccgccgccgccgccgccgccgccgcctacggcagaagccccgtggtgggcttcgacccccaccaccacatgagagtgcccgccatcccccccaacctgaccggcatccccggcggcaagcccgcctacagcttccacgtgagcgccgacggccagatgcagcccgtgcccttcccccccgacgccctgatcggccccggcatccccagacacgccagacagatcaacaccctgaaccacggcgaggtggtgtgcgccgtgaccatcagcaaccccaccagacacgtgtacaccggcggcaagggctgcgtgaaggtgtgggacatcagccaccccggcaacaagagccccgtgagccagctggactgcctgaacagagacaactacatcagaagctgcagactgctgcccgacggcagaaccctgatcgtgggcggcgaggccagcaccctgagcatctgggacctggccgcccccacccccagaatcaaggccgagctgaccagcagcgcccccgcctgctacgccctggccatcagccccgacagcaaggtgtgcttcagctgctgcagcgacggcaacatcgccgtgtgggacctgcacaaccagaccctggtgagacagttccagggccacaccgacggcgccagctgcatcgacatcagcaacgacggcaccaagctgtggaccggcggcctggacaacaccgtgagaagctgggacctgagagagggcagacagctgcagcagcacgacttcaccagccagatcttcagcctgggctactgccccaccggcgagtggctggccgtgggcatggagaacagcaacgtggaggtgctgcacgtgaccaagcccgacaagtaccagctgcacctgcacgagagctgcgtgctgagcctgaagttcgcccactgcggcaagtggttcgtgagcaccggcaaggacaacctgctgaacgcctggagaaccccctacggcgccagcatcttccagagcaaggagagcagcagcgtgctgagctgcgacatcagcgtggacgacaagtacatcgtgaccggcagcggcgacaagaaggccaccgtgtacgaggtgatctactag

SEQ ID NO: 102574 - protein, 367 aa, Artificial Sequence
  derived and/or modified sequence
MAAEEEDEVEWVVESIAGFLRGPDWSIPILDFVEQKCEVNCKGGHVITPGSPEPVILVACVPLVFDDEEESKLTYTEIHQEYKELVEKLLEGYLKEIGINEDQFQEACTSPLAKTHTSQAILQPVLAAEDFTIFKAMMVQKNIEMQLQAIRIIQERNGVLPDCLTDGSDVVSDLEHEEMKILREVLRKSKEEYDQEEERKRKKQLSEAKTEEPTVHSSEAAIMNNSQGDGEHFAHPPSEVKMHFANQSIEPLGRKVERSETSSLPQKDLKIPGLEHASIEGPIANLSVLGTEELRQREHYLKQKRDKLMSMRKDMRTKQIQNMEQKGKPTGEVEEMTEKPEMTAEEKQTLLKRRLLAEKLKEEVINK

SEQ ID NO: 102575 - DNA, 1104 bp, Artificial Sequence
  derived and/or modified sequence
atggccgccgaggaggaggacgaggtggagtgggtggtggagagcatcgccggcttcctgagaggccccgactggagcatccccatcctggacttcgtggagcagaagtgcgaggtgaactgcaagggcggccacgtgatcacccccggcagccccgagcccgtgatcctggtggcctgcgtgcccctggtgttcgacgacgaggaggagagcaagctgacctacaccgagatccaccaggagtacaaggagctggtggagaagctgctggagggctacctgaaggagatcggcatcaacgaggaccagttccaggaggcctgcaccagccccctggccaagacccacaccagccaggccatcctgcagcccgtgctggccgccgaggacttcaccatcttcaaggccatgatggtgcagaagaacatcgagatgcagctgcaggccatcagaatcatccaggagagaaacggcgtgctgcccgactgcctgaccgacggcagcgacgtggtgagcgacctggagcacgaggagatgaagatcctgagagaggtgctgagaaagagcaaggaggagtacgaccaggaggaggagagaaagagaaagaagcagctgagcgaggccaagaccgaggagcccaccgtgcacagcagcgaggccgccatcatgaacaacagccagggcgacggcgagcacttcgcccacccccccagcgaggtgaagatgcacttcgccaaccagagcatcgagcccctgggcagaaaggtggagagaagcgagaccagcagcctgccccagaaggacctgaagatccccggcctggagcacgccagcatcgagggccccatcgccaacctgagcgtgctgggcaccgaggagctgagacagagagagcactacctgaagcagaagagagacaagctgatgagcatgagaaaggacatgagaaccaagcagatccagaacatggagcagaagggcaagcccaccggcgaggtggaggagatgaccgagaagcccgagatgaccgccgaggagaagcagaccctgctgaagagaagactgctggccgagaagctgaaggaggaggtgatcaacaagtag

SEQ ID NO: 102576 - DNA, 1373 bp, Artificial Sequence
  derived and/or modified sequence
gggccgcggtctagggcggctacgtgtgttgccatagcgaccattttgcattaactggttggtagcttctatcctgggggctgagcgactgcgggccagctcttcccctactccctctcggctccttgtggcccaaaggcctaaccggggtccggcggtctggcctagggatcttccccgttgcccctttggggcgggatggctgcggaagaagaagacgaggtggagtgggtagtggagagcatcgcggggttcctgcgaggcccagactggtccatccccatcttggactttgtggaacagaaatgtgaagttaactgcaaaggagggcatgtgataactccaggaagcccagagccggtgattttggtggcctgtgttccccttgtttttgatgatgaagaagaaagcaaattgacctatacagagattcatcaggaatacaaagaactagttgaaaagctgttagaaggttacctcaaagaaattggaattaatgaagatcaatttcaagaagcatgcacttctcctcttgcaaagacccatacatcacaggccattttgcaacctgtgttggcagcagaagattttactatctttaaagcaatgatggtccagaaaaacattgaaatgcagctgcaagccattcgaataattcaagagagaaatggtgtattacctgactgcttaaccgatggctctgatgtggtcagtgaccttgaacacgaagagatgaaaatcctgagggaagttcttagaaaatcaaaagaggaatatgaccaggaagaagaaaggaagaggaaaaaacagttatcagaggctaaaacagaagagcccacagtgcattccagtgaagctgcaataatgaataattcccaaggggatggtgaacattttgcacacccaccctcagaagttaaaatgcattttgctaatcagtcaatagaacctttgggaagaaaagtggaaaggtctgaaacttcctccctcccacaaaaagacctgaagattcctggcttagagcatgcgagcattgaaggaccaatagcaaacttatcagtacttggaacagaagaacttcggcaacgagaacactatctcaagcagaagagagataagttgatgtccatgagaaaggatatgaggactaaacagatacaaaatatggagcagaaaggaaaacccactggggaggtagaggaaatgacagagaaaccagaaatgacagcagaggagaagcaaacattactaaagaggagattgcttgcagagaaactcaaagaagaagttattaataagtaataattaagaacaatttaacaaaatggaagttcaaattgtcttaaaaataaattatttagtccttacactga

SEQ ID NO: 102577 - DNA, 1104 bp, Artificial Sequence
  derived and/or modified sequence
atggcagccgaggaggaagacgaggtggagtgggtcgtggagagtatcgccggatttctgaggggtcctgactggagcattcccatcctcgacttcgttgaacagaaatgtgaagtgaactgtaagggcggccacgtgattacccctggctccccagagccggtaattttggtggcatgtgtgccactagtattcgacgatgaagaagaaagcaagctcacctataccgagattcaccaggaatataaggagctcgtggagaagcttcttgaggggtacttgaaagagatcggcataaacgaagaccagtttcaggaagcctgcacgagccctctggctaagacacatacatcccaggccatacttcagccggtgctggccgcagaggattttacgatcttcaaggctatgatggtgcagaagaacattgagatgcagctccaggcaattcggatcatacaagagcgtaatggggttctgcccgactgtcttaccgatggttcagatgtcgtgagtgatcttgagcacgaggagatgaagatactgcgcgaggtccttaggaagagtaaggaagagtacgatcaggaggaagagaggaagcggaaaaaacaactgagcgaggctaagaccgaggaacccacagtgcattcctcagaagctgctatcatgaacaattcgcaaggcgatggtgagcacttcgcacaccccccgtccgaagtaaagatgcacttcgccaaccagtcgatcgagcctctgggccgtaaagtggaacggtccgagacctcttctctaccacaaaaggatttgaaaattccggggttagagcacgcttctatcgaggggccgatcgcgaatctgagtgttctgggcactgaggaactgcgtcagcgggaacactatttgaaacagaagagggacaaactgatgagcatgaggaaggacatgagaacaaaacagatccaaaacatggagcagaaaggcaaacctaccggggaggtggaggagatgactgagaagcccgaaatgacggctgaagaaaagcaaacactcctgaagcggaggctgctggcggagaagcttaaggaggaggttatcaacaaatag

SEQ ID NO: 102578 - DNA, 1104 bp, Artificial Sequence
  derived and/or modified sequence
atggctgctgaggaggaggatgaggtggagtgggtggtggagagcattgctggcttcctgcggggccctgactggagcatccccatcctggactttgtggagcagaagtgtgaggtgaactgcaagggcggccacgtgatcaccccaggcagccctgagcccgtcatcctggtggcctgtgtgcccctggtgtttgatgatgaggaggagagcaagctgacctacacagagatccaccaggagtacaaggagctggtggagaagctgctggagggctacctgaaggagatcggcatcaatgaagaccagttccaggaggcctgcaccagccccctggccaagacccacaccagccaggccatcctgcagcctgtgctggccgctgaggacttcaccatcttcaaggccatgatggtgcagaagaacatcgagatgcagctgcaggccatccgcatcatccaggagagaaatggagtgctgcctgactgcctgacagatggcagtgatgtggtgtctgacctggagcacgaggagatgaagatcctgcgggaggtgctgaggaagagcaaggaggagtatgaccaggaggaggagaggaagaggaagaagcagctgtctgaggccaagacagaggagcccaccgtgcacagcagcgaggccgccatcatgaacaacagccagggagatggagagcactttgcccacccccccagcgaggtgaagatgcactttgccaaccagagcattgagcccctgggcaggaaggtggagaggtctgagaccagcagcctgccccagaaggacctgaagatccctggcctggagcacgccagcattgagggccccatcgccaacctgtctgtgctgggcacagaggagctgcggcagcgggagcactacctgaagcagaagagggacaagctgatgtccatgaggaaggacatgaggaccaagcagatccagaacatggagcagaagggcaagcccaccggggaggtggaggagatgacagagaagccagagatgacagctgaggagaagcagaccctgctgaagaggcggctgctggccgagaagctgaaggaggaggtgatcaacaagtag

SEQ ID NO: 102579 - DNA, 1104 bp, Artificial Sequence
  derived and/or modified sequence
atggccgccgaggaggaggacgaggtggagtgggtggtggagagcattgctgggtttctgcgaggccctgactggtcgatacccattttggacttcgttgaacagaagtgcgaggtgaattgcaagggcggccatgtcatcactccagggagtccagagccagttatcctcgtggcatgtgtaccattagtctttgacgacgaagaggagagtaagctaacatatacggagattcatcaagagtataaagagctggtggaaaaactgctggaggggtacctgaaagagatcggcatcaatgaagatcagttccaggaggcgtgtacctcgcccctggccaagacacacaccagccaagctatcttgcaacctgtcctcgccgctgaggactttaccatcttcaaagcaatgatggttcagaaaaacattgagatgcaactccaggccatccgaataatccaggagcgcaatggagtgttgccggattgtctgacggacgggtctgatgtcgtgtccgatctggagcacgaagagatgaagatcctcagggaggtgttgcgaaagtcaaaagaggaatatgaccaggaggaagagagaaagaggaaaaaacagctatccgaggctaagacagaagaacccaccgtacatagctctgaggcagccatcatgaacaactcccagggagacggtgagcactttgctcatcctccctctgaagtcaaaatgcattttgccaatcagagtatcgaacccttagggcgcaaggtcgagcgcagcgaaacttccagcctaccccagaaggacttgaaaatccccggtcttgagcacgccagcatcgaaggtcccatcgctaacttgagcgtcctggggaccgaagagctgaggcagagagagcattacctgaaacagaaacgggataaactaatgtcaatgagaaaggacatgcggacaaaacagatccagaacatggagcaaaagggaaaaccaaccggtgaagtggaggaaatgaccgagaagccagagatgaccgcggaggagaagcaaacattgttgaaaagaaggttactggcggagaagctaaaagaggaggttattaataagtag

SEQ ID NO: 102580 - DNA, 1104 bp, Artificial Sequence
  derived and/or modified sequence
atggccgcagaagaagaggacgaagtagaatgggtcgtggagtccatcgccggattcttgcgcggacctgactggtcgattcccattctcgactttgtggaacaaaaatgcgaggtgaactgcaaggggggtcatgtgataacacccggtagccccgaacccgtgattttggttgcatgtgtccccctggttttcgacgacgaggaggaatccaaattaacctacacagagatccaccaggaatataaagagctggtcgaaaagctgcttgagggctacctgaaggaaatcggaataaatgaggaccagtttcaagaggcttgcacaagtccactggccaaaacacataccagccaggcaattctacagcctgttctggcggcagaagattttacaatattcaaagctatgatggtgcaaaagaatatagagatgcagttgcaggccatccggattatccaggaacgcaatggagtgctgcctgattgcctcacagatggaagtgacgtcgtctccgacctcgagcatgaagaaatgaagatactgagagaggtgttgcgtaaaagcaaggaagagtacgaccaagaagaggagcgcaagcggaaaaagcagctctcggaggccaaaaccgaagagccaaccgtgcacagcagtgaagctgccataatgaacaactcccagggagacggggagcattttgcacatccaccctcagaggtaaaaatgcatttcgccaatcagagcatcgagcccctaggccgaaaagttgaacgaagtgagactagctcattgccccagaaagacctaaagatccccggattagagcacgcctccatcgagggccctatagccaatctcagcgtgttaggaacagaggagctaagacagcgcgagcactatttgaaacagaagcgggacaaactgatgtccatgaggaaggacatgagaaccaaacagatacagaacatggagcaaaagggaaagcccactggtgaggtggaggaaatgacagaaaagcctgagatgactgcggaagaaaagcaaacactgctcaaacgacggctcctggccgaaaagttgaaagaggaggtgattaacaagtag

SEQ ID NO: 102581 - protein, 1374 aa, Artificial Sequence
  derived and/or modified sequence
MEENESQKCEPCLPYSADRRQMQEQGKGNLHVTSPEDAECRRTKERLSNGNSRGSVSKSSRNIPRRHTLGGPRSSKEILGMQTSEMDRKREAFLEHLKQKYPHHASAIMGHQERLRDQTRSPKLSHSPQPPSLGDPVEHLSETSADSLEAMSEGDAPTPFSRGSRTRASLPVVRSTNQTKERSLGVLYLQYGDETKQLRMPNEITSADTIRALFVSAFPQQLTMKMLESPSVAIYIKDESRNVYYELNDVRNIQDRSLLKVYNKDPAHAFNHTPKTMNGDMRMQRELVYARGDGPGAPRPGSTAHPPHAIPNSPPSTPVPHSMPPSPSRIPYGGTRSMVVPGNATIPRDRISSLPVSRPISPSPSAILERRDVKPDEDMSGKNIAMYRNEGFYADPYLYHEGRMSIASSHGGHPLDVPDHIIAYHRTAIRSASAYCNPSMQAEMHMEQSLYRQKSRKYPDSHLPTLGSKTPPASPHRVSDLRMIDMHAHYNAHGPPHTMQPDRASPSRQAFKKEPGTLVYIEKPRSAAGLSSLVDLGPPLMEKQVFAYSTATIPKDRETSEKMMKTTANRNHTDSAGTPHVSGGKMLSALESTVPPSQPPPVGTSAIHMSLLEMRRSVAELRLQLQQMRQLQLQNQELLRAMMKKAELEISGKVMETMKRLEDPVQRQRVLVEQERQKYLHEEEKIVKKLCELEDFVEDLKKDSTAASRLVTLKDVEDGAFLLRQVGEAVATLKGEFPTLQNKMRAILRIEVEAVRFLKEEPHKLDSLLKRVRSMTDVLTMLRRHVTDGLLKGTDAAQAAQYMAMEKATAAEVLKSQEEAAHTSGQPFHSTGAPGDAKSEVVPLSGMMVRHAQSSPVVIQPSQHSVALLNPAQNLPHVASSPAVPQEATSTLQMSQAPQSPQIPMNGSAMQSLFIEEIHSVSAKNRAVSIEKAEKKWEEKRQNLDHYNGKEFEKLLEEAQANIMKSIPNLEMPPATGPLPRGDAPVDKVELSDSPNSEQDLEKLGGKSPPPPPPPPRRSYLPGSGLTTTRSGDVVYTGRKENITAKASSEDAGPSPQTRATKYPAEEPASAWTPSPPPVTTSSSKDEEEEEEEGDKIMAELQAFQKCSFMDVNSNSHAEPSRADSHVKDTRSGATVPPKEKKNLEFFHEDVRKSDVEYENGPQMEFQKGSSGAPQTSRMPVPMSAKNRPGTLDKPGKQSKLQDPRQYRQANGSAKKSGGDFKPTSPSLPASKIPALSPSSGKSSSLPSSSGDSSNLPNPPATKPSIASNPLSPQTGPPAHSASLIPSVSNGSLKFQSLTHTGKGHHLSFSPQSQNGRAPPPLSFSSSPPSPASSVSLNQGAKGTRTIHTPSLTSYKAQNGSSSKATPSTAKETS

SEQ ID NO: 102582 - DNA, 4125 bp, Artificial Sequence
  derived and/or modified sequence
atggaggagaacgagagccagaagtgcgagccctgcctgccctacagcgccgacagaagacagatgcaggagcagggcaagggcaacctgcacgtgaccagccccgaggacgccgagtgcagaagaaccaaggagagactgagcaacggcaacagcagaggcagcgtgagcaagagcagcagaaacatccccagaagacacaccctgggcggccccagaagcagcaaggagatcctgggcatgcagaccagcgagatggacagaaagagagaggccttcctggagcacctgaagcagaagtacccccaccacgccagcgccatcatgggccaccaggagagactgagagaccagaccagaagccccaagctgagccacagcccccagccccccagcctgggcgaccccgtggagcacctgagcgagaccagcgccgacagcctggaggccatgagcgagggcgacgcccccacccccttcagcagaggcagcagaaccagagccagcctgcccgtggtgagaagcaccaaccagaccaaggagagaagcctgggcgtgctgtacctgcagtacggcgacgagaccaagcagctgagaatgcccaacgagatcaccagcgccgacaccatcagagccctgttcgtgagcgccttcccccagcagctgaccatgaagatgctggagagccccagcgtggccatctacatcaaggacgagagcagaaacgtgtactacgagctgaacgacgtgagaaacatccaggacagaagcctgctgaaggtgtacaacaaggaccccgcccacgccttcaaccacacccccaagaccatgaacggcgacatgagaatgcagagagagctggtgtacgccagaggcgacggccccggcgcccccagacccggcagcaccgcccaccccccccacgccatccccaacagcccccccagcacccccgtgccccacagcatgccccccagccccagcagaatcccctacggcggcaccagaagcatggtggtgcccggcaacgccaccatccccagagacagaatcagcagcctgcccgtgagcagacccatcagccccagccccagcgccatcctggagagaagagacgtgaagcccgacgaggacatgagcggcaagaacatcgccatgtacagaaacgagggcttctacgccgacccctacctgtaccacgagggcagaatgagcatcgccagcagccacggcggccaccccctggacgtgcccgaccacatcatcgcctaccacagaaccgccatcagaagcgccagcgcctactgcaaccccagcatgcaggccgagatgcacatggagcagagcctgtacagacagaagagcagaaagtaccccgacagccacctgcccaccctgggcagcaagaccccccccgccagcccccacagagtgagcgacctgagaatgatcgacatgcacgcccactacaacgcccacggccccccccacaccatgcagcccgacagagccagccccagcagacaggccttcaagaaggagcccggcaccctggtgtacatcgagaagcccagaagcgccgccggcctgagcagcctggtggacctgggcccccccctgatggagaagcaggtgttcgcctacagcaccgccaccatccccaaggacagagagaccagcgagaagatgatgaagaccaccgccaacagaaaccacaccgacagcgccggcaccccccacgtgagcggcggcaagatgctgagcgccctggagagcaccgtgccccccagccagcccccccccgtgggcaccagcgccatccacatgagcctgctggagatgagaagaagcgtggccgagctgagactgcagctgcagcagatgagacagctgcagctgcagaaccaggagctgctgagagccatgatgaagaaggccgagctggagatcagcggcaaggtgatggagaccatgaagagactggaggaccccgtgcagagacagagagtgctggtggagcaggagagacagaagtacctgcacgaggaggagaagatcgtgaagaagctgtgcgagctggaggacttcgtggaggacctgaagaaggacagcaccgccgccagcagactggtgaccctgaaggacgtggaggacggcgccttcctgctgagacaggtgggcgaggccgtggccaccctgaagggcgagttccccaccctgcagaacaagatgagagccatcctgagaatcgaggtggaggccgtgagattcctgaaggaggagccccacaagctggacagcctgctgaagagagtgagaagcatgaccgacgtgctgaccatgctgagaagacacgtgaccgacggcctgctgaagggcaccgacgccgcccaggccgcccagtacatggccatggagaaggccaccgccgccgaggtgctgaagagccaggaggaggccgcccacaccagcggccagcccttccacagcaccggcgcccccggcgacgccaagagcgaggtggtgcccctgagcggcatgatggtgagacacgcccagagcagccccgtggtgatccagcccagccagcacagcgtggccctgctgaaccccgcccagaacctgccccacgtggccagcagccccgccgtgccccaggaggccaccagcaccctgcagatgagccaggccccccagagcccccagatccccatgaacggcagcgccatgcagagcctgttcatcgaggagatccacagcgtgagcgccaagaacagagccgtgagcatcgagaaggccgagaagaagtgggaggagaagagacagaacctggaccactacaacggcaaggagttcgagaagctgctggaggaggcccaggccaacatcatgaagagcatccccaacctggagatgccccccgccaccggccccctgcccagaggcgacgcccccgtggacaaggtggagctgagcgacagccccaacagcgagcaggacctggagaagctgggcggcaagagcccccccccccccccccccccccccagaagaagctacctgcccggcagcggcctgaccaccaccagaagcggcgacgtggtgtacaccggcagaaaggagaacatcaccgccaaggccagcagcgaggacgccggccccagcccccagaccagagccaccaagtaccccgccgaggagcccgccagcgcctggacccccagccccccccccgtgaccaccagcagcagcaaggacgaggaggaggaggaggaggagggcgacaagatcatggccgagctgcaggccttccagaagtgcagcttcatggacgtgaacagcaacagccacgccgagcccagcagagccgacagccacgtgaaggacaccagaagcggcgccaccgtgccccccaaggagaagaagaacctggagttcttccacgaggacgtgagaaagagcgacgtggagtacgagaacggcccccagatggagttccagaagggcagcagcggcgccccccagaccagcagaatgcccgtgcccatgagcgccaagaacagacccggcaccctggacaagcccggcaagcagagcaagctgcaggaccccagacagtacagacaggccaacggcagcgccaagaagagcggcggcgacttcaagcccaccagccccagcctgcccgccagcaagatccccgccctgagccccagcagcggcaagagcagcagcctgcccagcagcagcggcgacagcagcaacctgcccaacccccccgccaccaagcccagcatcgccagcaaccccctgagcccccagaccggcccccccgcccacagcgccagcctgatccccagcgtgagcaacggcagcctgaagttccagagcctgacccacaccggcaagggccaccacctgagcttcagcccccagagccagaacggcagagcccccccccccctgagcttcagcagcagcccccccagccccgccagcagcgtgagcctgaaccagggcgccaagggcaccagaaccatccacacccccagcctgaccagctacaaggcccagaacggcagcagcagcaaggccacccccagcaccgccaaggagaccagctag

SEQ ID NO: 102583 - DNA, 1836 bp, Artificial Sequence
  derived and/or modified sequence
atgccccacctggacatgaagacccacgtgtgccccagcgtggagggccccaagaagaagggcggcatcacctgcttctgctgcggcggccccttcagagccgccgacagaagcaagaccagaagccccaagctgagccacagcccccagccccccagcctgggcgaccccgtggagcacctgagcgagaccagcgccgacagcctggaggccatgagcgagggcgacgcccccacccccttcagcagaggcagcagaaccagagccagcctgcccgtggtgagaagcaccaaccagaccaaggagagaagcctgggcgtgctgtacctgcagtacggcgacgagaccaagcagctgagaatgcccaacgagatcaccagcgccgacaccatcagagccctgttcgtgagcgccttcccccagcagctgaccatgaagatgctggagagccccagcgtggccatctacatcaaggacgagagcagaaacgtgtactacgagctgaacgacgtgagaaacatccaggacagaagcctgctgaaggtgtacaacaaggaccccgcccacgccttcaaccacacccccaagaccatgaacggcgacatgagaatgcagagagagctggtgtacgccagaggcgacggccccggcgcccccagacccggcagcaccgcccaccccccccacgccatccccaacagcccccccagcacccccgtgccccacagcatgccccccagccccagcagaatcccctacggcggcaccagaagcatggtggtgcccggcaacgccaccatccccagagacagaatcagcagcctgcccgtgagcagacccatcagccccagccccagcgccatcctggagagaagagacgtgaagcccgacgaggacatgagcggcaagaacatcgccatgtacagaaacgagggcttctacgccgacccctacctgtaccacgagggcagaatgagcatcgccagcagccacggcggccaccccctggacgtgcccgaccacatcatcgcctaccacagaaccgccatcagaagcgccagcgcctactgcaaccccagcatgcaggccgagatgcacatggagcagagcctgtacagacagaagagcagaaagtaccccgacagccacctgcccaccctgggcagcaagaccccccccgccagcccccacagagtgagcgacctgagaatgatcgacatgcacgcccactacaacgcccacggccccccccacaccatgcagcccgacagagccagccccagcagacaggccttcaagaaggagcccggcaccctggtgtacatcgagaagcccagaagcgccgccggcctgagcagcctggtggacctgggcccccccctgatggagaagcaggtgttcgcctacagcaccgccaccatccccaaggacagagagaccagcgagaagatgatgaagaccaccgccaacagaaaccacaccgacagcgccggcaccccccacgtgagcggcggcaagatgctgagcgccctggagagcaccgtgccccccagccagcccccccccgtgggcaccagcgccatccacatgagcctgctggagatgagaagaagcgtggccgagctgagactgcagctgcagcagatgagacagctgcagctgcagaaccaggagctgctgagagccatgatgaagaaggccgagctggagatcagcggcaaggtgatggagaccatgaagagactggaggaccccgtgcagagacagagagtgctggtggagcaggagagacagaagtacctgcacgaggaggagaagatcgtgaagaagctgtag

SEQ ID NO: 102584 - DNA, 4125 bp, Artificial Sequence
  derived and/or modified sequence
atggaagagaatgagtctcagaagtgcgagccctgtctgccctactctgccgaccgccgacagatgcaggagcagggcaagggaaatctccatgttacatctcctgaagacgctgaatgcaggcgcactaaggagcgtctgtctaacggaaatagcagagggagtgtaagtaaatcatccaggaacattccacggcggcataccctgggtggtcccagatccagcaaggaaatcctggggatgcagacatcggagatggaccggaaacgcgaggcatttctcgagcatctcaagcagaaataccctcaccatgcgagtgctataatgggccaccaggagcgcctgcgggaccaaacccgcagccccaaactgagtcactcacctcaaccacctagcttgggggaccccgtggaacacctttcagagacttctgccgactcactagaggccatgagcgaaggggacgcccctaccccgttttcccgcggctcacgtactcgcgcttccctgcctgtggtgaggagcactaatcaaaccaaagaacgcagcttaggagtactgtacctgcagtacggggatgagacaaagcaattgcgcatgcctaatgagataacatcagctgacaccatcagagccctgttcgtctcagcctttccacagcaactgacaatgaaaatgcttgaaagcccatccgtggctatatacattaaagacgagtctcgcaatgtatactacgagctaaatgacgtgcggaacattcaggacaggtcactccttaaggtgtacaataaggatccagcgcatgcatttaaccacacaccgaagacaatgaacggcgacatgcgcatgcagagagagttagtctacgctagaggcgatggacctggcgctcctcggcctggctcaactgctcaccccccccacgccattcctaactcaccaccctctaccccagttccccactctatgcccccgtctcccagcaggattccttatggcggtacccggtccatggtggtgccaggcaatgctactattccacgggatagaatttcctccctgcccgtttctcggcctatttctccatctccctccgccatcttggaacgcagggacgtaaaaccggatgaggatatgagcggcaagaatatcgcaatgtaccgcaacgaaggcttctacgccgacccctacttgtaccatgagggccgcatgtccatagcctcttcccacggggggcacccgctagacgtcccggatcatataatcgcctatcatcggaccgctatcaggtccgcctcagcgtactgcaacccgtccatgcaggcggagatgcatatggagcaatccctgtaccgtcagaaaagtcggaaataccctgatagtcatctcccaactctgggttccaagacaccaccggccagtcctcatcgtgtcagtgaccttaggatgatagatatgcatgctcattataacgcccatggacctccccacacaatgcagccagacagagcttctccctcaaggcaagccttcaagaaggagcctggaacactggtgtatattgagaagccccggagtgctgcagggctgtcttctctggtggacctgggcccacccttgatggagaagcaagtgttcgcttattcgaccgccacaatccccaaggaccgagagaccagcgaaaagatgatgaagactaccgccaaccgcaatcacactgactccgccggtactcctcatgtgtctggcggaaagatgttgagcgcactcgagtcgacggtgccaccaagccagccacccccggtggggaccagtgctatccacatgtccctattggaaatgaggcggagtgttgctgagctcagattacaattgcaacagatgagacaactgcagcttcagaatcaggagctgctacgggccatgatgaaaaaagccgaattagaaatctccggtaaagtcatggaaacgatgaaacgattggaggatcctgttcagcgacagcgagtgcttgtggaacaggagagacagaaatacctacatgaggaggaaaaaattgtgaagaagctctgcgaactggaagacttcgtggaggatctcaaaaaggactccaccgcggcctctcggctcgttacgctgaaggatgtcgaagatggcgcatttttattacgccaggtgggagaggctgtagcaacactgaagggggagtttcccacacttcagaataaaatgcgggccattttgagaattgaggttgaagctgttaggtttttgaaggaagaaccccataaactggacagcttgctcaaaagggttcggagcatgactgacgttctgaccatgctgagacgccacgtcaccgatgggttgctcaagggtaccgacgcggctcaggccgcacaatacatggccatggagaaagcaaccgccgctgaggtgctgaaatcgcaggaagaggcagcacatacatccggacagccttttcattctactggtgctcccggtgacgcaaaaagcgaggtggtgccgctcagcggcatgatggtacggcacgctcagagctctcctgttgtgatccagcctagtcagcactcagttgcgcttttgaatcctgcacaaaatctccctcatgtggcaagttcaccagcagtccctcaggaggccaccagcaccctccagatgtcccaggcaccacagtctccacagattcctatgaacggctccgccatgcagtcattatttatcgaggaaattcattctgtgagtgctaaaaatagagccgtatccattgagaaggccgagaagaaatgggaagagaagcggcaaaacctcgaccattacaacggcaaggaattcgaaaagttactcgaagaggcacaggccaacattatgaaatcaatcccaaacctagagatgccgcccgccacgggccctctccctcgcggcgacgctccagtggacaaggttgagctgagtgacagccctaattcagagcaagacttggaaaaactaggcggcaagtcaccaccacctccacccccacctccaagaaggtcatacctccccgggagtgggctcacaaccacacgttccggcgacgtggtctacactggacgcaaagaaaacattaccgccaaagcttcatccgaagacgcaggccctagcccccagacccgagcaaccaaataccctgctgaggagcccgcttcggcttggaccccaagtccccctcccgtgactacctcatctagtaaggacgaagaggaggaagaagaggagggcgataagataatggccgaactacaggcattccagaagtgttcttttatggatgtgaactccaactcacacgctgagccctccagagccgatagccatgtgaaggacactcgatctggcgcgaccgtcccgcccaaagaaaagaagaatttggagttcttccacgaggacgtccgcaaaagcgatgttgaatatgagaacggcccccagatggaatttcagaaggggtcttctggcgcccctcaaacatcccgtatgcccgtccccatgagtgcaaagaaccgacctggaacactggacaagcccgggaagcagtccaagttgcaggatccacgacagtacaggcaagccaatggctcagctaaaaaatccggcggtgatttcaaacctaccagccctagtctgcctgcttccaagatccctgctttaagcccttcttcgggtaaatcatccagcttgccctccagctctggtgacagtagcaacctgcccaaccctcccgccaccaaaccttctattgcatccaatcctctgtccccccagactgggccacccgcccactctgccagtctgatcccttccgtctcaaatggtagcctcaaattccaaagcctcactcacacaggcaagggccaccacctctcttttagtccccaatctcagaacggccgcgctccacccccactgtcgtttagctcctcaccgccatctcccgcctctagcgtgagccttaatcagggtgccaaagggacaaggacaatacacacaccttcccttaccagctataaggcccagaatgggagctcatctaaagcaacacctagcactgcaaaagaaacatcctag

SEQ ID NO: 102585 - DNA, 1836 bp, Artificial Sequence
  derived and/or modified sequence
atgccgcaccttgatatgaagacacatgtgtgtccgagtgtggaggggcccaaaaaaaaaggagggattacctgtttttgttgtggaggccccttcagggccgcagacagatccaagaccaggagccctaaactgagccacagccctcagcctccctccctgggggatcctgtggagcacttgtccgagacaagtgcagattccctggaagccatgtctgagggggatgctccaacacctttttctagaggctccagaacacgtgcctccctcccagtggtccgctctaccaaccagactaaggaaaggtctcttggagtgctctacctgcaatatggtgacgagacaaaacagctcaggatgccgaacgagatcacctccgccgatactattagagctctgttcgtgtctgcattcccgcaacagttgaccatgaagatgctggagagccccagtgtggcgatttacatcaaggacgagtctcgcaacgtgtactacgagctcaacgacgttcgaaacattcaggatcggagtctgttgaaagtgtacaataaagaccctgcacacgcctttaaccacaccccgaaaaccatgaatggtgacatgagaatgcaacgggagctcgtgtacgctcggggagatggccctggagcgccccggcctggatccaccgcccacccaccgcatgcgattcctaattcacctccctccaccccagtccctcactctatgcccccctccccctccagaattccatacggtggtactcgctctatggtggtccctggcaacgctaccattcctagggaccgtatctctagcctacccgtcagcagacctatcagccctagtcccagcgctatcctggagagaagagatgtaaaaccagatgaggacatgtctggcaaaaacatcgccatgtatcgcaatgaaggattctacgccgatccgtacctgtatcacgaggggcgaatgtctatcgcatcatcacacggcgggcatcctctggatgtgccggatcatataattgcataccacagaactgctattaggtcagcctccgcctattgcaacccatccatgcaggctgagatgcacatggagcagtcgctgtatcggcagaagtctcgcaaatatcctgactctcatctgccaacccttggtagcaagacccctcccgcatctccccaccgagtgtcagatctcaggatgatcgatatgcacgcccactataacgctcatgggcctcctcacactatgcagccagatagggcttctccttctaggcaagccttcaagaaggaacctggaaccctcgtttatatcgagaagccccgatctgctgcgggcctctctagccttgtagacctggggccaccattaatggagaagcaagtctttgcttattccactgcgacaattcccaaagaccgagagaccagtgagaagatgatgaagactactgctaatcggaaccacactgactcagcgggcaccccgcacgtcagtggagggaagatgctctcagctttggagtcaactgtgcccccatctcagcccccgcctgtgggaacgagtgctattcacatgagcctcctcgaaatgcgcagaagcgtggctgaactgcggttacagctccagcagatgcgtcaattgcagctgcagaatcaggagttgcttcgcgctatgatgaaaaaggcggagctggaaatcagtggaaaggtcatggaaaccatgaaacggctggaggatcccgtccaaaggcagcgcgttctagttgaacaagagcgacaaaaatacctccacgaggaggaaaagatcgttaaaaagctttag

SEQ ID NO: 102586 - DNA, 5520 bp, Artificial Sequence
  derived and/or modified sequence
cttttgcggcaggcagagacaatggaagaaaatgaaagccagaaatgtgagccgtgccttccttactcagcagacagaagacagatgcaggaacaaggcaaaggcaatctgcatgtaacatcaccagaagatgcagaatgccgcagaaccaaggaacgcctttctaatggaaacagtcgtggttcagtttccaagtcttcccgcaatatcccaaggagacacaccctaggggggccccgaagttccaaggaaatactgggaatgcaaacatctgagatggatcggaagagagaagcgttcctagaacatctgaagcagaagtacccccaccacgcctctgcaatcatgggtcaccaagagaggctgagagaccagacaaggagccccaaactgtctcacagtcctcaaccacccagtctgggtgacccggtcgagcatttatcagagacgtccgctgattctttggaagccatgtctgagggggatgctccaacccctttttccagaggcagccggactcgtgcgagccttcctgtggtgaggtcaaccaaccagacgaaagaaagatctctgggggttctctatctccagtatggagatgaaaccaagcagctcaggatgccgaatgaaatcacaagtgcagacacaatccgtgctctcttcgtaagtgcctttccacagcagctcaccatgaaaatgctggaatcgcccagtgtcgccatttacatcaaagatgaaagcagaaatgtctattatgaattaaatgatgtaaggaacattcaagacagatcactcctcaaagtgtacaacaaggatcctgcacatgcgtttaatcacacaccaaaaactatgaatggagacatgaggatgcagagagaacttgtttatgcaagaggagatggccctggggcccctcgccccggatctactgctcatccaccccatgcgattccaaattccccaccgtctactccagtgccccattccatgcccccctccccgtccagaattccttatgggggcacccgctccatggttgttcctggcaatgccaccatccccagggacagaatctccagcctgccagtctccagacccatctctccaagcccaagcgccattttagaaagaagagatgtcaagcctgatgaagacatgagtggcaaaaacattgcaatgtacagaaatgagggtttctatgctgatccttacctttatcacgagggacggatgagcatagcctcatcccatggtggacacccactggatgtccccgaccacatcattgcatatcaccgcaccgccatccggtcagcgagtgcttattgtaacccctcaatgcaagcggaaatgcatatggaacaatcactgtacagacagaaatcaaggaaatatccggatagccatttgcctacactgggctccaaaacaccccctgcctctcctcacagagtcagtgacctgaggatgatagacatgcacgctcactataatgcccacggcccccctcacaccatgcagccagaccgggcctctccgagccgccaggcctttaaaaaggagccaggcaccttggtgtatatagaaaagccacggagcgctgcaggattatccagccttgtagacctcggccctcctctaatggagaagcaagtttttgcctacagcacggcgacaatacccaaagacagagagaccagcgagaaaatgatgaaaaccacagccaacaggaaccacacagatagtgcaggaacgccccatgtgtctggtgggaagatgctcagtgctctggagtccacggtgcctcccagccagcctccacctgtgggcacctcagccatccacatgagcctgcttgagatgaggcggagcgtggcggaactcaggctccagctccagcagatgcggcagctccagctgcagaaccaggagttgctgagggcaatgatgaagaaggccgagctggaaatcagtggcaaagtgatggaaacaatgaagagactggaggatcccgtgcagcgacagcgcgtcctagtggagcaagagagacaaaaatatcttcatgaggaagagaagatcgtcaagaagttgtgcgagttggaagactttgttgaagacttgaagaaggactccacggcagccagccgattggttactctgaaagacgtggaagacggggctttcctcctgcgtcaagtgggagaggctgtagctaccctgaaaggagaatttccaaccttacaaaacaagatgcgagccatcctgcgcatagaagtggaggccgtgcggtttctgaaggaggagccacacaagctggacagtctcctgaagcgtgtgcgcagcatgacagacgtcctgaccatgctgcggagacatgtcactgatgggctcctgaaaggcacggacgcagcccaagccgcacagtacatggctatggaaaaggccacagccgcagaagtcctgaagagtcaggaggaggcagcccacacctccggccagcccttccacagcacaggtgcccctggcgatgcgaagtcggaagtggtgcctttgtccggcatgatggttcgccacgcgcagagctcccctgtggtcatccagccctcccagcactccgtggccctgctgaaccctgctcagaacttgcctcacgtggccagctccccagccgtcccccaggaagcaacctccactctgcagatgtcgcaggctccgcagtccccacagatacccatgaatgggtctgccatgcagagcttgttcattgaagaaatccacagtgtgagtgccaagaacagggcagtgtctatcgagaaagcagaaaagaaatgggaggaaaaaaggcaaaatctggatcactataatgggaaagagtttgagaagctcctagaagaagctcaggccaatatcatgaagtcaataccaaatctggagatgccgccagccacaggcccactgccaaggggagatgccccagtggacaaggtggaactttcagattctccaaattcggaacaggacttggaaaagctggggggaaagtcgccccctcctcctccgccacctcctcgtcgaagctacctgccaggatcgggactcaccaccacgaggtcaggcgatgtggtctacaccggcagaaaggagaacatcaccgctaaggcaagcagtgaagatgctggaccaagcccacagaccagagctacaaaatatccagcagaggagcctgcttcagcctggaccccatccccaccgcctgtcaccacctcctcctcaaaggatgaggaggaagaagaagaagaaggagacaaaataatggcagaactccaggcattccagaagtgttcctttatggatgtaaattcaaacagtcatgctgagccatcccgggctgacagtcacgttaaagacactaggtcgggcgccacagtgccacccaaggagaagaagaatttggaatttttccatgaagatgtacggaaatctgatgttgaatatgaaaatggcccccaaatggaattccaaaagggctccagcggggccccacagacgagcaggatgcctgtccccatgagtgccaagaacagacccggaaccctggacaaacccggcaagcagtccaaactgcaggatccccgccaatatcgtcaggctaatggaagtgctaagaaatctggtggggactttaagcctacttccccctccttacctgcttctaagattccagccctttctcccagctctgggaaaagcagttctctgccctcttctagtggtgacagctctaacctccctaatccacctgctactaaaccatcgattgcttctaaccctctcagcccccaaacaggaccacctgctcactctgcctccctcatcccttctgtctctaatggctctttgaagtttcagagcctcactcatacaggtaaaggtcaccatctttcattctcaccgcagagtcaaaatggccgagcaccccctcctttgtcattttcctcctcccctccttctcctgcctcctccgtctcactgaatcaaggtgccaagggcaccaggaccatccatactcccagcctcaccagctacaaggcacagaatggaagttcaagcaaagccaccccatccacagcaaaagaaacctcttaaaggtcaaatcctattaggcacaagtcggagttacatttaaaaaaaattaacagtctacaacaactgttttcacaagagaatgtaacatattgctgtatcgtttgaggcttaatgctaaatatgtgctaaatactggattaatagatttcagtaaagctcgttcgttttgtttggttttctttttacctagttgctatagtgtctacagtctatactcaatacctataaaatgcagtaagcatgtgttacagaaagaggttctggtgggagagaaaggtgcgtgtgagacaggagaattgtcttaagcatataaaacatgtatgattccagaattttagtatgttttgtataaaactatttttcattacggagactagaagtgaacagagaattacacaagtgtgactatacaaattgtaaaacagatactataatatttccttttattttagtgttatttagctttattacagatttctatttttgtcaaaacttcatggttcctttcaagatcttttttgccaaaacattttgatactatagcattgtacatttgaaagtagtgttctagactataaaaccaatgaacttctacatgagccctacagacaggcatgtgtagaaggcaatttatcaaacctattgcactgccatgaaaagtgtgtataataatttgctagcccaagcaagctagttttctttgcttgcttcttttctttcttttttccttccttttttttttttttttcttttttaacatgttgagattctctagttgttttctttggcgtatctaaccccttcttttgttttctgagacctggtaacccacgctcttgcattgtggattttaaaatgtatactctgtacggttctgtaaaccgaaaaacttttgtaaatatataaatatacatagacataaaaatactgtatgtgacagcacatagagtagttttcccacaccaaagttaatttttatgcatgctttaaaagtatatatcgggaccggcagaaatggaagtatccatacatttttaaaaagcaacaagtttgcacagctagagtgtttttgtaaataaatgtatttgtataacacagtcatgtaatatacagaactataagcagagactttgcaaaactaaataaagggctgcatgcttattattttttgtaccttgtcactataactacttcctagtcaaagaacgaaatgtaactgttaccgagttaaatgtttttccgctttgagggatgtaaccacatccactcagaggacactacttttctgaaagctctggggtgactaatgatgagttcctaataaattaattgcaagtgtggtgccttggatgtggcctgttggctcgctttctt

SEQ ID NO: 102587 - DNA, 4125 bp, Artificial Sequence
  derived and/or modified sequence
atggaggagaatgaaagccagaagtgtgagccctgcctgccctacagcgctgaccggcggcagatgcaggagcagggcaaaggaaacctgcacgtgaccagcccagaagatgctgaatgtagaaggaccaaggagcggctgagcaatggaaacagccggggctctgtgtccaagagcagcaggaacatccccaggaggcacaccctgggcggccccaggagcagcaaggagatcctgggcatgcagaccagcgagatggacaggaagcgggaggccttcctggagcacctgaagcagaagtacccccaccacgccagcgccatcatgggccaccaggagcggctgcgggaccagaccaggagccccaagctgagccacagcccccagccccccagcctgggggaccctgtggagcacctgtctgagaccagcgctgacagcctggaggccatgtctgaaggagatgcccccacccccttcagccggggcagcaggacccgggccagcctgcctgtggtgcgcagcaccaaccagaccaaggagaggagcctgggcgtgctgtacctgcagtatggagatgagaccaagcagctgaggatgcccaatgagatcaccagcgctgacaccatccgggccctgtttgtgtctgccttcccccagcagctgaccatgaagatgctggagagccccagcgtggccatctacatcaaggatgagagcagaaatgtgtactatgagctgaatgatgtgaggaacatccaggacaggagcctgctgaaggtgtacaacaaggaccctgcccacgccttcaaccacacccccaagaccatgaatggagacatgaggatgcagcgggagctggtgtatgcccggggagatggccctggggccccccggcccggcagcacagcccaccccccccacgccatccccaacagcccccccagcacccctgtgccccacagcatgccacccagccccagccgcatcccctacggcggcaccaggtccatggtggtgcctggaaatgccaccatcccccgggaccgcatcagcagcctgcctgtgtcccggcccatcagccccagccccagcgccatcctggagaggagagatgtgaagccagatgaggacatgtctgggaagaacatcgccatgtacagaaatgaaggcttctacgccgacccctacctgtaccacgagggccgcatgagcatcgccagcagccacggcggccaccccctggatgtgcctgaccacatcatcgcctaccacaggacagccatccgcagcgccagcgcctactgcaaccccagcatgcaggccgagatgcacatggagcagagcctgtaccggcagaagagcaggaagtacccagacagccacctgcccaccctgggcagcaagaccccaccagccagcccccaccgggtgtctgacctgaggatgattgacatgcacgcccactacaatgcccacggccccccccacaccatgcagcctgaccgggccagccccagccggcaggccttcaagaaggagcccggcaccctggtgtacatcgagaagcccaggtctgctgctggcctgagcagcctggtggacctgggcccccccctgatggagaagcaggtgtttgcctacagcacagccaccatccccaaggaccgggagaccagcgagaagatgatgaagaccacagccaacagaaaccacacagattctgctggcaccccccacgtgtctgggggcaagatgctgagcgccctggagagcacagtgccccccagccagcccccacctgtgggcaccagcgccatccacatgagcctgctggagatgagaagatctgtggccgagctgcggctgcagctgcagcagatgaggcagctgcagctgcagaaccaggagctgctgcgggccatgatgaagaaggccgagctggagatcagcggcaaggtgatggagaccatgaagaggctggaggaccctgtgcagaggcagagggtgctggtggagcaggagcggcagaagtacctgcacgaggaggagaagatcgtgaagaagctgtgtgagctggaggactttgtggaggacctgaagaaggacagcacagctgccagccggctggtgaccctgaaggatgtggaggatggagccttcctgctgcggcaggtgggggaggccgtggccaccctgaagggggagttccccaccctgcagaacaagatgagggccatcctgcgcatcgaggtggaggccgtgcgcttcctgaaggaggagccccacaagctggacagcctgctgaagagggtgcgctccatgacagatgtgctgaccatgctgcggagacatgtgacagatggcctgctgaagggcacagatgctgcccaggccgcccagtacatggccatggagaaggccacagctgctgaggtgctgaagagccaggaggaggccgcccacaccagcggccagcccttccacagcactggagcccctggagatgccaagtctgaggtggtgcccctgagcggcatgatggtgagacatgcccagagcagccctgtggtgatccagcccagccagcacagcgtggccctgctgaacccagcccagaacctgccccacgtggccagcagccctgctgtgccccaggaggccaccagcaccctgcagatgagccaggccccccagagcccccagatccccatgaatggcagcgccatgcagagcctcttcatcgaggagatccacagcgtgtctgccaagaacagagctgtgtccattgagaaggccgagaagaagtgggaggagaagaggcagaacctggaccactacaacgggaaggagtttgagaagctgctggaggaggcccaggccaacatcatgaagagcatccccaacctggagatgcccccagccaccggccccctgcccagaggagatgcccctgtggacaaggtggagctgagtgacagccccaacagcgagcaggacctggagaagctgggcggcaagagccccccacctcctcctcctcctccaagaagaagctacctgcccggcagcggcctgaccaccaccaggtctggagatgtggtgtacacaggcaggaaagaaaacatcacagccaaggccagcagtgaagatgctggccccagcccccagacccgggccaccaagtacccagctgaggagcccgccagcgcctggacccccagccccccacctgtgaccaccagcagcagcaaggatgaggaggaggaggaggaggagggggacaagatcatggccgagctgcaggccttccagaagtgcagcttcatggatgtgaacagcaacagccacgccgagcccagcagagctgacagccacgtgaaggacaccaggtctggggccaccgtgccccccaaggagaagaagaacctggagttcttccatgaagatgtgaggaagagtgatgtggagtatgaaaatggcccccagatggagttccagaagggcagcagcggggccccccagaccagcaggatgcctgtgcccatgtctgccaagaacagacctggcaccctggacaagccaggcaagcagagcaagctgcaggacccccggcagtaccggcaggccaatggaagtgccaagaagtctggaggagacttcaagcccaccagccccagcctgcctgccagcaagatcccagccctgagccccagcagcggcaagagcagcagcctgcccagcagcagcggggacagcagcaacctgcccaaccccccagccaccaagcccagcatcgccagcaaccccctgagcccccagacaggccccccagcccacagcgccagcctcatccccagcgtgtccaatggcagcctgaagttccagagcctgacccacacaggcaagggccaccacctgtccttcagcccccagagccagaatggccgggcccccccacccctgtccttcagcagcagcccccccagccctgccagctctgtgtccctgaaccagggcgccaagggcaccaggaccatccacacccccagcctgaccagctacaaggcccagaatggcagcagcagcaaggccacccccagcacagccaaggagaccagctag

SEQ ID NO: 102588 - DNA, 1836 bp, Artificial Sequence
  derived and/or modified sequence
atgccccacctggacatgaagacccacgtgtgccccagcgtggagggccccaagaagaagggcggcatcacctgcttctgctgcggcggccccttccgggctgctgacaggagcaagaccaggagccccaagctgagccacagcccccagccccccagcctgggggaccctgtggagcacctgtctgagaccagcgctgacagcctggaggccatgtctgaaggagatgcccccacccccttcagccggggcagcaggacccgggccagcctgcctgtggtgcgcagcaccaaccagaccaaggagaggagcctgggcgtgctgtacctgcagtatggagatgagaccaagcagctgaggatgcccaatgagatcaccagcgctgacaccatccgggccctgtttgtgtctgccttcccccagcagctgaccatgaagatgctggagagccccagcgtggccatctacatcaaggatgagagcagaaatgtgtactatgagctgaatgatgtgaggaacatccaggacaggagcctgctgaaggtgtacaacaaggaccctgcccacgccttcaaccacacccccaagaccatgaatggagacatgaggatgcagcgggagctggtgtatgcccggggagatggccctggggcccccaggcctggcagcacagcccacccccctcatgccatccccaacagcccccccagcacccctgtgccccacagcatgccacccagccccagccgcatcccctatggaggcaccaggtccatggtggtgcctggaaatgccaccatcccccgggaccgcatcagcagcctgcctgtgtcccggcccatcagccccagccccagcgccatcctggagaggagagatgtgaagccagatgaggacatgtctgggaagaacatcgccatgtacagaaatgaaggcttctatgctgacccctacctgtaccacgagggccgcatgagcatcgccagcagccatggaggccaccccctggatgtgcctgaccacatcatcgcctaccacaggacagccatccgcagcgccagcgcctactgcaaccccagcatgcaggccgagatgcacatggagcagagcctgtaccggcagaagagcaggaagtacccagacagccacctgcccaccctgggcagcaagaccccaccagccagcccccaccgggtgtctgacctgaggatgattgacatgcacgcccactacaatgcccacggccccccccacaccatgcagcctgaccgggccagccccagccggcaggccttcaagaaggagcccggcaccctggtgtacatcgagaagcccaggtctgctgctggcctgagcagcctggtggacctgggcccccccctgatggagaagcaggtgtttgcctacagcacagccaccatccccaaggaccgggagaccagcgagaagatgatgaagaccacagccaacagaaaccacacagacagcgctggcacccctcatgtgtctgggggcaagatgctgagcgccctggagagcacagtgccccccagccagcccccacctgtgggcaccagcgccatccacatgagcctgctggagatgagaagatctgtggccgagctgcggctgcagctgcagcagatgaggcagctgcagctgcagaaccaggagctgctgcgggccatgatgaagaaggccgagctggagatcagcggcaaggtgatggagaccatgaagaggctggaggaccctgtgcagaggcagagggtgctggtggagcaggagcggcagaagtacctgcacgaggaggagaagatcgtgaagaagctgtag

SEQ ID NO: 102589 - DNA, 4125 bp, Artificial Sequence
  derived and/or modified sequence
atggaggagaacgagagccagaagtgcgagccctgcctgccctacagtgccgacagacgtcagatgcaggagcagggcaagggcaacctgcatgtcacatctccagaggacgccgagtgccgaagaaccaaggaacgcctttccaatggaaattcccgaggatccgtgagcaagagtagcagaaacattccaaggagacataccctcgggggtccacggtcttctaaagagattctgggaatgcagacctcagagatggacagaaagcgggaggccttcctggagcatctgaagcagaaatatccgcatcatgctagcgctattatggggcatcaggagaggcttagggatcagactcgcagtcccaaactgtcccattccccacagcctccgtccctgggtgacccagtggagcatctctcggaaacatccgctgactctctcgaagccatgagtgaaggtgatgcccccacgcctttttctcgaggcagccgtaccagggccagtttgccagtcgtccgatccacgaatcagactaaggagcggtcactgggtgtcctgtatttgcagtatggggatgaaacaaaacagctcagaatgcctaacgaaattaccagcgcagataccattcgcgccctgtttgtgtcagcttttccccaacagctcaccatgaagatgctggagtctccttctgtagccatttatattaaggacgaatctcgtaatgtttactacgagcttaacgatgttcggaatatccaggatcggtccctgctgaaagtctataacaaagaccccgcccacgcatttaaccacacacctaagaccatgaatggcgacatgagaatgcagagagaactagtgtatgccaggggagatggacccggagcaccacggcccgggtcgaccgcccatccaccacacgccattccaaactccccaccgagtacacccgtgcctcatagcatgcccccatccccaagtcgtataccctatgggggcacacgctcaatggtggtgcccggaaacgccaccatacctcgcgataggattagcagcctaccagtgagtcgcccaatctctcctagcccttccgcaatccttgaaaggagagatgtgaagcccgatgaggacatgtcaggtaaaaatattgctatgtaccgcaatgaagggttctatgccgacccatacctttaccacgaaggccgtatgtcaatcgcaagctcacatggcggccacccactggacgtacccgaccatataattgcttatcatcgcactgcaatccgatccgccagtgcttactgcaatccgagcatgcaggcagaaatgcacatggagcagtccctgtacaggcagaagtccaggaagtatccggattcccacctgcctaccttggggagcaaaacacctcctgcttcacctcatcgggttagcgacctgagaatgatagatatgcacgctcactacaacgcccatggccccccacacaccatgcaacccgacagagcctccccaagtcgtcaggcattcaagaaggagccaggcactctggtttacatcgagaagcctaggagcgctgcaggcttgagcagtctggtggatcttggtccacctttgatggagaagcaggtgtttgcatactctacagccacaatcccaaaagacagggaaacttccgaaaagatgatgaaaacaacggccaatcgcaatcacacagattcagccgggacaccacacgtatcaggcggcaagatgctatccgctctggagtctactgtgcccccctctcagcctccccccgttggaaccagtgcaatacacatgtcccttttggaaatgcggcgttcggtggcggaactgcgactgcagctgcagcagatgaggcagctccagctccaaaatcaagagctgttacgagcgatgatgaaaaaggctgagttggagatttccgggaaagtaatggaaaccatgaaaaggctggaggacccagttcaaagacaaagagttctcgtcgaacaagaacgccagaagtacctgcacgaggaggaaaaaattgtcaagaagctgtgcgagctggaagattttgtggaggacctgaagaaggattccaccgcagcctctcgacttgtcactctgaaggacgtggaggatggcgcctttctgctgaggcaagttggggaggcagtcgccacacttaagggagaattccccactctccagaacaaaatgagggccatcttgcgcatcgaggtagaggccgtgaggttcctgaaggaagagcctcacaagttggacagtctcttaaagcgggtgcggagcatgaccgatgtgctcacaatgcttaggaggcatgtaactgatggcctcctgaaggggacagacgcggcccaagcagcccagtatatggctatggagaaggccacagcagccgaagtgcttaaatcgcaggaagaggctgcacatacatcaggccagcctttccactcaactggcgccccgggggatgccaaatcagaggtggttcccctctctggcatgatggtgaggcacgcacaatcttctcctgtggtcatccagccaagccaacacagcgtggcactcctgaatccagctcagaacctccctcacgtcgcatcttccccggccgtcccccaggaagccacttccactctgcaaatgagccaggctccacaatcaccacagatacccatgaatgggtcggctatgcagtcgctgttcatagaagagattcactcggtgtcagccaagaatagggcagtctctattgagaaggccgaaaaaaagtgggaagaaaagaggcagaatctggaccattataacggaaaggagttcgagaagcttttggaggaggcgcaggccaacataatgaaatcaattccaaatctcgaaatgccaccagctacagggccattgcctcgcggggacgctccggtagacaaagttgaactgagtgacagtcccaactcagagcaggaccttgaaaaactcggaggaaagagcccgcctcctccgccccctccgcccagacggtcttacctcccaggaagcggactgacgacaactaggtctggagacgtggtttataccggaagaaaagagaacattacagctaaagcttcctcggaagatgccggaccaagtccacaaaccagggctacgaagtacccggccgaggagccagcatctgcctggaccccatccccgccgcccgtcacaactagttcctccaaggacgaggaggaggaggaggaagagggagacaagatcatggctgagttgcaggcattccaaaagtgcagtttcatggacgttaactctaattctcacgcagagccatcgcgggcagactcccacgttaaggatacaaggagcggcgccacagttcctcctaaagagaagaagaaccttgagttctttcacgaggacgtgaggaaatctgatgttgagtacgagaatgggcctcagatggaatttcagaagggatcctcaggagccccccaaacttccagaatgcctgtgcccatgtcagcgaagaatcgaccgggtacgttggacaagccaggaaagcagagcaagctgcaggacccacgacagtatcgccaagccaacggcagtgcgaagaagtcaggcggggacttcaagcccacttccccatctttgccagcatcaaagattcccgccctgtccccgtcttctggaaaaagctcatccttgccttcttcttctggtgattcctccaatctgccaaacccccccgccactaaaccctctatagcaagcaatcctctgagcccacagactgggcctccagcacactccgctagcctgattccctccgtttccaacggctccctgaaatttcaaagcttaacacacactggaaagggacatcatctgtcattcagtccacagtctcagaatggacgtgcaccaccacctctgtccttcagctcatctcctccatctcctgctagtagtgtctccctaaatcaaggggcaaaaggcacgaggaccattcacacacccagcctcacaagctacaaggctcagaatggcagtagttccaaggctactcccagtaccgcaaaggaaacatcttag

SEQ ID NO: 102590 - DNA, 1836 bp, Artificial Sequence
  derived and/or modified sequence
atgccccacctggacatgaagacccacgtgtgccccagcgtggagggccccaaaaagaaaggcggaataacctgtttttgctgtggaggacccttccgagcagccgatcgctcaaagacccgcagcccaaagctcagccactccccacaacctccatctctcggggacccagtcgagcacctgagtgagaccagtgcggacagccttgaggctatgtccgagggtgacgcgcctacacctttctcgcgtggttctaggacgagagcctcactccccgtggtgcgttctacaaaccagaccaaagagagaagcctgggggtgctctatctgcagtacggggacgagactaagcagctcagaatgcctaatgaaatcacctctgccgatacgatccgggcactctttgttagcgctttcccgcaacagctgacgatgaaaatgctcgagagtccttctgtcgcaatctatattaaggatgagtcgcgcaatgtatactacgagttaaatgacgtgcgcaatattcaagatcgctcccttctgaaggtctacaacaaagacccggcccacgcctttaatcacactcccaaaacaatgaatggtgatatgcgcatgcagcgcgaactcgtctatgcccggggcgatggcccgggcgctccgcgccccgggtccaccgcccacccgcctcacgctattccaaacagcccaccttctacccctgtgcctcactcaatgcccccctccccctctcggatcccgtatggtggcactagatctatggtggtccctggcaacgccactatccccagggaccgaatctccagcctgcccgtgtcaaggcccatctcccctagtccaagcgccattctagaacgccgcgatgtgaagccagacgaggatatgtccggtaaaaatattgctatgtataggaacgagggcttttacgcggatccatatctttatcatgaggggcgtatgtctatcgcaagctcacacggtggccatcctcttgacgttcctgaccacatcatcgcgtatcaccgaacggctatcagatcagcgtcagcgtactgtaaccccagtatgcaagccgagatgcacatggagcaatcactctacagacaaaaatcccgaaaataccccgatagccaccttcccaccctcggctcaaagacacccccagcttctccgcatcgggtaagcgacttgaggatgatcgatatgcacgcccactataatgctcatggaccaccccacactatgcagccggatagggcatcacctagccgacaagcatttaagaaagagccaggcacccttgtgtacatagaaaaacctaggtccgccgccggcctatctagcctggtagatcttggaccccccttaatggagaaacaagtttttgcgtattcgacggccaccatccccaaggacagagaaacctctgaaaaaatgatgaagactacagccaacagaaatcacaccgactccgcgggcaccccccatgttagcggaggcaaaatgctttccgccttggagtccactgtgccccccagccaaccaccccccgttggtacttcagcgatacatatgtccctcctcgagatgcgcagatccgtcgccgagcttcgcctgcagttgcagcaaatgagacaactgcaacttcagaaccaggaactcctccgcgccatgatgaagaaagccgagctggagatctcgggtaaagtcatggaaactatgaagcgcctcgaagatcctgtccaacgacagagagttctggtagagcaggagcgccagaagtatcttcacgaagaggaaaagatcgttaagaagctttag

SEQ ID NO: 102591 - DNA, 4125 bp, Artificial Sequence
  derived and/or modified sequence
atggaagaaaatgaatctcagaaatgcgaaccttgtttaccttattcagccgaccgtcgtcaaatgcaggagcagggaaagggtaatctccacgtcacttctccagaggatgcagaatgccggagaacaaaagaacggctgagcaatgggaactctcgagggagtgtgtcgaaatcatccagaaatatccccaggaggcacactctgggcggacccagaagcagtaaggaaatactggggatgcagacgagcgagatggataggaagcgagaggcgttcttagagcacctcaaacagaaatacccacatcacgcctctgcgatcatgggtcaccaggagagattgcgcgatcagacccgatcccctaaattgagccattcaccgcaacctccgagcctgggagatcctgtggaacatctctcagaaacttctgccgacagtttggaagctatgtccgaaggcgacgcgccaacccccttcagtaggggctcacgaactcgggcttctttgccggttgttcgctccactaaccagacgaaagaaaggagcctcggagtgctttacctgcagtacggcgacgagacgaagcagctaaggatgcctaacgaaatcacaagtgccgacaccataagggccctgttcgtctctgcatttccacagcagctgaccatgaaaatgttggaatctccctcagtggcaatatacattaaggatgagagtagaaatgtgtactatgagctgaatgacgtgcgcaatattcaggaccggtccttactaaaggtatacaacaaagaccctgcccacgcctttaaccacaccccaaaaacaatgaacggcgacatgcgaatgcagcgggaactggtctacgcaaggggcgacgggcctggtgcccctcgaccgggaagtacagcccaccctccccacgcgattccaaattctcctcccagtacccccgtgcctcactcaatgccaccctccccgtccaggatcccttacggcggaactagatcaatggtcgtgcctggcaacgctacaattcctcgcgacaggatttccagccttcccgtgtctaggccgattagccctagcccgtctgcaatactggagcgcagggacgttaaaccagatgaagatatgtctggaaagaatatcgcgatgtacaggaatgaaggcttctacgccgacccctatctgtaccacgaaggccgaatgagcattgcatctagccatggcggtcatccacttgatgtccctgatcatatcatcgcttatcacaggaccgctatccgcagcgcttctgcttactgcaaccctagcatgcaggcagagatgcacatggaacagagtctgtatcgccagaaatccaggaagtacccagacagccacctgccaactcttggcagcaaaaccccgccagcgtcaccccatagagtgtccgacctccgcatgatagatatgcacgcccactacaatgcccatgggcctcctcacacaatgcagcccgaccgcgcttcaccctctcggcaagctttcaaaaaggagccaggcacactcgtctatattgaaaaacccagatctgctgccggactgtcctctttggtggatttgggccctcccctgatggaaaagcaggtcttcgcttatagcacagctacaatccccaaggacagggaaacgtcagagaagatgatgaagacgaccgcgaataggaatcacactgatagcgctggcacacctcacgtgagtggtggaaagatgttatccgcgctggagtccacggttcccccttcccagcccccacctgttggcacaagtgctatccatatgagcctactggaaatgaggcggagtgtggctgaattgcggctgcagttgcaacagatgcggcaattacagttgcagaatcaggagctactccgtgccatgatgaaaaaggccgagctggagatctccggaaaagtaatggagaccatgaagaggctggaagatcccgtgcagaggcagcgcgttttagtagagcaggaaagacagaagtatcttcatgaagaggagaaaatagtgaaaaaactctgtgagctggaggacttcgtggaggaccttaagaaggacagcaccgctgcttccagactggtcacactgaaggacgtagaggatggagcattcctgctacggcaagtgggagaggcggtggccaccctcaaaggcgagttcccaaccctgcagaataagatgcgggctatactgaggatagaggtcgaggcagtcaggttccttaaagaagagccgcacaaacttgacagcctcctgaaacgtgtccgctcgatgacggatgttctaactatgctaaggcgacatgtgaccgacggcctgctgaaaggcaccgatgctgcacaagccgctcagtacatggccatggaaaaggcaacagcagccgaagttttgaaatcacaagaagaggcggcacacacttctggacaaccgttccacagcaccggagctcctggggacgcaaagagcgaagtcgtccccttgtctgggatgatggtgagacatgcccagagcagtcccgtcgtcattcagccgtcacagcattctgtggccctccttaatccagcgcaaaacctgccacacgtggcgagttcacctgccgtccctcaagaggcaacctctaccttacaaatgtcacaggctccacaatcgccgcagattcccatgaacgggagtgccatgcagtcgttgttcatcgaagagattcatagtgtgtctgcaaagaatagagccgtcagtatagaaaaagccgaaaagaagtgggaggagaagagacagaacctcgaccattacaacggaaaggagttcgaaaagctccttgaagaagcccaggcaaatatcatgaagtctatccccaatttagagatgccccctgccaccggacctctgcctagaggtgatgctcctgtggacaaagttgaacttagtgacagtcctaactcagaacaagatctggagaagctgggtggtaagtcgccacctccaccccctccaccgcctcgcaggagctacctccccggatccggcctgactactaccagatctggtgacgtggtgtacaccggaaggaaggagaatatcaccgccaaggcctcctcagaagacgctgggcctagtcctcaaacacgagcaaccaagtaccctgctgaagaacctgcatccgcttggacaccctccccacctcctgtgactacttccagctctaaggatgaggaagaggaggaggaggaaggagacaagataatggccgagttacaggcatttcagaaatgctccttcatggacgttaattcaaactcccatgcggagccttcgcgagccgattcccacgttaaagacactcgcagcggagctacagttccaccgaaagagaagaaaaatctggaatttttccacgaggacgtcaggaaatccgacgtggaatacgagaatgggcctcagatggagttccagaagggttcatcaggcgctccacagacctctcgcatgccagtgcccatgtccgcaaagaataggccgggaaccctcgataagccaggaaaacagtcaaaattgcaagacccccgtcagtatcgccaggcaaacggctcggctaagaagtcgggcggtgacttcaagccaacatctccaagccttcccgcaagtaagataccagcgctttctcctagcagcggtaagagctcttccttgcctagctctagcggggacagctctaacctgcctaatcccccagctacaaaacctagtatcgcctctaaccctctgtcacctcagaccggtccccctgctcattccgcttccctgatcccgtcagtaagcaacggctcactcaagtttcagtcactgacgcacaccggaaagggtcatcacttgtccttctcgccacagtctcagaacggtagggcaccccctccattgtctttcagctcttcacctccttcacctgctagttcagttagtcttaaccagggggctaagggtactcgcacaatccacactcccagtctcactagttacaaggcacagaatggcagcagcagtaaggccactccttcaaccgccaaagaaacctcctag

SEQ ID NO: 102592 - DNA, 1836 bp, Artificial Sequence
  derived and/or modified sequence
atgcctcacctggatatgaaaacgcacgtttgtccatcagtggagggtccaaaaaagaaaggcggaatcacatgcttctgttgtggaggaccatttagagccgcagaccgcagtaagactaggtcccccaagctgtctcatagcccccagcccccatcactgggcgaccctgtggagcatctgagcgagacgagtgccgattcgctggaggccatgtctgagggcgacgcccctaccccctttagcagaggctccagaacccgcgcatctctgccagtggtccgctccactaaccagactaaggagcggagtctgggtgtgttgtacttgcaatacggggatgagactaagcagttgcgtatgcctaacgagatcacatctgcagatacgattcgagcactgttcgtctctgcttttccacagcagttaacaatgaagatgcttgagagcccctcggtggctatttacattaaggatgagagtaggaatgtgtattacgagctgaacgacgttaggaacatccaggacaggtccctgttgaaagtttataataaggaccctgcccatgcattcaaccacacccctaagacaatgaacggcgacatgcggatgcaacgggagttggtttacgccagaggcgatgggccaggagccccacgaccgggaagcaccgctcacccaccacacgcaataccaaattcaccaccctccaccccagtgccccatagtatgcccccatcccctagcaggatcccctacgggggtacccgctccatggtagtaccaggcaatgcaacaataccaagggacagaattagctccttgccagtatcccgccctatttccccctcaccgagcgctatcctagagaggagagatgtgaaacctgatgaagatatgtctggcaagaatatcgccatgtataggaatgagggcttctacgcggatccatacttatatcacgaggggaggatgagcattgctagcagccacggaggccatcccctggacgtgccagaccacattatagcctaccacaggaccgccatcaggtcggccagcgcatactgtaaccccagcatgcaggccgaaatgcacatggaacagtcactctacaggcaaaaatcccgtaaatacccggattcccacctgcccacactaggaagcaaaacacctcctgcgagtccccatagagtgtcagacctgagaatgatcgacatgcacgcccactacaacgctcacgggccaccgcacactatgcagccagaccgcgctagcccgtctagacaggccttcaagaaggagcccggtaccctcgtctatattgagaaacccagatcggccgcaggcttgtcctctctggtggatctgggcccacctctcatggaaaagcaggttttcgcttattctactgcgaccatacccaaggatcgagaaaccagtgaaaaaatgatgaagaccactgccaaccgcaatcacactgattcagcgggtaccccccacgtttcgggaggtaaaatgctgtctgctttagagagtaccgtacctccctcccaaccaccgcctgtaggaaccagcgctattcacatgagcctgctggagatgcggaggtcagttgcggagttgcgcctgcagctccagcaaatgcggcagttacagttacagaatcaggaactgctgagagccatgatgaaaaaggctgaactcgagattagtggtaaggtcatggagactatgaagcgactggaagatcctgtacagcggcagcgagtactcgtggagcaggagcggcagaaatatctgcatgaggaggagaagatagtcaagaaactgtag

SEQ ID NO: 102593 - DNA, 2234 bp, Artificial Sequence
  derived and/or modified sequence
acacttcaaatcctgagcggctgactgtcaggggtgcgtcaggcctgcttgctgggagaatggacgagctggttgtggagcgggcgggtcccgccacccgtgggctcagcactggactgctcccagaacattaaaggtctggctgatgttccatgccacatctggacatgaagacccatgtctgcccttctgtagaagggccaaagaagaaaggaggcatcacatgtttctgctgtggggggcccttccgagcagcagacaggagcaagacaaggagccccaaactgtctcacagtcctcaaccacccagtctgggtgacccggtcgagcatttatcagagacgtccgctgattctttggaagccatgtctgagggggatgctccaacccctttttccagaggcagccggactcgtgcgagccttcctgtggtgaggtcaaccaaccagacgaaagaaagatctctgggggttctctatctccagtatggagatgaaaccaagcagctcaggatgccgaatgaaatcacaagtgcagacacaatccgtgctctcttcgtaagtgcctttccacagcagctcaccatgaaaatgctggaatcgcccagtgtcgccatttacatcaaagatgaaagcagaaatgtctattatgaattaaatgatgtaaggaacattcaagacagatcactcctcaaagtgtacaacaaggatcctgcacatgcgtttaatcacacaccaaaaactatgaatggagacatgaggatgcagagagaacttgtttatgcaagaggagatggccctggggcccctcgccccggatctactgctcatccaccccatgcgattccaaattccccaccgtctactccagtgccccattccatgcccccctccccgtccagaattccttatgggggcacccgctccatggttgttcctggcaatgccaccatccccagggacagaatctccagcctgccagtctccagacccatctctccaagcccaagcgccattttagaaagaagagatgtcaagcctgatgaagacatgagtggcaaaaacattgcaatgtacagaaatgagggtttctatgctgatccttacctttatcacgagggacggatgagcatagcctcatcccatggtggacacccactggatgtccccgaccacatcattgcatatcaccgcaccgccatccggtcagcgagtgcttattgtaacccctcaatgcaagcggaaatgcatatggaacaatcactgtacagacagaaatcaaggaaatatccggatagccatttgcctacactgggctccaaaacaccccctgcctctcctcacagagtcagtgacctgaggatgatagacatgcacgctcactataatgcccacggcccccctcacaccatgcagccagaccgggcctctccgagccgccaggcctttaaaaaggagccaggcaccttggtgtatatagaaaagccacggagcgctgcaggattatccagccttgtagacctcggccctcctctaatggagaagcaagtttttgcctacagcacggcgacaatacccaaagacagagagaccagcgagaaaatgatgaaaaccacagccaacaggaaccacacagatagtgcaggaacgccccatgtgtctggtgggaagatgctcagtgctctggagtccacggtgcctcccagccagcctccacctgtgggcacctcagccatccacatgagcctgcttgagatgaggcggagcgtggcggaactcaggctccagctccagcagatgcggcagctccagctgcagaaccaggagttgctgagggcaatgatgaagaaggccgagctggaaatcagtggcaaagtgatggaaacaatgaagagactggaggatcccgtgcagcgacagcgcgtcctagtggagcaagagagacaaaaatatcttcatgaggaagagaagatcgtcaagaagttgtgaaagcagaaaagaaatgggaggaaaaaaggcaaaatctggatcactataatgggaaagagtttgagaagctcctagaagaagctcaggccaatatcatgaagtcaataccaaatctggagatgccgccagccacaggcccactgccaaggggagatgccccagtggacaaggtggaactttcagaagattctccaaattcggaacaggacttggaaaagctggggggaaagtcgccccctcctcctc

SEQ ID NO: 102594 - protein, 1349 aa, Artificial Sequence
  derived and/or modified sequence
MEENESQKCEPCLPYSADRRQMQEQGKGNLHVTSPEDAECRRTKERLSNGNSRGSVSKSSRNIPRRHTLGGPRSSKEILGMQTSEMDRKREAFLEHLKQKYPHHASAIMGHQERLRDQTRSPKLSHSPQPPSLGDPVEHLSETSADSLEAMSEGDAPTPFSRGSRTRASLPVVRSTNQTKERSLGVLYLQYGDETKQLRMPNEITSADTIRALFVSAFPQQLTMKMLESPSVAIYIKDESRNVYYELNDVRNIQDRSLLKVYNKDPAHAFNHTPKTMNGDMRMQRELVYARGDGPGAPRPGSTAHPPHAIPNSPPSTPVPHSMPPSPSRIPYGGTRSMVVPGNATIPRDRISSLPVSRPISPSPSAILERRDVKPDEDMSGKNIAMYRNEGFYADPYLYHEGRMSIASSHGGHPLDVPDHIIAYHRTAIRSASAYCNPSMQAEMHMEQSLYRQKSRKYPDSHLPTLGSKTPPASPHRVSDLRMIDMHAHYNAHGPPHTMQPDRASPSRQAFKKEPGTLVYIEKPRSAAGLSSLVDLGPPLMEKQVFAYSTATIPKDRETSEKMMKTTANRNHTDSAGTPHVSGGKMLSALESTVPPSQPPPVGTSAIHMSLLEMRRSVAELRLQLQQMRQLQLQNQELLRAMMKKAELEISGKVMETMKRLEDPVQRQRVLVEQERQKYLHEEEKIVKKLCELEDFVEDLKKDSTAASRLVTLKDVEDGAFLLRQVGEAVATLKGEFPTLQNKMRAILRIEVEAVRFLKEEPHKLDSLLKRVRSMTDVLTMLRRHVTDGLLKGTDAAQAAQYMAMEKATAAEVLKSQEEAAHTSGQPFHSTGAPGDAKSEVVPLSGMMVRHAQSSPVVIQPSQHSVALLNPAQNLPHVASSPAVPQEATSTLQMSQAPQSPQIPMNGSAMQSLFIEEIHSVSAKNRAVSIEKAEKKWEEKRQNLDHYNGKEFEKLLEEAQANIMKSIPNLEMPPATGPLPRGDAPVDKVELSEDSPNSEQDLEKLGGKSPPPPPPPPRRSYLPGSGLTTTRSGDVVYTGRKENITAKASSEDAGPSPQTRATKYPAEEPASAWTPSPPPVTTSSSKDEEEEEEEGDKIMAELQAFQKCSFMDVNSNSHAEPSRADSHVKDTRSGATVPPKEKKGSSGAPQTSRMPVPMSAKNRPGTLDKPGKQSKLQDPRQYRQANGSAKKSGGDFKPTSPSLPASKIPALSPSSGKSSSLPSSSGDSSNLPNPPATKPSIASNPLSPQTGPPAHSASLIPSVSNGSLKFQSLTHTGKGHHLSFSPQSQNGRAPPPLSFSSSPPSPASSVSLNQGAKGTRTIHTPSLTSYKAQNGSSSKATPSTAKETS

SEQ ID NO: 102595 - DNA, 4050 bp, Artificial Sequence
  derived and/or modified sequence
atggaggagaacgagagccagaagtgcgagccctgcctgccctacagcgccgacagaagacagatgcaggagcagggcaagggcaacctgcacgtgaccagccccgaggacgccgagtgcagaagaaccaaggagagactgagcaacggcaacagcagaggcagcgtgagcaagagcagcagaaacatccccagaagacacaccctgggcggccccagaagcagcaaggagatcctgggcatgcagaccagcgagatggacagaaagagagaggccttcctggagcacctgaagcagaagtacccccaccacgccagcgccatcatgggccaccaggagagactgagagaccagaccagaagccccaagctgagccacagcccccagccccccagcctgggcgaccccgtggagcacctgagcgagaccagcgccgacagcctggaggccatgagcgagggcgacgcccccacccccttcagcagaggcagcagaaccagagccagcctgcccgtggtgagaagcaccaaccagaccaaggagagaagcctgggcgtgctgtacctgcagtacggcgacgagaccaagcagctgagaatgcccaacgagatcaccagcgccgacaccatcagagccctgttcgtgagcgccttcccccagcagctgaccatgaagatgctggagagccccagcgtggccatctacatcaaggacgagagcagaaacgtgtactacgagctgaacgacgtgagaaacatccaggacagaagcctgctgaaggtgtacaacaaggaccccgcccacgccttcaaccacacccccaagaccatgaacggcgacatgagaatgcagagagagctggtgtacgccagaggcgacggccccggcgcccccagacccggcagcaccgcccaccccccccacgccatccccaacagcccccccagcacccccgtgccccacagcatgccccccagccccagcagaatcccctacggcggcaccagaagcatggtggtgcccggcaacgccaccatccccagagacagaatcagcagcctgcccgtgagcagacccatcagccccagccccagcgccatcctggagagaagagacgtgaagcccgacgaggacatgagcggcaagaacatcgccatgtacagaaacgagggcttctacgccgacccctacctgtaccacgagggcagaatgagcatcgccagcagccacggcggccaccccctggacgtgcccgaccacatcatcgcctaccacagaaccgccatcagaagcgccagcgcctactgcaaccccagcatgcaggccgagatgcacatggagcagagcctgtacagacagaagagcagaaagtaccccgacagccacctgcccaccctgggcagcaagaccccccccgccagcccccacagagtgagcgacctgagaatgatcgacatgcacgcccactacaacgcccacggccccccccacaccatgcagcccgacagagccagccccagcagacaggccttcaagaaggagcccggcaccctggtgtacatcgagaagcccagaagcgccgccggcctgagcagcctggtggacctgggcccccccctgatggagaagcaggtgttcgcctacagcaccgccaccatccccaaggacagagagaccagcgagaagatgatgaagaccaccgccaacagaaaccacaccgacagcgccggcaccccccacgtgagcggcggcaagatgctgagcgccctggagagcaccgtgccccccagccagcccccccccgtgggcaccagcgccatccacatgagcctgctggagatgagaagaagcgtggccgagctgagactgcagctgcagcagatgagacagctgcagctgcagaaccaggagctgctgagagccatgatgaagaaggccgagctggagatcagcggcaaggtgatggagaccatgaagagactggaggaccccgtgcagagacagagagtgctggtggagcaggagagacagaagtacctgcacgaggaggagaagatcgtgaagaagctgtgcgagctggaggacttcgtggaggacctgaagaaggacagcaccgccgccagcagactggtgaccctgaaggacgtggaggacggcgccttcctgctgagacaggtgggcgaggccgtggccaccctgaagggcgagttccccaccctgcagaacaagatgagagccatcctgagaatcgaggtggaggccgtgagattcctgaaggaggagccccacaagctggacagcctgctgaagagagtgagaagcatgaccgacgtgctgaccatgctgagaagacacgtgaccgacggcctgctgaagggcaccgacgccgcccaggccgcccagtacatggccatggagaaggccaccgccgccgaggtgctgaagagccaggaggaggccgcccacaccagcggccagcccttccacagcaccggcgcccccggcgacgccaagagcgaggtggtgcccctgagcggcatgatggtgagacacgcccagagcagccccgtggtgatccagcccagccagcacagcgtggccctgctgaaccccgcccagaacctgccccacgtggccagcagccccgccgtgccccaggaggccaccagcaccctgcagatgagccaggccccccagagcccccagatccccatgaacggcagcgccatgcagagcctgttcatcgaggagatccacagcgtgagcgccaagaacagagccgtgagcatcgagaaggccgagaagaagtgggaggagaagagacagaacctggaccactacaacggcaaggagttcgagaagctgctggaggaggcccaggccaacatcatgaagagcatccccaacctggagatgccccccgccaccggccccctgcccagaggcgacgcccccgtggacaaggtggagctgagcgaggacagccccaacagcgagcaggacctggagaagctgggcggcaagagcccccccccccccccccccccccccagaagaagctacctgcccggcagcggcctgaccaccaccagaagcggcgacgtggtgtacaccggcagaaaggagaacatcaccgccaaggccagcagcgaggacgccggccccagcccccagaccagagccaccaagtaccccgccgaggagcccgccagcgcctggacccccagccccccccccgtgaccaccagcagcagcaaggacgaggaggaggaggaggaggagggcgacaagatcatggccgagctgcaggccttccagaagtgcagcttcatggacgtgaacagcaacagccacgccgagcccagcagagccgacagccacgtgaaggacaccagaagcggcgccaccgtgccccccaaggagaagaagggcagcagcggcgccccccagaccagcagaatgcccgtgcccatgagcgccaagaacagacccggcaccctggacaagcccggcaagcagagcaagctgcaggaccccagacagtacagacaggccaacggcagcgccaagaagagcggcggcgacttcaagcccaccagccccagcctgcccgccagcaagatccccgccctgagccccagcagcggcaagagcagcagcctgcccagcagcagcggcgacagcagcaacctgcccaacccccccgccaccaagcccagcatcgccagcaaccccctgagcccccagaccggcccccccgcccacagcgccagcctgatccccagcgtgagcaacggcagcctgaagttccagagcctgacccacaccggcaagggccaccacctgagcttcagcccccagagccagaacggcagagcccccccccccctgagcttcagcagcagcccccccagccccgccagcagcgtgagcctgaaccagggcgccaagggcaccagaaccatccacacccccagcctgaccagctacaaggcccagaacggcagcagcagcaaggccacccccagcaccgccaaggagaccagctag

SEQ ID NO: 102596 - DNA, 4050 bp, Artificial Sequence
  derived and/or modified sequence
atggaggagaatgagtcccagaagtgtgaaccttgcctgccatattctgccgaccgccgtcagatgcaggagcagggcaaaggaaatctccacgtcactagccccgaggatgcagagtgtagacgtacgaaggaacgcctgagtaatggcaattcgcgggggtccgtctccaaatcatcccgcaacattccgcggagacacaccttgggcggtccccgatcctctaaagagattctaggtatgcaaacctcagagatggaccgcaagcgcgaggcatttttggaacatctcaaacaaaagtacccacatcacgccagcgcgatcatgggtcaccaggaacggctcagggatcagactcgatcacctaaactttcccattcaccacagccgccaagcctgggtgatcctgtggaacatctttccgaaacttccgcagattcgctcgaggccatgagtgagggcgatgcacccacgccattctcacgcgggagccgtactcgcgcaagtctgcccgtggtgcgatccacaaatcagaccaaggaacggtcattaggggttctttacttgcagtacggcgatgagacaaagcagctgcgcatgcctaacgagataaccagcgctgacacaatcagagcattattcgtaagcgccttcccacagcaattgaccatgaaaatgctcgaaagtccatctgtggccatctacattaaggacgaatcgcgtaacgtatactacgagttaaacgacgtgcgaaacattcaggaccgcagcctcctcaaagtgtacaacaaggacccggcccacgcctttaaccacaccccaaaaaccatgaacggtgacatgagaatgcaacgggagctggtctatgcaagaggggatggccccggagcaccaaggcccggcagcacggctcacccgccccacgccattcccaattctccaccaagcactcccgtgccccattccatgcccccttccccatcccgaatcccatatggggggacccggtcaatggtcgttcctggaaatgctaccatacctcgcgaccgaataagctcgctcccggtgagcaggcctatctcgccatccccttcagcgatattagagcggcgcgatgttaaaccggacgaggacatgtccgggaagaacatcgcgatgtacaggaatgaggggttttacgccgacccttacttgtatcacgaaggccggatgtccattgcctctagtcacggaggacaccccctcgacgtccccgatcacataattgcttaccatcgcaccgccatacgtagcgcttctgcttattgcaaccctagcatgcaggcggaaatgcacatggagcagtctctctaccggcagaaatctcgcaagtacccagatagtcatctaccaacgctgggaagcaagacgcctcctgccagtcctcacagggtctctgatctcaggatgattgacatgcatgcgcattacaatgctcatggcccaccgcacacgatgcagcccgacagagcctcgccaagtaggcaggcctttaaaaaggaaccaggtactctagtttacatcgagaagccgagatccgctgcaggactgagcagcctggtagacctcgggcccccgcttatggaaaaacaggtgtttgcctacagcacagccactatccctaaggatcgcgagacatccgagaaaatgatgaagaccacagcaaacagaaatcatacagattcagcaggcacccctcacgtgagcggcggaaagatgctcagcgccttagagtctacggtccctcccagtcagccccctcctgtgggcacttcggccatccacatgtctcttctggagatgcgccgatcagttgccgagctgagattgcagttgcagcagatgcggcagctccaactacagaaccaggaattgttaagagccatgatgaagaaggccgaattagagatctctggtaaagtgatggaaactatgaaaaggctcgaggacccagtgcaaagacagagagtactcgtggagcaggaaagacaaaagtacttgcacgaggaggaaaagatcgttaaaaagttatgtgagctggaggacttcgtggaggatctaaagaaagactcgacggctgccagccgcctggtgacgttgaaagacgtcgaggacggggccttcctcctgcgtcaggtcggagaagccgtggccactctcaaaggagaattcccaacgctgcagaacaagatgcgggcgatactgcgtatagaagtcgaggcagtccgcttcctgaaagaagaaccacataaactggactcactgctgaagcgagttcgaagcatgacggatgtgttaacaatgctacgccgtcatgttactgacgggttactcaagggcacagacgcggcacaggccgcccagtacatggctatggaaaaggccacggccgctgaagtgctcaagtctcaggaggaagccgcccacacaagcggacagccgttccattccacgggggcccccggggacgccaaaagcgaagttgtcccactgtcaggcatgatggtcagacatgcgcaaagtagtcccgtcgttattcagcccagtcagcatagcgtcgccctgcttaatcctgcccagaatctgcctcacgtggcctcctcccctgccgtaccacaagaggcaacaagtaccttgcagatgagccaagctccacagtcccctcaaatcccaatgaacggaagcgccatgcagagtctgtttatcgaggagatccatagtgtctccgctaaaaatcgggcagtttctatagagaaagcagagaagaagtgggaggaaaaaaggcagaatcttgaccattacaacgggaaagaatttgaaaagctgctggaggaagcacaggctaacatcatgaagagcattccaaatctcgagatgccacctgccactgggcccttgccccgaggggacgcccccgttgacaaagttgaacttagtgaggattcccccaatagcgaacaggatctggaaaagcttggagggaaatcccctccccccccgcccccccccccacggagatcttacctgcccgggagcggattaaccactactcgctccggcgacgtggtgtacacgggtaggaaggaaaacattactgctaaggcaagtagtgaggacgccggaccatccccacagactcgcgctactaagtatcccgcggaagagccagcaagcgcctggacaccttcaccccctccggtgaccacctcctcatctaaggacgaagaggaggaggaagaggagggcgacaagatcatggcagaactccaggcgttccaaaaatgcagctttatggacgtgaattccaattcccatgccgaaccttcgcgtgcagattcacacgtgaaggatacccgaagcggtgccaccgtgccacccaaggagaagaagggtagctccggcgcgcctcagacatcccggatgcccgttcctatgtcagccaagaatagacctggtactcttgataaacctggaaagcagtccaaactacaggacccacgtcagtaccgtcaggccaacggaagcgcgaagaagagcggcggagacttcaaacctacctccccctcactgcctgcaagcaagattccagctctgagtccttcctcagggaaaagctcaagccttccttcctctagcggggatagtagcaacctgcccaatcctcccgccacaaaacccagcatcgcatccaatcctctgtcaccccagactggtccccctgcccactcggcaagtctcatcccaagcgtttctaacgggtccctcaaatttcagagtctgacacatacaggaaaagggcatcacctgtctttctccccccaatcccagaacggcagggcccccccgccccttagtttcagtagtagccctccaagcccggcatcttcagtatccctcaatcagggagccaagggcaccagaacgatacacacgccctccctgacctcttacaaggcacagaatggctcgtccagtaaagccaccccctccacagccaaagaaacctcctag

SEQ ID NO: 102597 - DNA, 6123 bp, Artificial Sequence
  derived and/or modified sequence
ggagagggctgcgcgcttctcgccaagcaagcgggaggcgcactggggccgccgccgttcccgcgctcctccctctcctctgcacccactgtcacgctacccgcccgcgggggagcctcgagagcctccaggtgaattgaaagtcgtttccgggggaggacggagagggtgctgcagtcctggcatgccctgaaactgcaagtcgggcagaaacgacccggcggaggagcagggcgcgcagcgccctgcgcagcatccccgggctgccagaagaggccaccactcggctggcagccgcgagcggcggccgaacctcggccccagactcgggcccccggcacgctcgcccgggagataccccttccccctcttgcgcatttcgcagctgcgctggtgtggggcatgagagcgaggtggctccaggtctccgcggagcagctgccagtgggagagcgaggagaggcgagggggcggcagcctcggcccgaaacggagatcctggggtcctaaatttgtggccgattgcactgtgtcctggagacggagtggaaccacagcccagagcccctgggaatcatccctgaaagactgcattacttctccatggagtcttcctcctcctgcttattttctttttggaacaaggcaaaggcaatctgcatgtaacatcaccagaagatgcagaatgccgcagaaccaaggaacgcctttctaatggaaacagtcgtggttcagtttccaagtcttcccgcaatatcccaaggagacacaccctaggggggccccgaagttccaaggaaatactgggaatgcaaacatctgagatggatcggaagagagaagcgttcctagaacatctgaagcagaagtacccccaccacgcctctgcaatcatgggtcaccaagagaggctgagagaccagacaaggagccccaaactgtctcacagtcctcaaccacccagtctgggtgacccggtcgagcatttatcagagacgtccgctgattctttggaagccatgtctgagggggatgctccaacccctttttccagaggcagccggactcgtgcgagccttcctgtggtgaggtcaaccaaccagacgaaagaaagatctctgggggttctctatctccagtatggagatgaaaccaagcagctcaggatgccgaatgaaatcacaagtgcagacacaatccgtgctctcttcgtaagtgcctttccacagcagctcaccatgaaaatgctggaatcgcccagtgtcgccatttacatcaaagatgaaagcagaaatgtctattatgaattaaatgatgtaaggaacattcaagacagatcactcctcaaagtgtacaacaaggatcctgcacatgcgtttaatcacacaccaaaaactatgaatggagacatgaggatgcagagagaacttgtttatgcaagaggagatggccctggggcccctcgccccggatctactgctcatccaccccatgcgattccaaattccccaccgtctactccagtgccccattccatgcccccctccccgtccagaattccttatgggggcacccgctccatggttgttcctggcaatgccaccatccccagggacagaatctccagcctgccagtctccagacccatctctccaagcccaagcgccattttagaaagaagagatgtcaagcctgatgaagacatgagtggcaaaaacattgcaatgtacagaaatgagggtttctatgctgatccttacctttatcacgagggacggatgagcatagcctcatcccatggtggacacccactggatgtccccgaccacatcattgcatatcaccgcaccgccatccggtcagcgagtgcttattgtaacccctcaatgcaagcggaaatgcatatggaacaatcactgtacagacagaaatcaaggaaatatccggatagccatttgcctacactgggctccaaaacaccccctgcctctcctcacagagtcagtgacctgaggatgatagacatgcacgctcactataatgcccacggcccccctcacaccatgcagccagaccgggcctctccgagccgccaggcctttaaaaaggagccaggcaccttggtgtatatagaaaagccacggagcgctgcaggattatccagccttgtagacctcggccctcctctaatggagaagcaagtttttgcctacagcacggcgacaatacccaaagacagagagaccagagagaggatgcaagccatggagaaacagattgccagtttaactggccttgttcagtctgcgctttttaaagggcccattacaagttatagcaaagatgcgtctagcgagaaaatgatgaaaaccacagccaacaggaaccacacagatagtgcaggaacgccccatgtgtctggtgggaagatgctcagtgctctggagtccacggtgcctcccagccagcctccacctgtgggcacctcagccatccacatgagcctgcttgagatgaggcggagcgtggcggaactcaggctccagctccagcagatgcggcagctccagctgcagaaccaggagttgctgagggcaatgatgaagaaggccgagctggaaatcagtggcaaagtgatggaaacaatgaagagactggaggatcccgtgcagcgacagcgcgtcctagtggagcaagagagacaaaaatatcttcatgaggaagagaagatcgtcaagaagttgtgcgagttggaagactttgttgaagacttgaagaaggactccacggcagccagccgattggttactctgaaagacgtggaagacggggctttcctcctgcgtcaagtgggagaggctgtagctaccctgaaaggagaatttccaaccttacaaaacaagatgcgagccatcctgcgcatagaagtggaggccgtgcggtttctgaaggaggagccacacaagctggacagtctcctgaagcgtgtgcgcagcatgacagacgtcctgaccatgctgcggagacatgtcactgatgggctcctgaaaggcacggacgcagcccaagccgcacagtacatggctatggaaaaggccacagccgcagaagtcctgaagagtcaggaggaggcagcccacacctccggccagcccttccacagcacaggtgcccctggcgatgcgaagtcggaagtggtgcctttgtccggcatgatggttcgccacgcgcagagctcccctgtggtcatccagccctcccagcactccgtggccctgctgaaccctgctcagaacttgcctcacgtggccagctccccagccgtcccccaggaagcaacctccactctgcagatgtcgcaggctccgcagtccccacagatacccatgaatgggtctgccatgcagagcttgttcattgaagaaatccacagtgtgagtgccaagaacagggcagtgtctatcgagaaagcagaaaagaaatgggaggaaaaaaggcaaaatctggatcactataatgggaaagagtttgagaagctcctagaagaagctcaggccaatatcatgaagtcaataccaaatctggagatgccgccagccacaggcccactgccaaggggagatgccccagtggacaaggtggaactttcagaagattctccaaattcggaacaggacttggaaaagctggggggaaagtcgccccctcctcctccgccacctcctcgtcgaagctacctgccaggatcgggactcaccaccacgaggtcaggcgatgtggtctacaccggcagaaaggagaacatcaccgctaaggcaagcagtgaagatgctggaccaagcccacagaccagagctacaaaatatccagcagaggagcctgcttcagcctggaccccatccccaccgcctgtcaccacctcctcctcaaaggatgaggaggaagaagaagaagaaggagacaaaataatggcagaactccagggctccagcggggccccacagacgagcaggatgcctgtccccatgagtgccaagaacagacccggaaccctggacaaacccggcaagcagtccaaactgcaggatccccgccaatatcgtcaggctaatggaagtgctaagaaatctggtggggactttaagcctacttccccctccttacctgcttctaagattccagccctttctcccagctctgggaaaagcagttctctgccctcttctagtggtgacagctctaacctccctaatccacctgctactaaaccatcgattgcttctaaccctctcagcccccaaacaggaccacctgctcactctgcctccctcatcccttctgtctctaatggctctttgaagtttcagagcctcactcatacaggtaaaggtcaccatctttcattctcaccgcagagtcaaaatggccgagcaccccctcctttgtcattttcctcctcccctccttctcctgcctcctccgtctcactgaatcaaggtgccaagggcaccaggaccatccatactcccagcctcaccagctacaaggcacagaatggaagttcaagcaaagccaccccatccacagcaaaagaaacctcttaaaggtcaaatcctattaggcacaagtcggagttacatttaaaaaaaattaacagtctacaacaactgttttcacaagagaatgtaacatattgctgtatcgtttgaggcttaatgctaaatatgtgctaaatactggattaatagatttcagtaaagctcgttcgttttgtttggttttctttttacctagttgctatagtgtctacagtctatactcaatacctataaaatgcagtaagcatgtgttacagaaagaggttctggtgggagagaaaggtgcgtgtgagacaggagaattgtcttaagcatataaaacatgtatgattccagaattttagtatgttttgtataaaactatttttcattacggagactagaagtgaacagagaattacacaagtgtgactatacaaattgtaaaacagatactataatatttccttttattttagtgttatttagctttattacagatttctatttttgtcaaaacttcatggttcctttcaagatcttttttgccaaaacattttgatactatagcattgtacatttgaaagtagtgttctagactataaaaccaatgaacttctacatgagccctacagacaggcatgtgtagaaggcaatttatcaaacctattgcactgccatgaaaagtgtgtataataatttgctagcccaagcaagctagttttctttgcttgcttcttttctttcttttttccttccttttttttttttttttcttttttaacatgttgagattctctagttgttttctttggcgtatctaaccccttcttttgttttctgagacctggtaacccacgctcttgcattgtggattttaaaatgtatactctgtacggttctgtaaaccgaaaaacttttgtaaatatataaatatacatagacataaaaatactgtatgtgacagcacatagagtagttttcccacaccaaagttaatttttatgcatgctttaaaagtatatatcgggaccggcagaaatggaagtatccatacatttttaaaaagcaacaagtttgcacagctagagtgtttttgtaaataaatgtatttgtataacacagtcatgtaatatacagaactataagcagagactttgcaaaactaaataaagggctgcatgcttattattttttgtaccttgtcactataactacttcctagtcaaagaacgaaatgtaactgttaccgagttaaatgtttttccgctttgagggatgtaaccacatccactcagaggacactacttttctgaaagctctggggtgactaatgatgagttcctaataaattaattgcaagtgtggtgccttggatgtggcctgttggctcgctttcttctctgtggcttatcaaggtgtagatgacagaaagcaaacctggatacagagtttccaccctcagttcctggaggggctcttattattttctctctttttaaaaaacttccagtagaagtaaagtggaaataaaatgtctttatca

SEQ ID NO: 102598 - DNA, 4050 bp, Artificial Sequence
  derived and/or modified sequence
atggaggagaatgaaagccagaagtgtgagccctgcctgccctacagcgctgaccggcggcagatgcaggagcagggcaaaggaaacctgcacgtgaccagcccagaagatgctgaatgtagaaggaccaaggagcggctgagcaatggaaacagccggggctctgtgtccaagagcagcaggaacatccccaggaggcacaccctgggcggccccaggagcagcaaggagatcctgggcatgcagaccagcgagatggacaggaagcgggaggccttcctggagcacctgaagcagaagtacccccaccacgccagcgccatcatgggccaccaggagcggctgcgggaccagaccaggagccccaagctgagccacagcccccagccccccagcctgggggaccctgtggagcacctgtctgagaccagcgctgacagcctggaggccatgtctgaaggagatgcccccacccccttcagccggggcagcaggacccgggccagcctgcctgtggtgcgcagcaccaaccagaccaaggagaggagcctgggcgtgctgtacctgcagtatggagatgagaccaagcagctgaggatgcccaatgagatcaccagcgctgacaccatccgggccctgtttgtgtctgccttcccccagcagctgaccatgaagatgctggagagccccagcgtggccatctacatcaaggatgagagcagaaatgtgtactatgagctgaatgatgtgaggaacatccaggacaggagcctgctgaaggtgtacaacaaggaccctgcccacgccttcaaccacacccccaagaccatgaatggagacatgaggatgcagcgggagctggtgtatgcccggggagatggccctggggccccccggcccggcagcacagcccaccccccccacgccatccccaacagcccccccagcacccctgtgccccacagcatgccacccagccccagccgcatcccctacggcggcaccaggtccatggtggtgcctggaaatgccaccatcccccgggaccgcatcagcagcctgcctgtgtcccggcccatcagccccagccccagcgccatcctggagaggagagatgtgaagccagatgaggacatgtctgggaagaacatcgccatgtacagaaatgaaggcttctacgccgacccctacctgtaccacgagggccgcatgagcatcgccagcagccacggcggccaccccctggatgtgcctgaccacatcatcgcctaccacaggacagccatccgcagcgccagcgcctactgcaaccccagcatgcaggccgagatgcacatggagcagagcctgtaccggcagaagagcaggaagtacccagacagccacctgcccaccctgggcagcaagaccccaccagccagcccccaccgggtgtctgacctgaggatgattgacatgcacgcccactacaatgcccacggccccccccacaccatgcagcctgaccgggccagccccagccggcaggccttcaagaaggagcccggcaccctggtgtacatcgagaagcccaggtctgctgctggcctgagcagcctggtggacctgggcccccccctgatggagaagcaggtgtttgcctacagcacagccaccatccccaaggaccgggagaccagcgagaagatgatgaagaccacagccaacagaaaccacacagattctgctggcaccccccacgtgtctgggggcaagatgctgagcgccctggagagcacagtgccccccagccagcccccacctgtgggcaccagcgccatccacatgagcctgctggagatgagaagatctgtggccgagctgcggctgcagctgcagcagatgaggcagctgcagctgcagaaccaggagctgctgcgggccatgatgaagaaggccgagctggagatcagcggcaaggtgatggagaccatgaagaggctggaggaccctgtgcagaggcagagggtgctggtggagcaggagcggcagaagtacctgcacgaggaggagaagatcgtgaagaagctgtgtgagctggaggactttgtggaggacctgaagaaggacagcacagctgccagccggctggtgaccctgaaggatgtggaggatggagccttcctgctgcggcaggtgggggaggccgtggccaccctgaagggggagttccccaccctgcagaacaagatgagggccatcctgcgcatcgaggtggaggccgtgcgcttcctgaaggaggagccccacaagctggacagcctgctgaagagggtgcgctccatgacagatgtgctgaccatgctgcggagacatgtgacagatggcctgctgaagggcacagatgctgcccaggccgcccagtacatggccatggagaaggccacagctgctgaggtgctgaagagccaggaggaggccgcccacaccagcggccagcccttccacagcactggagcccctggagatgccaagtctgaggtggtgcccctgagcggcatgatggtgagacatgcccagagcagccctgtggtgatccagcccagccagcacagcgtggccctgctgaacccagcccagaacctgccccacgtggccagcagccctgctgtgccccaggaggccaccagcaccctgcagatgagccaggccccccagagcccccagatccccatgaatggcagcgccatgcagagcctcttcatcgaggagatccacagcgtgtctgccaagaacagagctgtgtccattgagaaggccgagaagaagtgggaggagaagaggcagaacctggaccactacaacgggaaggagtttgagaagctgctggaggaggcccaggccaacatcatgaagagcatccccaacctggagatgcccccagccaccggccccctgcccagaggagatgcccctgtggacaaggtggagctgtctgaggacagccccaacagcgagcaggacctggagaagctgggcggcaagagccccccacctcctcctcctccaccccggcgcagctacctgcccggcagcggcctgaccaccaccaggtctggagatgtggtgtacacaggcaggaaggagaacatcacagccaaggccagcagtgaagatgctggccccagcccccagacccgggccaccaagtacccagctgaggagcccgccagcgcctggacccccagccccccacctgtgaccaccagcagcagcaaggatgaggaggaggaggaggaggagggggacaagatcatggccgagctgcaggccttccagaagtgcagcttcatggatgtgaacagcaacagccatgctgagcccagcagagctgacagccacgtgaaggacaccaggtctggggccaccgtgccccccaaggagaagaagggcagcagcggggccccccagaccagcaggatgcctgtgcccatgtctgccaagaaccggcccggcaccctggacaagccaggcaagcagagcaagctgcaggacccccggcagtaccggcaggccaacggcagcgccaagaagagcggcggggacttcaagcccaccagccccagcctgcctgccagcaagatcccagccctgagccccagcagcggcaagagcagcagcctgcccagcagcagcggggacagcagcaacctgcccaaccccccagccaccaagcccagcatcgccagcaaccccctgagcccccagacaggccccccagcccacagcgccagcctcatccccagcgtgtccaatggcagcctgaagttccagagcctgacccacacaggcaagggccaccacctgtccttcagcccccagagccagaatggccgggcccccccacccctgtccttcagcagcagcccccccagccctgccagctctgtgtccctgaaccagggcgccaagggcaccaggaccatccacacccccagcctgaccagctacaaggcccagaatggcagcagcagcaaggccacccccagcacagccaaggagaccagctag

SEQ ID NO: 102599 - DNA, 4050 bp, Artificial Sequence
  derived and/or modified sequence
atggaggagaacgagagccagaagtgcgagccctgcctgccctacagtgcggaccggcgtcaaatgcaggaacaggggaaggggaatctccacgtaacaagccccgaggacgcagagtgccgcaggactaaagagagactcagcaacggtaatagccgagggtctgtctccaaatcctccaggaatataccccgaagacataccctaggcggcccccggtcctccaaagagattctcgggatgcagaccagtgagatggatcgtaaacgagaggccttcctggagcacctgaagcagaaatacccccatcatgcctcagcaattatggggcatcaagagcggcttagggaccagacaagaagtcctaaactgagccacagcccgcagccaccttctctgggagatccagtggagcatctaagcgagactagtgccgattccttggaggcaatgtcagagggggatgctcctacaccattcagccgcgggagccgcacccgcgctagtctccctgtggtgaggagcaccaatcagacaaaagaacgaagtttaggcgtcttgtacctgcagtacggggacgagaccaagcaacttcgaatgcccaatgaaatcacgtctgcagatacgatccgggcactcttcgttagcgcttttcctcaacagctgacaatgaagatgctcgagagcccaagcgtggccatctacatcaaggatgagtcgcggaatgtgtactacgagctgaacgatgtgaggaacatccaggatcgctctctgcttaaagtctacaacaaagaccccgcccatgcattcaatcatacacctaagacgatgaacggcgatatgaggatgcagcgagagttagtatatgcgaggggggacggtcctggagcccctaggcctggaagcaccgctcacccaccccacgctattccgaacagccctccgagtaccccggtgccacattccatgcccccctccccgtcgcggatcccatacggcgggaccagatctatggtggtgcccgggaatgcaactattcctcgagacaggataagctcactcccagtgagtcgcccgatttccccctctcccagcgcaatactggagcgacgggatgtcaagcctgacgaggatatgtccgggaagaacattgctatgtatcgcaacgaaggcttttacgccgatccatatttgtaccacgaggggcgcatgtcaattgctagctcccacgggggccaccctcttgatgttcccgaccacattattgcctatcatcgtacagcaattcgtagcgcctccgcatactgcaacccgtccatgcaggccgagatgcacatggagcaatctctgtacagacagaagtcccggaaataccctgacagccatctgccaacgctgggatcaaagacgccacccgccagcccgcatcgggtaagcgacctgagaatgatagatatgcacgcccactataacgctcacggaccccctcacacaatgcaacccgaccgcgcaagcccgagtaggcaagccttcaagaaagagccaggaactttggtttacatagagaagcccagaagcgctgctgggctcagcagcctcgtagatctgggtccaccattaatggagaagcaagtgtttgcgtattccacggccactattcctaaggaccgcgagaccagtgaaaaaatgatgaagaccacagctaaccggaaccacactgatagcgcagggacaccacatgtctcgggcggaaagatgcttagcgccctagaatctaccgtgcccccctcccagccgccacccgtaggaacaagtgccattcacatgagccttcttgaaatgcgccgtagcgtggccgagctgaggcttcagttgcagcaaatgagacagttacaactccagaatcaagagttgctccgggctatgatgaagaaagccgagcttgagatttctggaaaggtaatggaaacaatgaaacgcttggaggaccctgtacagaggcagagagtgctggtagaacaagagagacagaagtatttgcacgaagaggagaaaatcgtgaagaaattgtgtgagcttgaagactttgttgaggacctgaagaaggacagcactgccgctagtaggctagtaacactcaaggacgtcgaggatggggcatttctgctcaggcaagtaggtgaggctgtagcaacgttgaagggggaattccctactctgcaaaataagatgcgcgctatcttgaggatcgaggtggaggccgttcgcttcctcaaggaggagccacacaaactggattcactcttgaaacgagttagaagtatgaccgatgtgctgacgatgctgagacgacatgtgacagatggcctcctgaagggaaccgacgctgcccaggccgcacagtacatggcaatggaaaaagccacagctgctgaagtcctcaagtcccaagaagaagccgcgcacacatcgggtcaaccattccattctactggtgccccaggggacgccaagtccgaggttgtgcctctatctgggatgatggtccgacatgcccagagctctcctgtcgtgatccaacccagccagcacagtgtggccctgctcaaccctgcccaaaatctacctcacgtcgcctcctctcctgcagtaccacaagaagccactagtacactacagatgagccaagctccccagagcccacagatacccatgaacgggtccgctatgcagtctctgttcatagaggaaatccactccgtgagtgctaaaaacagagcagtctcaatcgagaaagccgagaagaagtgggaagagaaaagacagaacttggaccactacaatgggaaggaatttgagaaactgctggaggaagcacaagccaacatcatgaaatcgatcccaaacctggagatgccacccgccaccgggcccctaccccgaggcgacgccccggttgataaggtagagctgtctgaggacagtcccaactctgagcaagacctggagaaactaggtggcaaaagcccgccccctccgccccctcccccccgccgctcctacctccccgggtccgggctgactaccacaagatcaggcgacgtggtatacaccggacgcaaagagaatataaccgctaaggcaagttcagaggacgcaggcccttctccacagacaagggctacgaagtaccccgctgaggagccagcatccgcgtggactcccagcccccctcctgtgactacgtcttccagtaaagatgaagaagaggaggaagaggagggtgataagatcatggccgaactccaggctttccaaaagtgcagtttcatggacgtcaattccaactcccatgctgaacctagccgcgcggactcgcacgtgaaggataccaggtccggcgccaccgtgcctcccaaggagaagaagggatcgtccggggcaccacagacaagccgaatgccagtccccatgtccgccaaaaacagaccaggcactctggacaaacccggcaaacagtctaaattacaggacccacgacagtatagacaggccaatggctctgccaagaagtctggcggtgattttaagcccacttctcctagcctgccagcatccaagatcccagcgctcagcccaagttctggcaaaagcagcagtctcccctcatcctcaggtgacagtagcaatctgcctaaccctcccgccaccaagcccagtatcgcctctaatccactctctccccagactggccccccggcacattccgcctcactcatcccttctgtgagtaacggttcactcaaatttcaaagtttgacccacacagggaaggggcatcatctgagcttcagcccccaatcccaaaatgggcgagccccaccacctctatccttctctagcagccctccatcaccagcctcatctgtgtccctgaatcagggagccaaaggaacaaggaccatacacactccctctctcacaagctacaaagcgcagaacggttcctcatcaaaagccaccccctcaaccgccaaagagacctcatag

SEQ ID NO: 102600 - DNA, 4050 bp, Artificial Sequence
  derived and/or modified sequence
atggaggaaaacgagtcccaaaagtgtgagccatgcctgccctattctgctgataggcggcagatgcaagagcaaggcaagggcaatcttcatgtcactagccctgaggatgcagagtgccggagaacaaaagaacggttgtctaacgggaactcgaggggatctgtgagcaagtcaagccgaaatatcccgcgacgccatacgctgggcggacctcggagcagcaaggaaattctgggcatgcagaccagcgagatggatcgcaagagggaggcctttctcgagcaccttaaacagaagtatccacatcatgctagtgcgattatgggacaccaggagaggctgcgcgatcagaccaggagcccaaagctgtcgcactccccccagcccccatcattaggggaccccgtggagcatctgtcagagacctctgccgattctctggaggctatgtccgaaggcgatgccccaacaccgtttagccggggtagccgcacgcgcgctagcctgcctgtagtgcggtctactaatcaaaccaaagaaagatctctgggcgtgttatatctccagtacggcgatgagactaaacagctgaggatgcctaatgaaattacttcagccgacaccattagagccctgtttgtgtcagctttcccccagcagttaaccatgaaaatgttggagagcccttctgtggctatttatatcaaagatgagtcccgaaatgtgtactacgagctaaatgacgtgaggaatattcaggatagatccttgttaaaggtgtacaataaggaccctgcgcatgccttcaatcacacgccgaaaaccatgaatggtgatatgcggatgcagcgggaactggtttacgcccgtggcgatgggcctggggcacccagacccggttccacagctcatcctccacatgctattccgaactcccccccatcaacacctgtgcctcatagtatgccgccaagcccatcacgaatcccatacggcggaacacgctcaatggtagttccagggaacgccactatccctcgcgatcggatatcttccctccccgtgtcaaggcccatctcaccgagcccgagcgccatcctggagcggagagatgttaaaccagatgaggatatgagtgggaagaacatcgccatgtaccgaaacgaaggcttctacgctgacccctatctttaccacgagggcaggatgtctatcgccagttctcacggtggccatccattggatgtgcccgatcacatcatagcttaccaccgcactgctatcagatctgcgagtgcttactgcaaccccagcatgcaggccgaaatgcacatggagcagtcactgtatagacagaagagcagaaaatacccagacagtcatctgccaaccctaggctccaaaacacctcctgcatctccccacagggtttccgatctaagaatgatagatatgcatgctcactacaatgcacacgggcctcctcacactatgcagccagatcgcgcttcaccatccagacaagcctttaagaaagaacctggtacccttgtgtatatagagaagccccgatccgccgctggcctgagtagcctggttgacctggggccaccgctgatggaaaaacaggtgttcgcatacagcactgccacaattcccaaagatagagagacaagtgagaaaatgatgaaaactacagctaaccgcaaccacacggactccgctggcacccctcacgtttccggcggtaaaatgctatccgcacttgaatccaccgtgccaccatcccagccacccccagtgggcacctcagccatacatatgagcctgctggagatgcgcaggagcgtcgccgagcttcggttacagctccaacagatgagacagttgcaactccagaaccaggagttattgcgtgccatgatgaaaaaggccgaattggagataagcgggaaggtgatggaaaccatgaagagactggaggatcctgtccagcgtcagcgggtgctcgtggagcaggagcgccagaaatacctgcacgaggaagaaaaaatcgttaaaaagctctgcgaactggaggactttgtcgaggatctcaagaaggactctaccgcggcttcgagactggtgacattgaaagatgtggaagatggagcatttcttcttaggcaagtcggtgaggccgtggctacactcaagggtgaatttccaactctacagaataagatgcgggcaatcctgcgtatagaagtcgaggccgtccgattcctcaaagaggagcctcacaagctcgattctcttctgaagcgagtccgaagcatgaccgacgtgctgaccatgcttcgaagacacgtgacagacggcctgttgaagggtacggacgcagcccaggccgcacagtacatggctatggaaaaggctaccgccgctgaagtgctgaagtcgcaggaagaggccgcacataccagtggccagccttttcacagtaccggcgctcctggggacgcaaagtccgaagtggtgcccctttctggcatgatggtccgccatgcccaaagcagccctgtcgtaattcagccatctcagcactccgtggctctgcttaaccctgcacaaaacctgcctcacgtcgcgtctagccccgctgtgccacaggaggcaaccagcaccctgcagatgtcgcaggcaccccagtccccacagataccgatgaacggtagcgcaatgcagagtctatttatagaggaaatacactcggtctccgccaagaaccgagccgtctctatcgaaaaagccgagaagaaatgggaggagaagcgacaaaacttggatcattacaatggtaaggagttcgagaaactactggaagaggcgcaggctaacatcatgaaatcaattccaaacctcgaaatgcctcctgctaccgggccactgcccaggggcgacgcccctgttgacaaagtggaactgagcgaagactctcccaactctgaacaggatctcgagaaactcggcggtaaaagcccaccgccaccccctccaccgcctaggcgctcttacctgcccggttcagggctgaccactacccgatctggggacgttgtgtacacaggccgaaaggagaacataacagcaaaagcctcctccgaagatgcgggaccaagcccgcagacccgcgctacaaaatacccagcagaggaaccagcctcagcttggactccctcgccaccccctgtgacaacatcatcctctaaagacgaagaggaggaggaggaagaaggagataagatcatggctgaactgcaggcttttcagaagtgctctttcatggacgttaatagtaactcccatgccgagccatcaagagcggattcccatgtcaaagatactaggtccggagcaacagttccgcctaaagagaaaaaggggtctagcggcgctccccagacatctcgcatgcccgtgccaatgtcagcaaaaaatagacctgggacccttgataaaccgggaaagcagtctaaattgcaggatcccagacagtaccggcaggctaatgggtccgccaaaaagagcggcggagatttcaagcctacttcaccctcactacctgcatcgaaaatcccagctttgtcccccagctccgggaagtcatcatctctgcccagcagctctggggactcaagtaatcttcccaatcccccagctacaaagccatccattgcatcgaatcccttatccccacagacaggacccccagctcacagtgcatcacttatccctagcgtgtccaacgggtccttgaaattccagtctcttacccatactggcaaaggccatcacctgtcatttagcccacagagccaaaacggaagggcacctcctccccttagcttctcttcgagcccaccatccccggctagttctgtgagcctgaatcagggggcaaagggcacccgcaccatacataccccctctctgacgtcgtacaaagcccaaaatggttccagctcgaaggccactcctagcaccgccaaagaaacatcctag

SEQ ID NO: 102601 - DNA, 5971 bp, Artificial Sequence
  derived and/or modified sequence
agagcctcggtggtttgcagcagtggaaccaggcaggcccagttgtgggtaggagaggccgtcacctgttgaggcctcccccccacacccccgcatcgccctgccctggcagagcccagcccccagtccccggagagcgcgcctgaggacggacggacggacggacggacagacctagggacggagggccaggggcaggggagatccaagaggccccgcgctggaatgcagttttctcgggcgagggagactttgcaccggagtggaaaatagtttggggtggggtttcgcaccgtcccctcctccccagccccgggccccctcccaggcgctttctgggagcttttagaactgcgctctgaagtttccagagagcgaggagcttttgcggcaggcagagacaatggaagaaaatgaaagccagaaatgtgagccgtgccttccttactcagcagacagaagacagatgcaggaacaaggcaaaggcaatctgcatgtaacatcaccagaagatgcagaatgccgcagaaccaaggaacgcctttctaatggaaacagtcgtggttcagtttccaagtcttcccgcaatatcccaaggagacacaccctaggggggccccgaagttccaaggaaatactgggaatgcaaacatctgagatggatcggaagagagaagcgttcctagaacatctgaagcagaagtacccccaccacgcctctgcaatcatgggtcaccaagagaggctgagagaccagacaaggagccccaaactgtctcacagtcctcaaccacccagtctgggtgacccggtcgagcatttatcagagacgtccgctgattctttggaagccatgtctgagggggatgctccaacccctttttccagaggcagccggactcgtgcgagccttcctgtggtgaggtcaaccaaccagacgaaagaaagatctctgggggttctctatctccagtatggagatgaaaccaagcagctcaggatgccgaatgaaatcacaagtgcagacacaatccgtgctctcttcgtaagtgcctttccacagcagctcaccatgaaaatgctggaatcgcccagtgtcgccatttacatcaaagatgaaagcagaaatgtctattatgaattaaatgatgtaaggaacattcaagacagatcactcctcaaagtgtacaacaaggatcctgcacatgcgtttaatcacacaccaaaaactatgaatggagacatgaggatgcagagagaacttgtttatgcaagaggagatggccctggggcccctcgccccggatctactgctcatccaccccatgcgattccaaattccccaccgtctactccagtgccccattccatgcccccctccccgtccagaattccttatgggggcacccgctccatggttgttcctggcaatgccaccatccccagggacagaatctccagcctgccagtctccagacccatctctccaagcccaagcgccattttagaaagaagagatgtcaagcctgatgaagacatgagtggcaaaaacattgcaatgtacagaaatgagggtttctatgctgatccttacctttatcacgagggacggatgagcatagcctcatcccatggtggacacccactggatgtccccgaccacatcattgcatatcaccgcaccgccatccggtcagcgagtgcttattgtaacccctcaatgcaagcggaaatgcatatggaacaatcactgtacagacagaaatcaaggaaatatccggatagccatttgcctacactgggctccaaaacaccccctgcctctcctcacagagtcagtgacctgaggatgatagacatgcacgctcactataatgcccacggcccccctcacaccatgcagccagaccgggcctctccgagccgccaggcctttaaaaaggagccaggcaccttggtgtatatagaaaagccacggagcgctgcaggattatccagccttgtagacctcggccctcctctaatggagaagcaagtttttgcctacagcacggcgacaatacccaaagacagagagaccagcgagaaaatgatgaaaaccacagccaacaggaaccacacagatagtgcaggaacgccccatgtgtctggtgggaagatgctcagtgctctggagtccacggtgcctcccagccagcctccacctgtgggcacctcagccatccacatgagcctgcttgagatgaggcggagcgtggcggaactcaggctccagctccagcagatgcggcagctccagctgcagaaccaggagttgctgagggcaatgatgaagaaggccgagctggaaatcagtggcaaagtgatggaaacaatgaagagactggaggatcccgtgcagcgacagcgcgtcctagtggagcaagagagacaaaaatatcttcatgaggaagagaagatcgtcaagaagttgtgcgagttggaagactttgttgaagacttgaagaaggactccacggcagccagccgattggttactctgaaagacgtggaagacggggctttcctcctgcgtcaagtgggagaggctgtagctaccctgaaaggagaatttccaaccttacaaaacaagatgcgagccatcctgcgcatagaagtggaggccgtgcggtttctgaaggaggagccacacaagctggacagtctcctgaagcgtgtgcgcagcatgacagacgtcctgaccatgctgcggagacatgtcactgatgggctcctgaaaggcacggacgcagcccaagccgcacagtacatggctatggaaaaggccacagccgcagaagtcctgaagagtcaggaggaggcagcccacacctccggccagcccttccacagcacaggtgcccctggcgatgcgaagtcggaagtggtgcctttgtccggcatgatggttcgccacgcgcagagctcccctgtggtcatccagccctcccagcactccgtggccctgctgaaccctgctcagaacttgcctcacgtggccagctccccagccgtcccccaggaagcaacctccactctgcagatgtcgcaggctccgcagtccccacagatacccatgaatgggtctgccatgcagagcttgttcattgaagaaatccacagtgtgagtgccaagaacagggcagtgtctatcgagaaagcagaaaagaaatgggaggaaaaaaggcaaaatctggatcactataatgggaaagagtttgagaagctcctagaagaagctcaggccaatatcatgaagtcaataccaaatctggagatgccgccagccacaggcccactgccaaggggagatgccccagtggacaaggtggaactttcagaagattctccaaattcggaacaggacttggaaaagctggggggaaagtcgccccctcctcctccgccacctcctcgtcgaagctacctgccaggatcgggactcaccaccacgaggtcaggcgatgtggtctacaccggcagaaaggagaacatcaccgctaaggcaagcagtgaagatgctggaccaagcccacagaccagagctacaaaatatccagcagaggagcctgcttcagcctggaccccatccccaccgcctgtcaccacctcctcctcaaaggatgaggaggaagaagaagaagaaggagacaaaataatggcagaactccaggcattccagaagtgttcctttatggatgtaaattcaaacagtcatgctgagccatcccgggctgacagtcacgttaaagacactaggtcgggcgccacagtgccacccaaggagaagaagggctccagcggggccccacagacgagcaggatgcctgtccccatgagtgccaagaacagacccggaaccctggacaaacccggcaagcagtccaaactgcaggatccccgccaatatcgtcaggctaatggaagtgctaagaaatctggtggggactttaagcctacttccccctccttacctgcttctaagattccagccctttctcccagctctgggaaaagcagttctctgccctcttctagtggtgacagctctaacctccctaatccacctgctactaaaccatcgattgcttctaaccctctcagcccccaaacaggaccacctgctcactctgcctccctcatcccttctgtctctaatggctctttgaagtttcagagcctcactcatacaggtaaaggtcaccatctttcattctcaccgcagagtcaaaatggccgagcaccccctcctttgtcattttcctcctcccctccttctcctgcctcctccgtctcactgaatcaaggtgccaagggcaccaggaccatccatactcccagcctcaccagctacaaggcacagaatggaagttcaagcaaagccaccccatccacagcaaaagaaacctcttaaaggtcaaatcctattaggcacaagtcggagttacatttaaaaaaaattaacagtctacaacaactgttttcacaagagaatgtaacatattgctgtatcgtttgaggcttaatgctaaatatgtgctaaatactggattaatagatttcagtaaagctcgttcgttttgtttggttttctttttacctagttgctatagtgtctacagtctatactcaatacctataaaatgcagtaagcatgtgttacagaaagaggttctggtgggagagaaaggtgcgtgtgagacaggagaattgtcttaagcatataaaacatgtatgattccagaattttagtatgttttgtataaaactatttttcattacggagactagaagtgaacagagaattacacaagtgtgactatacaaattgtaaaacagatactataatatttccttttattttagtgttatttagctttattacagatttctatttttgtcaaaacttcatggttcctttcaagatcttttttgccaaaacattttgatactatagcattgtacatttgaaagtagtgttctagactataaaaccaatgaacttctacatgagccctacagacaggcatgtgtagaaggcaatttatcaaacctattgcactgccatgaaaagtgtgtataataatttgctagcccaagcaagctagttttctttgcttgcttcttttctttcttttttccttccttttttttttttttttcttttttaacatgttgagattctctagttgttttctttggcgtatctaaccccttcttttgttttctgagacctggtaacccacgctcttgcattgtggattttaaaatgtatactctgtacggttctgtaaaccgaaaaacttttgtaaatatataaatatacatagacataaaaatactgtatgtgacagcacatagagtagttttcccacaccaaagttaatttttatgcatgctttaaaagtatatatcgggaccggcagaaatggaagtatccatacatttttaaaaagcaacaagtttgcacagctagagtgtttttgtaaataaatgtatttgtataacacagtcatgtaatatacagaactataagcagagactttgcaaaactaaataaagggctgcatgcttattattttttgtaccttgtcactataactacttcctagtcaaagaacgaaatgtaactgttaccgagttaaatgtttttccgctttgagggatgtaaccacatccactcagaggacactacttttctgaaagctctggggtgactaatgatgagttcctaataaattaattgcaagtgtggtgccttggatgtggcctgttggctcgctttcttctctgtggcttatcaaggtgtagatgacagaaagcaaacctggatacagagtttccaccctcagttcctggaggggctcttattattttctctctttttaaaaaacttccagtagaagtaaagtggaaataaaatgtctttatc

SEQ ID NO: 102602 - DNA, 3228 bp, Artificial Sequence
  derived and/or modified sequence
ggcaagcagtcgggacgggagcgcgggcgtccgcggtggctgcagtcccgtcggtctccctgctgtccggcgcgagctcttcgagtcttgcttgggatgtttcagcagcccctgagaaggaagaggaggaagctgagggcccgctgagggcgcaggacctgagggagtcctacatccagctcgtccagggtgtgcaggagtggcaggatggttgcatgtaccagggggagtttgggttgaacatgaagcttggatatggcaaattctcttggcccacaggcgagtcataccatgggcagttttaccgggaccactgccatggcctgggtacctacatgtggccagatggctccagtttcacgggcacattttacctcagccaccgagaaggctacggcaccatgtacatgaagacacggcttttccaggggctatacaaagcggaccagcggtttgggccaggtgtcgagacctaccccgatggcagccaggacgtggggctgtggttccgagagcagctcatcaagctgtgcacccagatccccagtggcttctccctcctcagataccctgagttctccagcttcatcacccacagccctgccaggatcagcctctcagaagaggagaaaacggagtggggactgcaggagggacaggatccctttttctatgactataagcggtttcttctgaatgacaacctaacgctgcctccagaaatgtatgtctactcgaccaacagtgaccacctgcccatgacaagctctttccgcaaagagctggacgcccgcatcttcctcaatgaaattcctccgttcgttgaggatggagaaccatggttcataatcaatgagacccctttgttggtcaaaatccagaagcaaacttacaagttcaggaacaagccagctcacaccagctggaacatgggcgccatcctggaggggaagcgcagtggctttgcaccctgtgggcccaaagagcaactttccatggagatgatcctaaaggctgaggaagggaaccacgaatggatttgtaggatcctgaaggacaactttgctagtgctgacgtggcggacgcaaagggctacactgtgcttgctgcggctgctactcactgccacaacgacattgtcaaccttctcctggactgtggggccgacgtgaacaagtgctcagatgagggtctcacggcactcagcatgtgtttcctcctccactaccccgcccagtccttcaagcccaatgttgctgaacggaccatacctgagccccaggaacctccaaaattcccagttgttccaatcctttcatcatcatttatggacacaaacctggagtctctgtactatgaggtgaacgtgccttcccagggtagctatgagctgaggccaccgccagcaccactgctcctgccacgcgtctcaggcagccacgagggcggccacttccaggacaccgggcagtgtggggggtccatagaccacaggagcagctctctgaagggggactccccgttggtgaagggcagccttggccatgtggaaagcgggcttgaggacgtgttgggaaacacagaccggggcagtctgtgcagtgctgagacgaaatttgagtccaacgtgtgtgtgtgcgacttctccatcgagctctcgcaggccatgctggagagaagcgcccagtcccacagcttgctgaagatggcctcgccctcaccgtgcaccagcagcttcgacaaagggaccatgcggaggatggcgctgtccatgatcgagcggaggaagcgctggcggaccatcaagctgctgctgcgccggggcgcggaccccaacctgtgctgcgtgcccatgcaggtcctgttccttgctgtgaaggccggggacgtggatggggtgaggctgctgctggagcacggggcgaggaccgacatctgctttccgccgcagctgagcaccctgacaccactccacatcgctgccgcccttcctggggaggagggggtacagattgtggagctgctgttgcatgccatcaccgatgtggacgccaaggcatccgacgaggacgacacttacaagcccggcaagctggacctgctgccctcaagtctgaagctcagcaatgagccaggccctccccaagcctactacagcacggacacagccctcccggaggaggggggcaggacggctctgcacatggcctgcgagcgggaggatgacaacaagtgtgccagggacatagtccggctccttctatcccacggagcaaatcctaacctgctgtggagtggccactccccgctctccctgtccattgccagtgggaatgagctggttgtgaaggagctcctgacccagggagctgaccccaacctgcccctgaccaaaggcttgggcagtgccctgtgtgttgcctgtgacctgacctacgagcaccagaggaacatggacagcaagctggccctgattgaccgactcatcagtcacggggccgacatcctgaagcctgtaatgctcaggcagggagaaaaggaggcagtgggcacagccgtggactatggctacttcagattcttccaggaccggaggattgcccgctgccccttccacacgctgatgccagcagagcgcgagacgttcctggcgcggaagcggctcctggagtacatgggcttgcagctacggcaggctgtctttgccaaggagagccagtgggaccccacgtggctgtacctgtgcaagagagcggagctgatccccagccacaggatgaagaagaagggccccagcctgcccaggggcctggatgtgaaggagcaggggcaaattcccttcttcaagttctgctaccagtgtggccgctccatcggggtccgcctcttgccctgccctcgctgctacgggatcctgacctgcagcaagtactgcaagaccaaggcctggaccgagttccacaagaaggactgcggggacctggtggccatcgtgacacaactggagcaagtttccaggaggagagaagaattccagtgaagcagcagctgcacgtccgaggcttggggaggacccaggactgtgtgggtttcttacctgcctgagccacctcagggaatcttccagcctaatgcaggcatttctgcacctttggggtcatgctttgtagcagtgtctcccttgcgacctcgcaataaattggccccacggggtgattttgacagtc

SEQ ID NO: 102603 - protein, 1135 aa, Artificial Sequence
  derived and/or modified sequence
MDPGSRWRNLPSGPSLKHLTDPSYGIPREQQKAALQELTRAHVESFNYAVHEGLGLAVQAIPPFEFAFKDERISFTILDAVISPPTVPKGTICKEANVYPAECRGRRSTYRGKLTADINWAVNGISKGIIKQFLGYVPIMVKSKLCNLRNLPPQALIEHHEEAEEMGGYFIINGIEKVIRMLIMPRRNFPIAMIRPKWKTRGPGYTQYGVSMHCVREEHSAVNMNLHYLENGTVMLNFIYRKELFFLPLGFALKALVSFSDYQIFQELIKGKEDDSFLRNSVSQMLRIVMEEGCSTQKQVLNYLGECFRVKLNVPDWYPNEQAAEFLFNQCICIHLKSNTEKFYMLCLMTRKLFALAKGECMEDNPDSLVNQEVLTPGQLFLMFLKEKLEGWLVSIKIAFDKKAQKTSVSMNTDNLMRIFTMGIDLTKPFEYLFATGNLRSKTGLGLLQDSGLCVVADKLNFIRYLSHFRCVHRGADFAKMRTTTVRRLLPESWGFLCPVHTPDGEPCGLMNHLTAVCEVVTQFVYTASIPALLCNLGVTPIDGAPHRSYSECYPVLLDGVMVGWVDKDLAPGIADSLRHFKVLREKRIPPWMEVVLIPMTGKPSLYPGLFLFTTPCRLVRPVQNLALGKEELIGTMEQIFMNVAIFEDEVFAGVTTHQELFPHSLLSVIANFIPFSDHNQSPRNMYQCQMGKQTMGFPLLTYQDRSDNKLYRLQTPQSPLVRPSMYDYYDMDNYPIGTNAIVAVISYTGYDMEDAMIVNKASWERGFAHGSVYKSEFIDLSEKIKQGDSSLVFGIKPGDPRVLQKLDDDGLPFIGAKLQYGDPYYSYLNLNTGESFVMYYKSKENCVVDNIKVCSNDTGSGKFKCVCITMRVPRNPTIGDKFASRHGQKGILSRLWPAEDMPFTESGMVPDILFNPHGFPSRMTIGMLIESMAGKSAALHGLCHDATPFIFSEENSALEYFGEMLKAAGYNFYGTERLYSGISGLELEADIFIGVVYYQRLRHMVSDKFQVRTTGARDRVTNQPIGGRNVQGGIRFGEMERDALLAHGTSFLLHDRLFNCSDRSVAHVCVKCGSLLSPLLEKPPPSWSAMRNRKYNCTLCSRSDTIDTVSVPYVFRYFVAELAAMNIKVKLDVV

SEQ ID NO: 102604 - protein, 1173 aa, Artificial Sequence
  derived and/or modified sequence
MRAKEAAETGLRPLLPACTERLASGVYRETGVRCAGGHMDPGSRWRNLPSGPSLKHLTDPSYGIPREQQKAALQELTRAHVESFNYAVHEGLGLAVQAIPPFEFAFKDERISFTILDAVISPPTVPKGTICKEANVYPAECRGRRSTYRGKLTADINWAVNGISKGIIKQFLGYVPIMVKSKLCNLRNLPPQALIEHHEEAEEMGGYFIINGIEKVIRMLIMPRRNFPIAMIRPKWKTRGPGYTQYGVSMHCVREEHSAVNMNLHYLENGTVMLNFIYRKELFFLPLGFALKALVSFSDYQIFQELIKGKEDDSFLRNSVSQMLRIVMEEGCSTQKQVLNYLGECFRVKLNVPDWYPNEQAAEFLFNQCICIHLKSNTEKFYMLCLMTRKLFALAKGECMEDNPDSLVNQEVLTPGQLFLMFLKEKLEGWLVSIKIAFDKKAQKTSVSMNTDNLMRIFTMGIDLTKPFEYLFATGNLRSKTGLGLLQDSGLCVVADKLNFIRYLSHFRCVHRGADFAKMRTTTVRRLLPESWGFLCPVHTPDGEPCGLMNHLTAVCEVVTQFVYTASIPALLCNLGVTPIDGAPHRSYSECYPVLLDGVMVGWVDKDLAPGIADSLRHFKVLREKRIPPWMEVVLIPMTGKPSLYPGLFLFTTPCRLVRPVQNLALGKEELIGTMEQIFMNVAIFEDEVFAGVTTHQELFPHSLLSVIANFIPFSDHNQSPRNMYQCQMGKQTMGFPLLTYQDRSDNKLYRLQTPQSPLVRPSMYDYYDMDNYPIGTNAIVAVISYTGYDMEDAMIVNKASWERGFAHGSVYKSEFIDLSEKIKQGDSSLVFGIKPGDPRVLQKLDDDGLPFIGAKLQYGDPYYSYLNLNTGESFVMYYKSKENCVVDNIKVCSNDTGSGKFKCVCITMRVPRNPTIGDKFASRHGQKGILSRLWPAEDMPFTESGMVPDILFNPHGFPSRMTIGMLIESMAGKSAALHGLCHDATPFIFSEENSALEYFGEMLKAAGYNFYGTERLYSGISGLELEADIFIGVVYYQRLRHMVSDKFQVRTTGARDRVTNQPIGGRNVQGGIRFGEMERDALLAHGTSFLLHDRLFNCSDRSVAHVCVKCGSLLSPLLEKPPPSWSAMRNRKYNCTLCSRSDTIDTVSVPYVFRYFVAELAAMNIKVKLDVV

SEQ ID NO: 102605 - DNA, 3522 bp, Artificial Sequence
  derived and/or modified sequence
atgagggccaaagaggccgccgaaaccggcttacgcccactgctgcctgcatgcactgaacgtctggcttcgggagtctatcgggagaccggagtgagatgtgctgggggacacatggatccaggttctcggtggaggaaccttccctccggaccaagcctgaagcacctgactgacccttcatatggaatccctagggaacagcagaaggccgcactgcaggaattgactcgggctcacgttgaatcctttaactatgcggtacacgaggggttggggctagccgtgcaagcaatcccacctttcgagtttgccttcaaagatgaacgcatcagtttcaccatcttggacgcggtgatttcaccccctaccgtcccaaagggcaccatctgcaaagaggctaacgtttaccccgctgaatgccgaggcagacgctcaacataccggggcaaactgactgccgacatcaactgggcagtgaatggtatcagtaaagggattattaaacagttcctgggttacgtaccaatcatggtcaagtctaaactctgtaatctgagaaatctccccccacaagcgcttatagagcaccacgaagaagccgaggaaatgggcggttattttattattaacgggattgagaaggtcatccggatgttgatcatgccccgccgcaactttccgatagcaatgatcagaccaaaatggaaaacacgcggccccggctatacacaatacggagtgagtatgcattgcgtgagggaggaacactccgcagtgaacatgaacttgcattacctggagaatggcacggttatgctgaattttatttatcggaaagagctgtttttcctgcctctgggtttcgccctgaaagccctggttagtttctccgactatcagatattccaggagctgataaagggtaaggaagacgacagcttcctgcggaattccgtgtctcagatgctaagaattgtgatggaagaagggtgctccacacaaaagcaagtactcaactacttgggtgagtgtttcagggtaaagcttaatgttcctgactggtatcctaacgagcaggccgccgagttcctcttcaaccagtgtatctgtatccatttgaaaagtaacaccgaaaagttctatatgctttgccttatgaccagaaagctgtttgctctagcaaagggagagtgcatggaggataatcccgacagcctcgtgaatcaagaagtcctgacacccggtcagctcttcctgatgttcttgaaggagaagctggagggatggctagtgtccatcaaaatcgcattcgataaaaaggcccagaagaccagtgtctccatgaatacagacaatcttatgcggatttttacaatggggatcgaccttacgaaacccttcgagtatctatttgcgacaggtaacctgaggtctaagaccggcctgggcctgcttcaggattccggactgtgcgtggttgctgacaaactaaactttattcgatatcttagtcattttcgttgtgtgcacagaggggctgatttcgctaagatgaggacaaccacagtgcgtcgcctgctgcccgaaagctgggggttcctctgccctgtacacacacccgatggagagccgtgtggtctaatgaaccacctgacagcagtgtgtgaggttgtcacccagtttgtctatactgccagcatacccgctctgctgtgcaacctgggtgtgactcccattgacggggcaccacataggagttattctgaatgttatcccgtgttgctggacggcgtgatggtgggctgggtggataaggacctggcaccaggtattgccgactctctcaggcacttcaaggttttgagggagaagcgcatcccgccctggatggaagttgtcctaatcccgatgactggaaagccatcgttgtatcctggtctctttctcttcaccacaccttgccgccttgtgcgaccagttcagaacttagcattgggcaaggaagaactgattggaaccatggagcagatctttatgaatgtggccatattcgaggacgaagtgtttgcaggcgtcactacccatcaggaactctttcctcactcactgttgtcagtgattgccaattttatccctttcagcgaccataaccagtctcctcgtaatatgtaccaatgtcaaatgggaaagcagacaatgggattcccactgctcacctatcaagaccggtcagataataagctctatcgcctgcagacgcctcagtctcctctggtgagaccttcaatgtacgactattatgatatggacaattaccccattggcactaacgctatcgtggctgtgatctcttatacgggatatgacatggaagatgctatgatagttaacaaggcctcctgggagcgggggtttgctcacggaagtgtatacaaatccgagtttattgatctgtcagagaaaataaagcagggcgactcttccctcgtctttgggattaagcctggggaccctcgggtgctgcagaaactcgacgacgacggcttaccattcatcggcgctaagctgcaatacggagatccatactactcctacctgaacctgaacacaggggaatcttttgtgatgtattacaaatccaaagaaaattgcgtcgtggacaatataaaagtttgttcaaacgacacagggtccggcaagttcaagtgtgtatgtatcacaatgagggtgccccgcaaccccacgatcggggataaattcgcctctcggcatgggcagaaaggaattctgagcagactttggcctgccgaggacatgcccttcacggagtccggcatggtcccggatatcctctttaacccccatgggtttcccagtcgaatgacaatcggtatgcttatagaatccatggccggaaagtccgctgccttgcatggtctgtgtcatgacgccactccattcatcttcagcgaggagaacagcgccttggagtacttcggcgaaatgctgaaggcagcggggtacaacttctacggaacggagaggctctatagtggtataagtggcctagaactggaagctgacatctttatcggcgtcgtgtattatcagaggctgcgacacatggtgtcagataagttccaagtgaggacaacaggcgcccgcgatcgggtgactaaccagcctatcgggggtagaaacgtccagggcgggattcgttttggtgagatggaacgtgacgccctgctcgctcatggaacaagctttctgctccatgatagactatttaactgctccgaccggtcagtggcacacgtctgcgtgaagtgcggttcattgctgtccccccttctggagaagccccccccctcatggtccgccatgagaaacagaaagtacaactgcaccctgtgctcccgatctgataccatagatacagtctcagtgccatatgttttcaggtatttcgttgccgagcttgcagccatgaatataaaggtcaagctggacgtggtctag

SEQ ID NO: 102606 - DNA, 3522 bp, Artificial Sequence
  derived and/or modified sequence
atgagggccaaggaggccgctgagaccggcctgcggcccctgctgcctgcctgcacagagcggctggccagcggcgtgtaccgggagaccggggtgcgctgtgccggcggccacatggaccccggcagccgctggaggaacctgcccagcggccccagcctgaagcacctgacagaccccagctatggcatcccccgggagcagcagaaggccgccctgcaggagctgacccgggcccacgtggagagcttcaactatgctgtgcatgagggcctgggcctggccgtgcaggccatccccccatttgaatttgccttcaaggatgagcgcatctccttcaccatcctggatgctgtgatcagcccccccaccgtgcccaagggcaccatctgcaaggaggccaacgtgtacccagctgagtgccggggccgccgcagcacctaccggggcaagctgacagctgacatcaactgggccgtgaatggcatcagcaagggcatcatcaagcagttcctgggctacgtgcccatcatggtgaagagcaagctgtgcaacctgaggaacctgcccccccaggccctgattgagcaccacgaggaggccgaggagatgggcggctacttcatcatcaatggaattgagaaggtgatccgcatgctgatcatgcccaggaggaacttccccatcgccatgatccggcccaagtggaagacccggggccctggctacacccagtatggagtgtccatgcactgtgtgcgggaggagcacagcgctgtgaacatgaacctgcactacctggagaatggaacagtgatgctgaacttcatctacaggaaggagctgttcttcctgcccctgggctttgccctgaaggccctggtgtccttcagtgactaccagatcttccaggagctgatcaagggcaaggaggatgacagcttcctgagaaattctgtgtcccagatgctgcgcatcgtgatggaggagggctgcagcacccagaagcaggtgctgaactacctgggggagtgcttccgggtgaagctgaatgtgcctgactggtacccaaatgagcaggccgctgagttcctgttcaaccagtgcatctgcatccacctgaagagcaacacagagaagttctacatgctgtgcctgatgaccaggaagctgtttgccctggccaagggggagtgcatggaggacaacccagacagcctggtgaaccaggaggtgctgaccccaggccagctgttcctgatgttcctgaaggagaagctggagggctggctggtgtccatcaagatcgcctttgacaagaaggcccagaagacctctgtgtccatgaacacagacaacctgatgaggatcttcaccatgggcatcgacctgaccaagccctttgagtacctgtttgccaccggcaacctgcggagcaagacaggcctgggcctgctgcaggacagcggcctgtgtgtggtggccgacaagctgaacttcatccgctacctgagccacttccgctgtgtgcacagaggagctgactttgccaagatgaggaccaccaccgtgcggcggctgctgcctgagagctggggcttcctgtgccctgtgcacaccccagatggagagccctgtggcctgatgaaccacctgacagctgtgtgtgaggtggtgacccagtttgtgtacacagccagcatcccagccctgctgtgcaacctgggcgtgacccccattgatggagccccccacaggagctacagcgagtgctaccctgtgctgctggatggagtgatggtgggctgggtggacaaggacctggcccctggcattgctgacagcctgcggcacttcaaggtgctgcgggagaagaggatccccccctggatggaggtggtgctgatccccatgaccgggaagcccagcctgtacccaggcctcttcctgttcaccaccccctgccgcctggtgcggcctgtgcagaacctggccctgggcaaggaggagctgattggcaccatggagcagatcttcatgaatgtggccatctttgaagatgaggtgtttgctggggtgaccacccaccaggagctgttcccccacagcctgctgagcgtcatcgccaacttcatccccttcagtgaccacaaccagagccccaggaacatgtaccagtgccagatgggcaagcagaccatgggcttccccctgctgacctaccaggacagaagtgacaacaagctgtaccgcctgcagaccccccagagccccctggtgcggcccagcatgtatgactactatgacatggacaactaccccatcggcaccaatgccatcgtggccgtcatctcctacacaggctatgacatggaggatgccatgattgtgaacaaggcctcctgggagcggggctttgcccacggctctgtgtacaagtctgagttcatcgacctgtctgagaagatcaagcagggcgacagcagcctggtgtttggcatcaagccaggggacccccgggtgctgcagaagctggatgatgatggcctgcccttcatcggggccaagctgcagtatggagacccctactacagctacctgaacctgaacacaggagagagctttgtgatgtactacaagagcaaagaaaactgtgtggtggacaacatcaaggtgtgcagcaatgacaccggcagcggcaagttcaagtgtgtgtgcatcaccatgagggtgcccaggaaccccaccatcggggacaagtttgccagcagacatggccagaagggcatcctgagccggctgtggccagctgaggacatgcccttcacagaaagtggcatggtgcctgacatcctcttcaacccccacggcttccccagcaggatgaccatcggcatgctgattgagagcatggccggcaagtctgctgccctgcacggcctgtgccatgatgccacccccttcatcttctctgaagaaaattctgccctggagtactttggagagatgctgaaggctgctggctacaacttctacggcacagagcggctgtacagcggcatcagcggcctggagctggaggccgacatcttcatcggcgtggtgtactaccagaggctgcggcacatggtgtctgacaagttccaggtgaggaccactggagcccgggacagagtgaccaaccagcccatcggcggcagaaatgtgcagggcggcatccgctttggagagatggagagagatgccctgctggcccacggcaccagcttcctgctgcatgacaggctcttcaactgcagcgacagatctgtggcccacgtgtgtgtgaagtgtggcagcctgctgagccccctgctggagaagcccccacccagctggagcgccatgaggaacaggaagtacaactgcaccctgtgcagcagaagtgacaccatcgacacagtgtctgtgccctacgtgttccgctactttgtggccgagctggccgccatgaacatcaaggtgaagctggatgtggtgtag

SEQ ID NO: 102607 - DNA, 4558 bp, Artificial Sequence
  derived and/or modified sequence
agatgcgacgaggttagcggggcccgaccactccttggcttcccaggggtgagcctcgcgagttaggagttgggtagagagtcagcccggggcccggcatccgctttttcgttgaagcaacgactttggccggatgactccccagggtcggcatcagcgtgggactgggaacaggtgaagggaaacagaagagagcctgagaagaccgctctcctccgatcctaattgactgagccaatgagagccaaagaggtcacatgctcaactgggcggggagcgggtttccacctgcggcatctttcgcgagcggggagatgagtggggcggaatatgggagaaagggagggcccgccacgctctggctggacacggccttaatcggcccgttcactcgacgtttttggttctacgttgaccccgagaaaccgaaaccgcagggcctagggcgggtggaacgagagggaactacatttcccagcaggctgcggaaacgggactgcggccactacttccggcgtgtaccgagagactggcgtccggcgtgtaccgagagactggcgtccggtgtgcaggtggccacatggatcctggcagccggtggcggaacctgcccagcgggcctagcctaaagcacttgactgacccctcttatggaatcccgcgggaacagcaaaaggcagcgttgcaggagctgacgcgggcgcacgtggagtccttcaactacgctgtgcacgagggtctcggcctcgcggtgcaggctatacctccctttgaatttgctttcaaagatgagcgtatctcttttactattctggatgctgttatcagtccacctacagttccaaaagggaccatctgcaaagaggccaatgtttatccagcagaatgccggggccgaaggagtacctaccgtgggaagttgacagctgatatcaactgggcagtgaatggaatctcaaaaggaatcattaagcagtttcttggctatgttcccatcatggtgaaatccaagctttgcaacttacgtaaccttcccccacaagccctcattgagcaccatgaggaggcagaggaaatggggggctattttataatcaatggcattgaaaaagtcatccgaatgttgattatgcctcggagaaattttcccattgcaatgataagaccaaaatggaaaaccagagggcctggttatactcagtatggagtttcaatgcactgtgtgagggaagaacattccgctgtcaatatgaacctccactacttggaaaatggcactgttatgttgaactttatttaccgaaaagaactgttctttcttcctttgggatttgcacttaaggcacttgtcagcttttctgattatcagatctttcaggagctcatcaaaggaaaagaggatgattctttccttaggaactctgtttctcagatgttaaggattgtaatggaagagggttgttcgacacaaaaacaggtccttaactacctaggtgaatgcttcagagtaaaactcaatgttcctgactggtacccaaatgagcaagctgcggagttcctgtttaaccagtgcatctgtatccacttgaaatccaatactgaaaagttttatatgctttgtctcatgacgcgaaagctctttgctttagccaaaggagagtgcatggaggacaatcctgatagtttggtgaaccaggaagtcctcacaccgggtcagctcttccttatgttcctgaaggaaaaactggaaggttggttagtgtctattaaaatagcttttgataagaaggctcagaagaccagtgtttccatgaacactgacaatttgatgaggatttttacaatgggcatagaccttacaaaaccatttgaatacctttttgctactgggaatctgcgttctaaaacaggtcttggcctcctacaagattctggactttgtgttgtggctgacaagctgaacttcatacgctacctctcccatttccgctgcgtgcacagaggggctgattttgccaagatgaggaccaccacagtacgcaggctgctgccagagtcctggggcttcctttgtcccgtgcataccccagacggggagccctgtggcctgatgaaccacctaactgccgtatgtgaggttgtcacacagtttgtgtatacggcatctattccagctttactgtgcaacttgggggtcactcccattgatggagctccccaccgatcatacagtgagtgctaccctgtcctgctggacggtgtcatggttggctgggtggataaggatcttgctccaggcatcgcagattctcttcgtcattttaaggtgttgagagagaaaagaattcctccctggatggaagtggtccttatacccatgacaggaaaaccaagtctgtacccaggattgttcctttttaccactccttgtagactggtacggcctgtgcagaacttagcattgggcaaagaagagctaattggaactatggaacagatcttcatgaatgtcgctatctttgaggatgaagtttttgctggagttaccacacaccaggaactctttccacacagcctgctgagtgtgattgccaacttcatccctttctctgatcacaaccagagtccacggaacatgtaccaatgccagatgggtaagcaaactatgggctttccacttctcacttatcaagaccgatcggataacaaactgtatcgtcttcagactcctcagagtcccttggtgagaccctccatgtatgattattatgacatggataactatccaattgggaccaatgccatcgttgctgtgatttcttacactggctatgatatggaagatgccatgattgtgaataaggcctcttgggaacgaggctttgcccatggaagtgtctacaagtctgagttcatagacctctctgaaaaaattaaacaaggagatagtagcctggtgtttggcatcaaacctggtgacccacgcgttctgcagaagttagatgacgatggattgccgtttataggagcaaaactgcagtacggagatccgtattacagctacctcaacctcaacaccggggaaagttttgtgatgtactataagagtaaagaaaattgtgttgtggataacatcaaagtgtgcagtaatgacactgggagtggaaaattcaagtgtgtttgcatcactatgagagtgcctcggaacccaactatcggagataaatttgccagtcgccatgggcagaagggcattttaagcagattgtggccggctgaggacatgccttttactgagagtgggatggtcccagacattctgttcaatccccatggttttccatcccgcatgaccattgggatgttaattgagagtatggccgggaagtctgcagctttgcatggtctctgccatgatgctacacccttcatcttctcagaggagaactcggccttagaatactttggtgagatgttaaaggctgctggctacaatttctatggcaccgagaggttatatagtggcatcagtgggctagaactggaagcagacatcttcataggagtggtttattatcagcgcttacgccatatggtctcagacaaatttcaagtaaggacaactggagcccgagacagagtcaccaaccagcctattgggggaagaaatgtccagggtggaatccgttttggggagatggaacgggatgcgcttttagctcatggtacatcttttctccttcatgaccgcctcttcaactgctcagatcggtcggtagcccatgtgtgtgtgaagtgtggcagtttactctctccactgttggagaagccacccccttcttggtctgccatgcgcaacagaaaatacaactgtactctgtgtagtcgcagtgacactatcgatactgtttctgtgccttatgtttttcggtattttgtagctgaactggcagctatgaacatcaaagtgaaactggatgttgtttaacttgatgttgaccttttggattaagaggactatcagattaaagcaaaatgtaattttaattcaatgaagatatcattaccaggttactcttgagatttttcaacggtgttagaactctcaaccaagacctgaaaaccaagtatgcaaggtttctgaatctctctggtagattaactattgacaatgattttctgttatctttgttcaaaaagttcatgtcttctcaaaatatgaaatattgataaatggaagagcatacggtgacaagtctcctttccaaccccaggttccctacaccctgctctcagcaggcagtgagtgtcacacacctgttaatccatcttgagcaggacagtactatacaaatagaatgcaagctgtaatgtaattttatattttcttatagccacgttgaagtaaaaacaaacaggtacagtgttttttaccagctttatagaagtacagttgttacatatttaatgaatacaatttgatgggtctgactatatgcacacacctttgataccatcaccacaatcagggtaataaacatacctgtcatctccacaa

SEQ ID NO: 102608 - DNA, 572 bp, Artificial Sequence
  derived and/or modified sequence
gactttggccggatgactccccagggtcggcatcagcgtgggactgggaacaggtgaagggaaacagaagagagcctgagaagaccgctctcctccgatcctaattgactgagccaatgagagccaaagaggctgcggaaacgggactgcggccactacttccggcgtgtaccgagagactggcgtccggcgtgtaccgagagactggcgtccggtgtgcaggtggccacatggatcctggcagccggtggcggaacctgcccagcgggcctagcctaaagcacttgactgacccctcttatggaatcccgcgggaacagcaaaaggcagcgttgcaggagctgacgcgggcgcacgtggagtccttcaactacgctgtgcacgagggtctcggcctcgcggtgcaggctatacctccctttgaatttgctttcaaagatgagcgtatctcttttactattctggatgctgttatcagtccacctacagttccaaaagggaccatctgcaaagaggccaatgtttatccagcagaatgccggggccgaaggagtacctaccgtgggaagttg

SEQ ID NO: 102609 - DNA, 555 bp, Artificial Sequence
  derived and/or modified sequence
tttttcgttgaagcaacgactttggccggatgactccccagggtcggcatcagcgtgggactgggaacaggctgcggaaacgggactgcggccactacttccggcgtgtaccgagagactggcgtccggcgtgtaccgagagactggcgtccggtgtgcaggtggccacatggatcctggcagccggtggcggaacctgcccagcgggcctagcctaaagcacttgactgacccctcttatggaatcccgcgggaacagcaaaaggcagcgttgcaggagctgacgcgggcgcacgtggagtccttcaactacgctgtgcacgagggtctcggcctcgcggtgcaggctatacctccctttgaatttgctttcaaagatgagcgtatctcttttactattctggatgctgttatcagtccacctacagttccaaaagggaccatctgcaaagaggccaatgtttatccagcagaatgccggggccgaaggagtacctaccgtgggaagttgacagctgatatcaactgggcagtgaatggaatctcaaaaggaat

SEQ ID NO: 102610 - DNA, 4059 bp, Artificial Sequence
  derived and/or modified sequence
gactttggccggatgactccccagggtcggcatcagcgtgggactgggaacaggtgaagggaaacagaagagagcctgagaagaccgctctcctccgatcctaattgactgagccaatgagagccaaagaggctgcggaaacgggactgcggccactacttccggcgtgtaccgagagactggcgtccggcgtgtaccgagagactggcgtccggtgtgcaggtggccacatggatcctggcagccggtggcggaacctgcccagcgggcctagcctaaagcacttgactgacccctcttatggaatcccgcgggaacagcaaaaggcagcgttgcaggagctgacgcgggcgcacgtggagtccttcaactacgctgtgcacgagggtctcggcctcgcggtgcaggctatacctccctttgaatttgctttcaaagatgagcgtatctcttttactattctggatgctgttatcagtccacctacagttccaaaagggaccatctgcaaagaggccaatgtttatccagcagaatgccggggccgaaggagtacctaccgtgggaagttgacagctgatatcaactgggcagtgaatggaatctcaaaaggaatcattaagcagtttcttggctatgttcccatcatggtgaaatccaagctttgcaacttacgtaaccttcccccacaagccctcattgagcaccatgaggaggcagaggaaatggggggctattttataatcaatggcattgaaaaagtcatccgaatgttgattatgcctcggagaaattttcccattgcaatgataagaccaaaatggaaaaccagagggcctggttatactcagtatggagtttcaatgcactgtgtgagggaagaacattccgctgtcaatatgaacctccactacttggaaaatggcactgttatgttgaactttatttaccgaaaagaactgttctttcttcctttgggatttgcacttaaggcacttgtcagcttttctgattatcagatctttcaggagctcatcaaaggaaaagaggatgattctttccttaggaactctgtttctcagatgttaaggattgtaatggaagagggttgttcgacacaaaaacaggtccttaactacctaggtgaatgcttcagagtaaaactcaatgttcctgactggtacccaaatgagcaagctgcggagttcctgtttaaccagtgcatctgtatccacttgaaatccaatactgaaaagttttatatgctttgtctcatgacgcgaaagctctttgctttagccaaaggagagtgcatggaggacaatcctgatagtttggtgaaccaggaagtcctcacaccgggtcagctcttccttatgttcctgaaggaaaaactggaaggttggttagtgtctattaaaatagcttttgataagaaggctcagaagaccagtgtttccatgaacactgacaatttgatgaggatttttacaatgggcatagaccttacaaaaccatttgaatacctttttgctactgggaatctgcgttctaaaacaggtcttggcctcctacaagattctggactttgtgttgtggctgacaagctgaacttcatacgctacctctcccatttccgctgcgtgcacagaggggctgattttgccaagatgaggaccaccacagtacgcaggctgctgccagagtcctggggcttcctttgtcccgtgcataccccagacggggagccctgtggcctgatgaaccacctaactgccgtatgtgaggttgtcacacagtttgtgtatacggcatctattccagctttactgtgcaacttgggggtcactcccattgatggagctccccaccgatcatacagtgagtgctaccctgtcctgctggacggtgtcatggttggctgggtggataaggatcttgctccaggcatcgcagattctcttcgtcattttaaggtgttgagagagaaaagaattcctccctggatggaagtggtccttatacccatgacaggaaaaccaagtctgtacccaggattgttcctttttaccactccttgtagactggtacggcctgtgcagaacttagcattgggcaaagaagagctaattggaactatggaacagatcttcatgaatgtcgctatctttgaggatgaagtttttgctggagttaccacacaccaggaactctttccacacagcctgctgagtgtgattgccaacttcatccctttctctgatcacaaccagagtccacggaacatgtaccaatgccagatgggtaagcaaactatgggctttccacttctcacttatcaagaccgatcggataacaaactgtatcgtcttcagactcctcagagtcccttggtgagaccctccatgtatgattattatgacatggataactatccaattgggaccaatgccatcgttgctgtgatttcttacactggctatgatatggaagatgccatgattgtgaataaggcctcttgggaacgaggctttgcccatggaagtgtctacaagtctgagttcatagacctctctgaaaaaattaaacaaggagatagtagcctggtgtttggcatcaaacctggtgacccacgcgttctgcagaagttagatgacgatggattgccgtttataggagcaaaactgcagtacggagatccgtattacagctacctcaacctcaacaccggggaaagttttgtgatgtactataagagtaaagaaaattgtgttgtggataacatcaaagtgtgcagtaatgacactgggagtggaaaattcaagtgtgtttgcatcactatgagagtgcctcggaacccaactatcggagataaatttgccagtcgccatgggcagaagggcattttaagcagattgtggccggctgaggacatgccttttactgagagtgggatggtcccagacattctgttcaatccccatggttttccatcccgcatgaccattgggatgttaattgagagtatggccgggaagtctgcagctttgcatggtctctgccatgatgctacacccttcatcttctcagaggagaactcggccttagaatactttggtgagatgttaaaggctgctggctacaatttctatggcaccgagaggttatatagtggcatcagtgggctagaactggaagcagacatcttcataggagtggtttattatcagcgcttacgccatatggtctcagacaaatttcaagtaaggacaactggagcccgagacagagtcaccaaccagcctattgggggaagaaatgtccagggtggaatccgttttggggagatggaacgggatgcgcttttagctcatggtacatcttttctccttcatgaccgcctcttcaactgctcagatcggtcggtagcccatgtgtgtgtgaagtgtggcagtttactctctccactgttggagaagccacccccttcttggtctgccatgcgcaacagaaaatacaactgtactctgtgtagtcgcagtgacactatcgatactgtttctgtgccttatgtttttcggtattttgtagctgaactggcagctatgaacatcaaagtgaaactggatgttgtttaacttgatgttgaccttttggattaagaggactatcagattaaagcaaaatgtaattttaattcaatgaagatatcattaccaggttactcttgagatttttcaacggtgttagaactctcaaccaagacctgaaaaccaagtatgcaaggtttctgaatctctctggtagattaactattgacaatgattttctgttatctttgttcaaaaagttcatgtcttctcaaaatatgaaatattgataaatggaagagcatacggtgacaagtctcctttccaaccccaggttccctacaccctgctctcagcaggcagtgagtgtcacacacctgttaatccatcttgagcaggacagtactatacaaatagaatgcaagctgtaatgtaattttatattttcttatagccacgttgaagtaaa

SEQ ID NO: 102611 - DNA, 3522 bp, Artificial Sequence
  derived and/or modified sequence
atgcgggccaaggaggccgccgagaccggcctgcggcccctgctgccggcctgtactgagagactagcctctggagtatacagagaaactggcgtgcggtgcgctggcggtcatatggaccctgggtccagatggcggaatctcccttccggaccttcactcaaacatcttaccgatccttcatatggtatcccaagggaacagcagaaggccgccctgcaagagctgaccagggcccatgttgagtcatttaactacgcagtccacgaaggactgggacttgccgtgcaagcaattccccccttcgagttcgccttcaaggacgaacggatatcctttactattcttgacgcggtcatctcacctcctaccgtacccaaaggcaccatctgcaaggaagcgaacgtttatcccgctgaatgtcggggcagacggtctacgtatcgggggaagttgacagctgacattaactgggccgtgaatggaattagcaagggcatcattaaacagttcctgggttatgtcccaatcatggtcaagtccaagctctgcaatctccgcaacctccccccacaggccttgatcgagcaccacgaggaggcagaagagatgggcggctacttcattatcaatggaattgagaaagtgatccggatgttgataatgcctcgccgaaatttcccaattgctatgattcgtcccaagtggaaaactcggggaccggggtacactcaatatggcgtctccatgcactgtgtgagggaagagcactcagcagtgaatatgaacctgcattacctggagaacgggactgtaatgctaaatttcatctacagaaaggagctttttttcctgcccctaggtttcgctctgaaggccttagtctctttctcagactaccagatctttcaggagctgatcaaaggaaaagaggatgattctttcctgaggaactcggtttctcagatgctgcgaatcgttatggaggaggggtgctccactcagaagcaagttctgaactacttaggagaatgtttccgcgtcaagttaaatgtgccggactggtatccaaatgaacaggccgccgaattcctgttcaaccagtgcatctgtatccacttgaagagcaacaccgagaaattctacatgctgtgcctcatgacaagaaagctgttcgctctggctaaaggcgagtgcatggaagacaaccctgacagcttggttaaccaagaggtgctgacacctggtcagctattcctgatgtttctgaaggagaaattggaagggtggctggtgagtatcaaaatagctttcgataaaaaggcgcaaaagactagtgtaagcatgaacactgacaatcttatgagaatatttaccatgggcattgacttgacaaaacccttcgaatacctgtttgccacgggcaacctgcggtccaagacggggctggggctgctgcaggactccggcttatgtgttgtggcagataagctcaacttcattagatatttatcacattttcggtgcgttcatcgtggggctgacttcgcgaagatgcgaacaactaccgtacgacgcctactgcccgaatcatggggctttctgtgtcctgttcatactccagatggtgaaccttgtggtcttatgaaccatttaactgctgtatgcgaagtggtaacccagttcgtgtacactgctagcatcccggctctgttgtgtaacctaggtgtgaccccaatcgacggcgcccctcatcggagctattcagaatgttaccccgttctcctggatggcgtcatggtggggtgggtggataaggatctcgccccagggatagctgactccctcaggcactttaaggtacttcgcgagaagagaatccctccatggatggaagtcgtgctgatccccatgaccggcaagccctctctctacccaggactgtttctgtttacaacgccatgcagactggtgcggcctgttcaaaacctggccttggggaaagaagagctgattggcaccatggagcagatctttatgaacgtggcgattttcgaggatgaagtgttcgctggtgtgaccacacaccaggaactattcccccacagtctactgtctgtcatcgcgaattttatacccttctccgaccacaatcaatcaccacggaatatgtatcagtgtcagatgggtaaacagacaatggggtttccactgttaacctatcaggatcgctccgataacaaactgtacagactacagaccccccagtcaccactggtgaggcccagtatgtatgactactatgacatggataattatcccatcggtactaacgccattgttgccgtcatcagctatacaggttatgatatggaggatgccatgatagtaaataaagccagctgggagcgtggcttcgcccacggatctgtctacaagagcgagttcatcgatctgagtgagaaaattaagcagggagattcttctctggtatttggcattaagcctggcgaccccagagtcttgcagaaactggatgatgacggactgccatttataggtgctaaactgcaatatggggacccctactattcctatctgaatctcaacaccggcgaatcatttgttatgtattacaaaagtaaagagaattgcgtcgtggataacatcaaagtctgctccaacgataccggcagcggcaagtttaaatgtgtctgcatcactatgcgcgtccctagaaacccaacaattggagataagttcgccagcagacacgggcagaagggtattttaagccggctttggcctgctgaagatatgccattcaccgagtctggtatggtgcccgacatactgtttaaccctcacggatttcctagtagaatgacaattggtatgttaatcgaatctatggccggcaagtcagccgccctgcacgggctctgtcacgatgccacccccttcatcttttctgaagaaaacagtgccttggagtatttcggggagatgctgaaagccgctggatataatttctatggtaccgaacggttatactctggaataagcggattagagctcgaggcagacatttttatcggagttgtatactaccagagattgagacacatggtgtcggataaatttcaggtgaggaccacaggagcacgggaccgcgtaaccaatcagcccattggagggcgcaacgtccagggagggatacgcttcggcgaaatggagcgagacgcacttctggcccacggaaccagcttcctgctgcacgacagactatttaactgcagcgatcgaagcgtggcacacgtatgcgtgaagtgtggctccctgctgagccctttgttggagaagcctccacctagttggagcgctatgcgcaaccgaaagtataattgcactctgtgctcaagaagcgataccatcgatactgtgtcagttccatacgttttcaggtattttgttgctgaactggctgccatgaatatcaaggtgaagctggatgttgtgtag

SEQ ID NO: 102612 - DNA, 3522 bp, Artificial Sequence
  derived and/or modified sequence
atgcgggctaaggaagcagcagaaacagggctcagaccattactgccagcctgcaccgagaggcttgcttctggggtctatcgcgagaccggcgtgcggtgcgctggcggtcacatggaccccggtagtcgctggaggaacctcccctccggtcccagcctcaagcatcttacagatccctcctacggcatcccccgagagcagcaaaaagcagctctgcaggagttgacaagggctcacgtggaaagttttaactacgccgtgcatgaggggctcggccttgctgtgcaagctattccaccttttgagtttgcttttaaagacgagagaatatcctttaccatcctggacgccgtgatcagccctccaaccgtgcccaagggcaccatttgcaaagaggccaacgtctatccagccgaatgccgcggtcgacgaagcacataccgtggcaaattgaccgccgacatcaactgggccgtgaatggaatcagcaagggcatcataaaacagttccttggatacgtgccgataatggttaagtccaaactctgcaatctgcgcaatctcccccctcaggccctgatcgagcaccatgaggaagctgaagaaatggggggatattttatcatcaatggtattgagaaggtcatccggatgctcataatgcctaggaggaattttcccatagccatgatccgcccaaagtggaagaccaggggacccggttatacccaatacggcgtttccatgcattgcgtcagagaagagcatagcgcagtgaacatgaatctgcactaccttgagaacggcactgtgatgttgaacttcatctatcgcaaggagctgtttttcctaccgctggggtttgctttaaaagctctggtttccttttcagactaccagatattccaggagttgataaaaggaaaggaggacgactcctttctgcggaattccgtttcccagatgctgcggattgttatggaggaaggctgctcaacacagaaacaggtcctgaattatctgggtgagtgttttagagtcaagttgaacgttcccgactggtacccaaatgaacaggccgctgaattcttgtttaaccagtgcatctgcatccacttaaagtccaacacagagaagttctacatgctttgcctaatgactcgcaagctgttcgccttagccaagggagagtgcatggaagacaacccagactccctagtgaatcaggaggtcttgaccccgggacagctgttcctgatgttccttaaggagaagcttgaaggctggctggtgtccatcaagatcgctttcgataagaaagctcagaagacaagcgtaagcatgaacacagacaacctcatgcgcatcttcacaatgggaattgatttaacaaaaccttttgagtatctcttcgcgactggtaacctccgttcgaagacgggcttagggctgttacaagacagcggcttatgcgtggtggcagacaaactgaactttattcgttacctgagccatttccgatgcgtgcaccgcggagcggattttgcgaagatgaggacaaccacagtccgacgccttctccccgagtcctggggcttcctctgtcccgtgcacactccggacggggaaccatgtgggctgatgaatcatctcaccgctgtgtgcgaggtggttacccaatttgtatacacagcgagcattccagcactgctgtgtaacttaggggtgacccccatcgacggagctccacaccgctcttatagcgagtgctaccctgtgctacttgatggagtcatggtcggctgggtcgacaaggacctggccccagggattgctgattcccttcggcactttaaagtcttacgcgaaaagcgtatcccaccttggatggaggttgtgctgatcccgatgaccgggaagccaagcctgtatccaggactcttcctgttcaccactccatgcaggctggttcgccctgtgcagaacttagcgctgggcaaagaagagttgatcggtacaatggaacagatcttcatgaatgttgccatctttgaggacgaggtatttgctggggtcacaacgcaccaggaactctttcctcactccctgctgtccgtgattgccaactttattccattcagtgaccataaccaatcccccagaaatatgtaccagtgccagatggggaagcaaactatgggcttcccgctgctcacctatcaagaccgctcggacaacaagttataccggctgcaaacacctcagagtccccttgttcggccatcaatgtacgactactatgacatggacaactatcccatcggcacaaatgccattgtggctgttatcagctacacgggatacgatatggaggacgcgatgatcgtcaataaggcatcttgggaaagaggctttgctcacggctctgtgtacaaatcagaatttatcgacctgagtgagaagattaaacagggagacagctcactcgtgtttgggatcaaaccaggcgatccccgtgttctccagaaactcgacgacgatgggctcccctttatcggggctaaattacagtacggcgatccctattactcttacctcaacctcaacacgggcgagagctttgttatgtactacaagagcaaagagaactgtgttgtggataacatcaaggtgtgctctaacgacacggggtccgggaagttcaaatgtgtatgcattactatgagagtgccaaggaatccaacaatcggggataaatttgctagcagacatgggcagaaggggattctttcaagactgtggccagccgaggacatgcccttcaccgaaagcggcatggtgcccgatattctgtttaacccccacggttttccctcgcgtatgaccattggaatgctgatagagtctatggcaggaaagtcggccgcactgcacggcttgtgccatgacgcgaccccttttatcttcagtgaagagaatagcgctctagaatattttggggaaatgttgaaggccgcaggctacaacttctacggaactgaacgtctgtattctggtattagcggcctggaactggaagcagatatcttcattggggttgtctattaccagagactgcggcacatggtctccgataaatttcaagtgagaactaccggcgcaagagacagagtgaccaatcagcctatcggcggacggaacgtgcaagggggaatccgctttggagagatggagcgcgatgcactgctggcccacggaacttctttcttactgcacgaccgcctgtttaactgttccgacaggagcgtggcccatgtgtgtgttaaatgcggtagcctgctttcacccctccttgaaaaaccaccaccttcctggtccgctatgcggaacagaaagtataactgcactttatgctctcgaagcgacaccatcgacacagtgtcggtcccatacgtcttcaggtacttcgtggcggagctggctgctatgaacatcaaagtgaagcttgacgttgtgtag

SEQ ID NO: 102613 - DNA, 3522 bp, Artificial Sequence
  derived and/or modified sequence
atgagagccaaggaggccgccgagaccggcctgagacccctgctgcccgcctgcaccgagagactggccagcggcgtgtacagagagaccggcgtgagatgcgccggcggccacatggaccccggcagcagatggagaaacctgcccagcggccccagcctgaagcacctgaccgaccccagctacggcatccccagagagcagcagaaggccgccctgcaggagctgaccagagcccacgtggagagcttcaactacgccgtgcacgagggcctgggcctggccgtgcaggccatcccccccttcgagttcgccttcaaggacgagagaatcagcttcaccatcctggacgccgtgatcagcccccccaccgtgcccaagggcaccatctgcaaggaggccaacgtgtaccccgccgagtgcagaggcagaagaagcacctacagaggcaagctgaccgccgacatcaactgggccgtgaacggcatcagcaagggcatcatcaagcagttcctgggctacgtgcccatcatggtgaagagcaagctgtgcaacctgagaaacctgcccccccaggccctgatcgagcaccacgaggaggccgaggagatgggcggctacttcatcatcaacggcatcgagaaggtgatcagaatgctgatcatgcccagaagaaacttccccatcgccatgatcagacccaagtggaagaccagaggccccggctacacccagtacggcgtgagcatgcactgcgtgagagaggagcacagcgccgtgaacatgaacctgcactacctggagaacggcaccgtgatgctgaacttcatctacagaaaggagctgttcttcctgcccctgggcttcgccctgaaggccctggtgagcttcagcgactaccagatcttccaggagctgatcaagggcaaggaggacgacagcttcctgagaaacagcgtgagccagatgctgagaatcgtgatggaggagggctgcagcacccagaagcaggtgctgaactacctgggcgagtgcttcagagtgaagctgaacgtgcccgactggtaccccaacgagcaggccgccgagttcctgttcaaccagtgcatctgcatccacctgaagagcaacaccgagaagttctacatgctgtgcctgatgaccagaaagctgttcgccctggccaagggcgagtgcatggaggacaaccccgacagcctggtgaaccaggaggtgctgacccccggccagctgttcctgatgttcctgaaggagaagctggagggctggctggtgagcatcaagatcgccttcgacaagaaggcccagaagaccagcgtgagcatgaacaccgacaacctgatgagaatcttcaccatgggcatcgacctgaccaagcccttcgagtacctgttcgccaccggcaacctgagaagcaagaccggcctgggcctgctgcaggacagcggcctgtgcgtggtggccgacaagctgaacttcatcagatacctgagccacttcagatgcgtgcacagaggcgccgacttcgccaagatgagaaccaccaccgtgagaagactgctgcccgagagctggggcttcctgtgccccgtgcacacccccgacggcgagccctgcggcctgatgaaccacctgaccgccgtgtgcgaggtggtgacccagttcgtgtacaccgccagcatccccgccctgctgtgcaacctgggcgtgacccccatcgacggcgccccccacagaagctacagcgagtgctaccccgtgctgctggacggcgtgatggtgggctgggtggacaaggacctggcccccggcatcgccgacagcctgagacacttcaaggtgctgagagagaagagaatccccccctggatggaggtggtgctgatccccatgaccggcaagcccagcctgtaccccggcctgttcctgttcaccaccccctgcagactggtgagacccgtgcagaacctggccctgggcaaggaggagctgatcggcaccatggagcagatcttcatgaacgtggccatcttcgaggacgaggtgttcgccggcgtgaccacccaccaggagctgttcccccacagcctgctgagcgtgatcgccaacttcatccccttcagcgaccacaaccagagccccagaaacatgtaccagtgccagatgggcaagcagaccatgggcttccccctgctgacctaccaggacagaagcgacaacaagctgtacagactgcagaccccccagagccccctggtgagacccagcatgtacgactactacgacatggacaactaccccatcggcaccaacgccatcgtggccgtgatcagctacaccggctacgacatggaggacgccatgatcgtgaacaaggccagctgggagagaggcttcgcccacggcagcgtgtacaagagcgagttcatcgacctgagcgagaagatcaagcagggcgacagcagcctggtgttcggcatcaagcccggcgaccccagagtgctgcagaagctggacgacgacggcctgcccttcatcggcgccaagctgcagtacggcgacccctactacagctacctgaacctgaacaccggcgagagcttcgtgatgtactacaagagcaaggagaactgcgtggtggacaacatcaaggtgtgcagcaacgacaccggcagcggcaagttcaagtgcgtgtgcatcaccatgagagtgcccagaaaccccaccatcggcgacaagttcgccagcagacacggccagaagggcatcctgagcagactgtggcccgccgaggacatgcccttcaccgagagcggcatggtgcccgacatcctgttcaacccccacggcttccccagcagaatgaccatcggcatgctgatcgagagcatggccggcaagagcgccgccctgcacggcctgtgccacgacgccacccccttcatcttcagcgaggagaacagcgccctggagtacttcggcgagatgctgaaggccgccggctacaacttctacggcaccgagagactgtacagcggcatcagcggcctggagctggaggccgacatcttcatcggcgtggtgtactaccagagactgagacacatggtgagcgacaagttccaggtgagaaccaccggcgccagagacagagtgaccaaccagcccatcggcggcagaaacgtgcagggcggcatcagattcggcgagatggagagagacgccctgctggcccacggcaccagcttcctgctgcacgacagactgttcaactgcagcgacagaagcgtggcccacgtgtgcgtgaagtgcggcagcctgctgagccccctgctggagaagcccccccccagctggagcgccatgagaaacagaaagtacaactgcaccctgtgcagcagaagcgacaccatcgacaccgtgagcgtgccctacgtgttcagatacttcgtggccgagctggccgccatgaacatcaaggtgaagctggacgtggtgtag

SEQ ID NO: 102614 - protein, 424 aa, Artificial Sequence
  derived and/or modified sequence
MAQGNNYGQTSNGVADESPNMLVYRKMEDVIARMQDEKNGIPIRTVKSFLSKIPSVFSGSDIVQWLIKNLTIEDPAVYLCKRTMQNKARLELADYEAESLARLQRAFARKWEFIFMQAEAQAKVDKKRDKIERKILDSQERAFWDVHRPVPGCVNTTEVDIKKSSRMRNPHKTRKSVYGLQNDIRSHSPTHTPTPETKPPTEDELQQQIKYWQIQLDRHRLKMSKVADSLLSYTEQYLEYDPFLLPPDPSNPWLSDDTTFWELEASKEPSQQRVKRWGFGMDEALKDPVGREQFLKFLESEFSSENLRFWLAVEDLKKRPIKEVPSRVQEIWQEFLAPGAPSAINLDSKSYDKTTQNVKEPGRYTFEDAQEHIYKLMKSDSYPRFIRSSAYQELLQAKKKGRNIPIFPCHKNCTPTLRASTNLL

SEQ ID NO: 102615 - DNA, 1275 bp, Artificial Sequence
  derived and/or modified sequence
atggcacagggtaacaactacggccaaacctcgaacggggttgctgatgagtctcctaatatgctcgtttaccgaaagatggaggatgtgatcgctcgcatgcaggatgagaagaacggcattccaattagaaccgtgaaaagcttcttatcgaaaataccttcagtcttcagcggtagcgacatcgtacagtggctgatcaagaacttaactatcgaggaccctgcagtgtacctctgtaagagaacaatgcagaacaaagcgaggctggagctggcagattatgaagccgagtctttggccaggctccagagggctttcgctcgaaaatgggaatttatcttcatgcaggcggaagcccaggcaaaggtggacaagaagagggacaaaattgagaggaagattctcgactcccaggagcgcgcattctgggacgttcaccgcccagtgcccggctgtgtaaatactaccgaggttgacataaaaaagtcttctcgtatgcggaatcctcacaagacccgcaaatctgtctacggcctgcagaacgacatccgcagccatagtcccactcatactcctactccagagactaagccccccacggaggatgaactacagcaacaaataaagtattggcagatccagctggatcgccaccgcctgaagatgtcaaaggtagctgacagtttactcagctacacagaacagtatctagagtatgacccatttcttctccctccagatccatccaacccttggttgtccgatgacacgaccttttgggaactggaagcaagtaaagagccgtcacaacagagagtgaagcgatgggggttcggcatggacgaggcactgaaagacccagtggggcgggagcagttcctcaaatttttagagtccgagtttagtagcgagaacctgaggttctggcttgcagtggaggaccttaaaaagcgcccaataaaggaggttccatcacgggtgcaggagatctggcaagagttcctggctccgggcgctccatcagctatcaaccttgactccaaaagttatgataagacaacgcagaatgtcaaagaaccgggacggtatacctttgaggacgcacaggagcacatctataaactgatgaaatcagattcttatccccgatttatcaggagtagtgcgtatcaagagttgctccaggctaagaaaaaagggagaaatattcctattttcccttgccataagaattgcactccaaccctgcgcgcttcaactaaccttctctag

SEQ ID NO: 102616 - DNA, 1275 bp, Artificial Sequence
  derived and/or modified sequence
atggctcagggcaataattacggccagacatccaatggtgttgctgacgaatcccccaacatgttggtatatcggaagatggaggacgttattgcacggatgcaggacgaaaagaacggcatccctattaggacagtgaaatcatttttatctaagatcccatccgtgttctcaggtagcgatatagtgcagtggctgattaagaatctgactatcgaagatcccgccgtgtatctatgtaaacggacaatgcagaataaagccagactggaattagccgattacgaggctgagagcttagctcggcttcaacgggcctttgcaaggaaatgggagttcatctttatgcaggccgaagcccaggccaaggtagataaaaagagggataagattgaacggaaaatactcgacagtcaggaacgtgccttttgggacgtgcatagaccagtgcccgggtgcgttaacacaaccgaggttgatataaaaaagagtagccgaatgagaaacccccacaagacccggaagagtgtgtatggtctgcaaaacgatattcggagccattcccccacccacactccaactccagagactaaaccccccactgaggatgaacttcaacaacagattaagtattggcagatccagctggaccgtcacaggctgaagatgagcaaagttgccgacagtctgctgagttatacggagcagtacctggagtatgatccattcctcctccctccagatccctcaaatccgtggctgtccgatgacaccacattctgggagttggaggcaagcaaagagcctagccagcaacgagtaaagagatggggcttcggaatggacgaagccctcaaggatccggtggggcgcgagcaatttctgaaatttttggaaagcgaattctcaagcgagaatctacggttctggctggcagtggaggacctgaagaagaggcccatcaaggaggtcccctctagagtgcaggagatatggcaggagttcctggcgcccggcgccccctccgccattaatttggactcaaaaagctacgataagaccacccagaatgtgaaagagcctggtagatatacatttgaagacgcgcaggagcatatctacaagctaatgaagagtgatagctacccaaggttcatccgcagttctgcttatcaggagctactgcaagcaaagaaaaaggggcgaaacattccaattttcccttgccataagaactgtacccctaccctgagggcctccaccaacctgttgtag

SEQ ID NO: 102617 - DNA, 1275 bp, Artificial Sequence
  derived and/or modified sequence
atggcccagggcaacaactacggccagaccagcaatggagtggctgatgagagccccaacatgctggtgtacaggaagatggaggatgtgattgccaggatgcaggatgagaagaatggcatccccatcagaacagtgaagagcttcctgagcaagatccccagcgtcttcagcggcagtgacatcgtgcagtggctgatcaagaacctgaccattgaagatcctgctgtgtacctgtgcaagaggaccatgcagaacaaggcccggctggagctggccgactatgaagctgagagcctggcccggctgcagagggcctttgccaggaagtgggagttcatcttcatgcaggccgaggcccaggccaaggtggacaagaagagggacaagattgaaaggaagatcctggacagccaggagcgggccttctgggatgtgcacaggcctgtgcccggctgtgtgaacaccacagaggtggacatcaagaagagcagcaggatgaggaacccccacaagaccaggaagtctgtgtatggcctgcagaatgacatccgcagccacagccccacccacacccccaccccagagaccaagcccccaacagaagatgagctgcagcagcagatcaagtactggcagatccagctggacagacaccggctgaagatgagcaaggtggccgacagcctgctgagctacacagagcagtacctggagtatgaccccttcctgctgcccccagaccccagcaacccctggctgagtgatgacaccaccttctgggagctggaggccagcaaggagcccagccagcagagggtgaagcgctggggcttcggcatggatgaggccctgaaggaccctgtgggccgggagcagttcctgaagttcctggagagcgagttcagcagcgagaacctgcgcttctggctggccgtggaggacctgaagaagaggcccatcaaggaggtgcccagccgggtgcaggagatctggcaggagttcctggcccctggggcccccagcgccatcaacctggacagcaagagctatgacaagaccacccagaatgtgaaggagcccggccgctacacctttgaagatgcccaggagcacatctacaagctgatgaagagtgacagctacccccgcttcatccgcagcagcgcctaccaggagctgctgcaggccaagaagaagggcaggaacatccccatcttcccctgccacaagaactgcacccccaccctgcgggccagcaccaacctgctgtag

SEQ ID NO: 102618 - DNA, 1275 bp, Artificial Sequence
  derived and/or modified sequence
atggcccagggcaacaactacggccagaccagcaacggcgtggccgacgaatccccaaatatgctggtgtatcgaaagatggaggacgttattgccagaatgcaggatgaaaagaatggcatcccaatcagaacagtcaaatccttcttgagcaaaatcccatcagtgttttcggggtccgatatcgtccagtggctcataaagaacctcacaattgaggatcctgcagtgtatctatgcaagaggaccatgcagaacaaggcccggcttgaattggcggattacgaagccgagtccttagccaggctacagcgtgctttcgcccggaagtgggagtttatttttatgcaggccgaagcccaggcaaaggtggataagaaacgggacaagatcgagcggaaaatcttagattcacaagagcgtgccttttgggatgttcatcggcccgttccaggatgtgtgaacacaacggaagtggacataaagaaatcatccaggatgaggaatccccataagacgagaaagtctgtctatgggttacaaaatgatatccggtctcactctcccacacatacgccaacccctgaaacaaaacccccaacagaggacgagttgcaacagcaaattaaatattggcagattcagttagaccgtcatcgcctgaagatgagtaaggttgccgatagtctgctatcctatacagagcagtatcttgagtatgatccgtttttgctgcctcccgatccgtccaatccatggctaagtgatgatactaccttctgggagctcgaagcgtcaaaagagccatcgcagcagagggtgaaaaggtggggtttcggcatggacgaagccctgaaagaccccgtaggaagagagcaatttctaaagtttctggaatccgagttctcctccgaaaacctccgcttttggcttgctgtcgaagaccttaagaagaggcctataaaggaagtaccttcaagagtgcaggagatttggcaagaatttctggcacctggcgcacccagtgccattaatttggatagcaagtcatatgacaaaactacccagaacgtcaaggaacccgggaggtataccttcgaggatgcccaggaacacatctacaagctaatgaaaagtgattcatatcccagatttatccgatctagtgcctatcaggaactgcttcaggcaaaaaaaaagggccgaaatatccccatcttcccctgtcacaagaactgtacccctactctaagagccagcaccaacttgctgtag

SEQ ID NO: 102619 - DNA, 1275 bp, Artificial Sequence
  derived and/or modified sequence
atggcccagggcaacaactacggccagaccagcaacggcgtggccgacgaaagccctaacatgctcgtgtacagaaaaatggaagatgtgatcgccagaatgcaagatgagaagaacggtattcccatcaggaccgtgaagagctttctctcaaaaatcccaagtgtcttcagcggaagcgacatagttcagtggctgattaagaacctgacgatagaagatccagcagtatacttgtgcaaacgtaccatgcagaacaaggcccgcctggagctggccgactatgaggctgagtccctggctcgacttcaaagagcattcgctaggaagtgggagttcatcttcatgcaggctgaggctcaagctaaagtggataagaagcgcgataagatagaacgtaaaatattggacagccaggagagagctttctgggatgtgcatcgcccggtgccaggatgtgttaatacaaccgaggtcgacattaagaaaagtagccgcatgaggaatcctcataaaacgagaaaatctgtgtacgggctgcaaaacgacataaggtctcattccccaacgcatacacccacaccagaaactaagccgcccaccgaggacgagctgcagcagcagataaagtattggcagatccagctcgatcggcataggctgaagatgtccaaagtggctgactccctcttaagctatactgagcagtaccttgaatacgatcccttcctgctccctccggatcccagcaacccatggctcagcgacgacaccacattttgggaactggaggcgtcaaaggaaccaagccagcaaagagtcaaaaggtgggggttcggcatggacgaagctctgaaagatcctgtgggtcgggagcaattcctgaagtttctcgagtcagagttctcgtcagaaaatctgcgattctggctcgccgtggaagacctgaagaaacgacctatcaaagaggtgccaagcagggtgcaagagatatggcaggagtttctggcacccggcgcgccttcagccatcaatctggacagtaagtcctatgacaagacaactcaaaacgtgaaagagcccggtcgttataccttcgaggacgctcaagagcacatttacaagctgatgaagtcagattcctacccccgcttcataaggtcttccgcttaccaagaactgttgcaggcgaagaaaaaagggagaaacattcctatttttccctgtcataaaaactgcaccccaaccctccgcgctagcacaaacctgctttag

SEQ ID NO: 102620 - DNA, 1275 bp, Artificial Sequence
  derived and/or modified sequence
atggcccagggaaacaactacggccaaacctctaatggggtggccgacgaatcacctaacatgctcgtgtatagaaaaatggaggacgttatcgcacgaatgcaagacgaaaagaacggtattccaattcgaactgtaaaatcattcctgagtaaaatcccctccgtcttttcaggctcggacatagtccaatggttaattaagaacttgaccatcgaggatcccgctgtgtacctatgcaagaggaccatgcagaataaggcgagactcgaactcgcagattatgaagccgaatccctggcaagactgcaaagagcctttgcacggaagtgggaatttatcttcatgcaggcagaggcacaggccaaggtggataaaaaaagagataagatagagcggaagatcctcgatagtcaagaaagggcgttttgggacgtgcaccgacccgtacccggatgtgtcaacaccacagaggtcgacatcaaaaaatcctcccggatgcgaaacccccataagacccggaaatccgtgtacggactccagaacgatatccgatcacactcaccaacccatactcccactcccgagacgaagcccccaaccgaggacgagcttcaacagcagatcaagtactggcagatccagctggacaggcacagactcaagatgtcaaaggtggccgatagtctgctatcctatactgagcagtatctggaatatgacccatttttattaccaccagacccttccaatccctggctgtccgatgatactactttctgggagttggaggcttcaaaggaaccttctcagcagcgcgtcaaaagatggggctttggcatggacgaggctttgaaggacccggtcggcagggagcagtttctgaagttcttggagtccgaattcagtagcgaaaatctgagattctggctggctgtggaggatttgaagaaacgccctattaaagaagtgccgtctagagtacaggagatctggcaagagttcctggccccaggtgcccctagcgccatcaatctcgacagcaagtcttacgataagacaacccaaaacgtaaaggagcccggacgttatacatttgaagacgctcaagagcacatctataagctgatgaaaagtgactcctaccctaggttcatccgttctagcgcttatcaggagctgctgcaagcaaagaagaaggggcgaaatattccaatttttccttgtcataagaactgcaccccaacactgagagcctctaccaacctcctctag

SEQ ID NO: 102621 - DNA, 1275 bp, Artificial Sequence
  derived and/or modified sequence
atggcacaagggaataactatggacaaacatcaaatggcgttgctgacgaatctcccaatatgctggtataccgcaagatggaggatgtgatcgccaggatgcaggacgaaaagaatgggatccctatccggactgtgaagtctttcttgtcaaagattccatcggtgttctccggcagcgacatcgtccagtggttgatcaagaacctgactatcgaggatcctgctgtgtacctgtgcaagcgcacaatgcagaacaaggcgcgtcttgagctcgccgattatgaggctgaaagcctggcgcgtctacaaagggcgttcgctagaaagtgggaatttattttcatgcaagctgaggcccaagcaaaggttgacaagaaacgggataaaatcgaacgaaagatcctggacagccaagagagggcgttttgggatgtccaccggccagtgcccggatgcgtgaacacaacagaagtcgacattaagaagtccagtcgtatgagaaatccccataagacaagaaagagcgtgtatggcttgcagaacgacatccgttcccacagccccacgcatactcctacacccgagaccaaaccgccaactgaggacgaactgcagcagcaaatcaagtattggcagattcagctggatcggcacaggctgaagatgagtaaagtggcggatagcttattgtcttacacggagcaatacctggaatacgacccctttctgctgccgcctgacccaagcaatccttggcttagcgacgacacaacattttgggagctggaggccagcaaggagcccagtcagcagagggtcaaacgctgggggtttggtatggacgaggcgttgaaagacccagtgggaagggagcagtttttgaagttccttgagtccgagtttagctcggagaacctgcgtttctggctcgcagtagaggatcttaaaaaaagacccattaaggaggtgccatctcgggtccaagagatttggcaggagttcttggccccaggcgcacctagcgcgataaatctcgacagtaaaagttatgacaagaccacccagaacgttaaggaacctggccgatatacattcgaggacgcccaggaacacatctacaagctgatgaagagtgacagctaccccagattcattaggagctcggcttatcaggaactgctccaagccaagaagaagggacgaaacatcccaatctttccatgtcataaaaactgcacgcccacccttcgggcttccacaaacctcttgtag

SEQ ID NO: 102622 - DNA, 1980 bp, Artificial Sequence
  derived and/or modified sequence
atggcccaggggaataattatgggcagaccagcaacggggtggccgatgaatcacccaacatgctggtgtacagaaagatggaagacgtcatagcacggatgcaagatgaaaaaaatggaattcctattcgtacggtcaaaagctttctttccaagatacctagcgtcttctctggttcagacattgttcaatggttgataaagaacttaactatagaagatccagccgtttacctctgcaagagaacaatgcaaaacaaggcacgactggagctcgcagactatgaggctgagagcctggccaggctgcagagagcatttgcccggaagtgggagttcattttcatgcaagcagaagcacaagcaaaagtggacaagaagagagacaagattgaaaggaagatccttgacagccaagagagagcgttctgggacgtgcacaggcccgtgcctggatgtgtaaatacaactgaagtggacattaagaagtcatccagaatgagaaacccccacaaaacacggaagtctgtctatggtttacaaaatgatattagaagtcacagtcctacccacacacccacaccagaaactaaacctccaacagaagatgagttacaacaacagataaaatattggcaaatacagttagatagacatcggttaaaaatgtcaaaagtcgctgacagtctactaagttacacggaacagtatttagaatacgacccgtttcttttgccacctgacccttctaacccatggctgtccgatgacaccactttctgggaacttgaggcaagcaaagaaccgagccagcagagggtaaaacgatggggttttggcatggacgaggcattgaaagacccagttgggagagaacagttccttaaatttctagagtcagaattcagctcggaaaatttaagattctggctggcagtggaggacctgaaaaagaggcctattaaagaagtaccctcaagagttcaggaaatatggcaagagtttctggctcccggagcccccagtgctattaacttggattccaagagttatgacaaaaccacacagaacgtgaaggaacctggacgatacacatttgaagatgctcaggagcacatttacaaactgatgaaaagtgattcatacccacgttttataagatccagtgcctatcaggagcttctacaggcaaagaaaaagggcagaaacatccctattttcccatgccataaaaactgtacaccaacactgagggccagcactaacctgttatgaaaagaggggaaatctctcacgtccaagaggttaacaagccttgctcagtcttactaaacggatcatcttgtagcatgaatgcagactggagtcactgcacacactttgtagctcaatgttgtgacctggagcagaggacattagaacaagatgttgcatgagcaaaggacctaaattgttatttttgtgtgtacattccatctccaatggactcttccgtctcaatgcctccattccaaactgttgtctgctttctttctccttctactatgctggatctgtgtctcttcctttttaacaagttcaagtgaagtaaaaccttttctttttttccttctttctctctctctctctctcaaagcttcagttagacacacagttcactgaaaattcagtcagtcaaaaactggaagaactgtaaaagaaaaaagtatatatcaataagtatacatgtggcttcacatttattaaacaataaattccgcacagaaagtttcatttcaccaatgtgtcacagtcagaaacaaactcatgtcttcgtctgttgtctgtacattctccgttaatgtttctcgcatttatttttataccatatttaaagaagaaacaccttttactccaaatgtattaaagttgatcccttctctgtaaatttgtgtatgtttatattgttgttttatctttcattaaaagatgcagaatctc

SEQ ID NO: 102623 - DNA, 1275 bp, Artificial Sequence
  derived and/or modified sequence
atggcccaggggaataattatgggcagaccagcaacggggtggccgatgaatcacccaacatgctggtgtacagaaagatggaagacgtcatagcacggatgcaagatgaaaaaaatggaattcctattcgtacggtcaaaagctttctttccaagatacctagcgtcttctctggttcagacattgttcaatggttgataaagaacttaactatagaagatccagccgtttacctctgcaagagaacaatgcaaaacaaggcacgactggagctcgcagactatgaggctgagagcctggccaggctgcagagagcatttgcccggaagtgggagttcattttcatgcaagcagaagcacaagcaaaagtggacaagaagagagacaagattgaaaggaagatccttgacagccaagagagagcgttctgggacgtgcacaggcccgtgcctggatgtgtaaatacaactgaagtggacattaagaagtcatccagaatgagaaacccccacaaaacacggaagtctgtctatggtttacaaaatgatattagaagtcacagtcctacccacacacccacaccagaaactaaacctccaacagaagatgagttacaacaacagataaaatattggcaaatacagttagatagacatcggttaaaaatgtcaaaagtcgctgacagtctactaagttacacggaacagtatttagaatacgacccgtttcttttgccacctgacccttctaacccatggctgtccgatgacaccactttctgggaacttgaggcaagcaaagaaccgagccagcagagggtaaaacgatggggttttggcatggacgaggcattgaaagacccagttgggagagaacagttccttaaatttctagagtcagaattcagctcggaaaatttaagattctggctggcagtggaggacctgaaaaagaggcctattaaagaagtaccctcaagagttcaggaaatatggcaagagtttctggctcccggagcccccagtgctattaacttggattccaagagttatgacaaaaccacacagaacgtgaaggaacctggacgatacacatttgaagatgctcaggagcacatttacaaactgatgaaaagtgattcatacccacgttttataagatccagtgcctatcaggagcttctacaggcaaagaaaaagggcagaaacatccctattttcccatgccataaaaactgtacaccaacactgagggccagcactaacctgttatga

SEQ ID NO: 102624 - DNA, 1275 bp, Artificial Sequence
  derived and/or modified sequence
atggcccagggcaacaactacggccagaccagcaacggcgtggccgacgagagccccaacatgctggtgtacagaaagatggaggacgtgatcgccagaatgcaggacgagaagaacggcatccccatcagaaccgtgaagagcttcctgagcaagatccccagcgtgttcagcggcagcgacatcgtgcagtggctgatcaagaacctgaccatcgaggaccccgccgtgtacctgtgcaagagaaccatgcagaacaaggccagactggagctggccgactacgaggccgagagcctggccagactgcagagagccttcgccagaaagtgggagttcatcttcatgcaggccgaggcccaggccaaggtggacaagaagagagacaagatcgagagaaagatcctggacagccaggagagagccttctgggacgtgcacagacccgtgcccggctgcgtgaacaccaccgaggtggacatcaagaagagcagcagaatgagaaacccccacaagaccagaaagagcgtgtacggcctgcagaacgacatcagaagccacagccccacccacacccccacccccgagaccaagccccccaccgaggacgagctgcagcagcagatcaagtactggcagatccagctggacagacacagactgaagatgagcaaggtggccgacagcctgctgagctacaccgagcagtacctggagtacgaccccttcctgctgccccccgaccccagcaacccctggctgagcgacgacaccaccttctgggagctggaggccagcaaggagcccagccagcagagagtgaagagatggggcttcggcatggacgaggccctgaaggaccccgtgggcagagagcagttcctgaagttcctggagagcgagttcagcagcgagaacctgagattctggctggccgtggaggacctgaagaagagacccatcaaggaggtgcccagcagagtgcaggagatctggcaggagttcctggcccccggcgcccccagcgccatcaacctggacagcaagagctacgacaagaccacccagaacgtgaaggagcccggcagatacaccttcgaggacgcccaggagcacatctacaagctgatgaagagcgacagctaccccagattcatcagaagcagcgcctaccaggagctgctgcaggccaagaagaagggcagaaacatccccatcttcccctgccacaagaactgcacccccaccctgagagccagcaccaacctgctgtag

SEQ ID NO: 102625 - protein, 114 aa, Artificial Sequence
  derived and/or modified sequence
MDPGSRWRNLPSGPSLKHLTDPSYGIPREQQKAALQELTRAHVESFNYAVHEGLGLAVQAIPPFEFAFKDERISFTILDAVISPPTVPKGTICKEANVYPAECRGRRSTYRGKL

SEQ ID NO: 102626 - protein, 459 aa, Artificial Sequence [sequence omitted]

SEQ ID NO: 102627 - DNA, 345 bp, Artificial Sequence
  derived and/or modified sequence
atggacccaggttccaggtggagaaacctgccatcggggcccagtcttaaacatcttacggatccatcctacggcatccccagagaacagcaaaaggctgctctccaggagttgacccgtgcccacgtagagtccttcaattacgccgtgcacgagggactggggctagccgtccaggcaattcctccttttgaatttgccttcaaggatgagagaattagcttcaccatcctcgacgccgtgatttcacctccaaccgtgcccaaggggactatatgtaaggaagcaaatgtctaccctgctgaatgcaggggccggcggtcaacctacaggggtaaactctag

SEQ ID NO: 102628 - DNA, 387 bp, Artificial Sequence
  derived and/or modified sequence
atggaccccggctccagatggcgtaacctgccatccggcccaagtctgaagcatttaaccgatccaagctacgggatacctcgcgaacagcagaaggcagctctccaagagctgacccgcgcccatgtggaatcattcaattacgcagtccacgaaggacttggtctggccgtgcaggccatcccacctttcgagttcgccttcaaggacgagagaatctctttcaccatactggacgccgtcatttcacctcccactgtgccgaagggcaccatctgcaaggaggcaaatgtctaccccgctgagtgcagggggcgtcgcagcacctatagagggaaactgactgccgatatcaactgggctgtgaatggtatatctaaaggttag

SEQ ID NO: 102629 - DNA, 345 bp, Artificial Sequence
  derived and/or modified sequence
atggaccccggcagccgctggaggaacctgcccagcggccccagcctgaagcacctgacagaccccagctatggcatcccccgggagcagcagaaggccgccctgcaggagctgacccgggcccacgtggagagcttcaactatgctgtgcatgagggcctgggcctggccgtgcaggccatccccccatttgaatttgccttcaaggatgagcgcatctccttcaccatcctggatgctgtgatcagcccccccaccgtgcccaagggcaccatctgcaaggaggccaacgtgtacccagctgagtgccggggccgccgcagcacctaccggggcaagctgtag

SEQ ID NO: 102630 - DNA, 387 bp, Artificial Sequence
  derived and/or modified sequence
atggaccccggcagccgctggaggaacctgcccagcggccccagcctgaagcacctgacagaccccagctatggcatcccccgggagcagcagaaggccgccctgcaggagctgacccgggcccacgtggagagcttcaactatgctgtgcatgagggcctgggcctggccgtgcaggccatccccccatttgaatttgccttcaaggatgagcgcatctccttcaccatcctggatgctgtgatcagcccccccaccgtgcccaagggcaccatctgcaaggaggccaacgtgtacccagctgagtgccggggccgccgcagcacctaccggggcaagctgacagctgacatcaactgggccgtgaatggcatcagcaaaggatag

SEQ ID NO: 102631 - DNA, 345 bp, Artificial Sequence
  derived and/or modified sequence
atggaccccggcagccggtggcggaacctgcccagcggccccagcttaaagcacctcactgacccctcgtatggtatcccgagagagcaacaaaaggccgcactccaggagctgaccagagcacacgtggagagcttcaattacgccgtgcacgaggggctggggctagcagtccaggccatacctccattcgaatttgccttcaaggacgaacgtatctctttcacgatcctcgacgctgtgatttcacctccaaccgtacccaagggcactatttgtaaggaggcaaacgtgtatcctgctgagtgccgtggacgccggagcacataccgcggcaaactgtag

SEQ ID NO: 102632 - DNA, 387 bp, Artificial Sequence
  derived and/or modified sequence
atggaccccggcagccggtggcggaacctgcccagcggccccagcctcaaacaccttacagacccaagctacggcataccaagggagcagcagaaagcggcactgcaagaattaacacgggcccatgttgaatcattcaattatgccgtgcacgaagggcttggacttgccgttcaagccattccaccattcgagttcgcattcaaagatgagaggatcagttttaccatcctcgacgccgttatatcaccccctacagtgcctaagggaaccatctgcaaagaggccaatgtctacccagcagagtgtcgcgggcggcggtctacttatagaggcaaactgacagccgacataaattgggctgtaaacggcatttccaaagggtag

SEQ ID NO: 102633 - DNA, 345 bp, Artificial Sequence
  derived and/or modified sequence
atggacccaggtagcagatggcgcaatttgcccagtggcccatctctgaaacacttgaccgatccttcttatggcatcccaagagagcagcagaaggctgcgctccaggaactgactcgagcacacgtggaatcattcaattacgctgttcacgaagggctcggactcgccgtgcaggcaataccaccattcgagttcgcatttaaggacgaaagaatctccttcaccatcctggatgcagtcatatctccaccgactgttccaaaaggaaccatatgtaaggaggccaacgtgtaccccgctgaatgccggggaagacgttctacatacagaggtaagctctag

SEQ ID NO: 102634 - DNA, 387 bp, Artificial Sequence
  derived and/or modified sequence
atggaccccggatctcgctggcgcaacctgccttccggtccaagtctcaagcatctcaccgatccttcttatggtattccaagggagcagcagaaagcagcccttcaggagctgaccagagcacatgtggaatcctttaactatgcagtgcacgagggcttgggcctcgctgtgcaggccatcccacccttcgagtttgccttcaaagatgaacgcatcagtttcaccatactcgacgctgttatcagccccccaaccgtgcctaagggcacaatctgtaaagaggcaaacgtgtatcccgcagagtgtagaggacgccgatcaacatacagaggcaaactcacggccgatattaactgggccgtcaatgggatcagcaaaggatag

SEQ ID NO: 102635 - DNA, 345 bp, Artificial Sequence
  derived and/or modified sequence
atggaccccggcagcagatggagaaacctgcccagcggccccagcctgaagcacctgaccgaccccagctacggcatccccagagagcagcagaaggccgccctgcaggagctgaccagagcccacgtggagagcttcaactacgccgtgcacgagggcctgggcctggccgtgcaggccatcccccccttcgagttcgccttcaaggacgagagaatcagcttcaccatcctggacgccgtgatcagcccccccaccgtgcccaagggcaccatctgcaaggaggccaacgtgtaccccgccgagtgcagaggcagaagaagcacctacagaggcaagctgtag

SEQ ID NO: 102636 - DNA, 387 bp, Artificial Sequence
  derived and/or modified sequence
atggaccccggcagcagatggagaaacctgcccagcggccccagcctgaagcacctgaccgaccccagctacggcatccccagagagcagcagaaggccgccctgcaggagctgaccagagcccacgtggagagcttcaactacgccgtgcacgagggcctgggcctggccgtgcaggccatcccccccttcgagttcgccttcaaggacgagagaatcagcttcaccatcctggacgccgtgatcagcccccccaccgtgcccaagggcaccatctgcaaggaggccaacgtgtaccccgccgagtgcagaggcagaagaagcacctacagaggcaagctgaccgccgacatcaactgggccgtgaacggcatcagcaagggctag

SEQ ID NO: 102637 - protein, 451 aa, Artificial Sequence
  derived and/or modified sequence
MEDVIARMQDEKNGIPIRTVKSFLSKIPSVFSGSDIVQWLIKNLTIEDPVEALHLGTLMAAHGYFFPISDHVLTLKDDGTFYRFQTPYFWPSNCWEPENTDYAVYLCKRTMQNKARLELADYEAESLARLQRAFARKWEFIFMQAEAQAKVDKKRDKIERKILDSQERAFWDVHRPVPGCVNTTEVDIKKSSRMRNPHKTRKSVYGLQNDIRSHSPTHTPTPETKPPTEDELQQQIKYWQIQLDRHRLKMSKVADSLLSYTEQYLEYDPFLLPPDPSNPWLSDDTTFWELEASKEPSQQRVKRWGFGMDEALKDPVGREQFLKFLESEFSSENLRFWLAVEDLKKRPIKEVPSRVQEIWQEFLAPGAPSAINLDSKSYDKTTQNVKEPGRYTFEDAQEHIYKLMKSDSYPRFIRSSAYQELLQAKKKGRNIPIFPCHKNCTPTLRASTNLL

SEQ ID NO: 102638 - protein, 477 aa, Artificial Sequence
  derived and/or modified sequence
MAQGNNYGQTSNGVADESPNMLVYRKMEDVIARMQDEKNGIPIRTVKSFLSKIPSVFSGSDIVQWLIKNLTIEDPVEALHLGTLMAAHGYFFPISDHVLTLKDDGTFYRFQTPYFWPSNCWEPENTDYAVYLCKRTMQNKARLELADYEAESLARLQRAFARKWEFIFMQAEAQAKVDKKRDKIERKILDSQERAFWDVHRPVPGCVNTTEVDIKKSSRMRNPHKTRKSVYGLQNDIRSHSPTHTPTPETKPPTEDELQQQIKYWQIQLDRHRLKMSKVADSLLSYTEQYLEYDPFLLPPDPSNPWLSDDTTFWELEASKEPSQQRVKRWGFGMDEALKDPVGREQFLKFLESEFSSENLRFWLAVEDLKKRPIKEVPSRVQEIWQEFLAPGAPSAINLDSKSYDKTTQNVKEPGRYTFEDAQEHIYKLMKSDSYPRFIRSSAYQELLQAKKKGRNIPIFPCHKNCTPTLRASTNLL

SEQ ID NO: 102639 - protein, 393 aa, Artificial Sequence
  derived and/or modified sequence
MAAHGYFFPISDHVLTLKDDGTFYRFQTPYFWPSNCWEPENTDYAVYLCKRTMQNKARLELADYEAESLARLQRAFARKWEFIFMQAEAQAKVDKKRDKIERKILDSQERAFWDVHRPVPGCVNTTEVDIKKSSRMRNPHKTRKSVYGLQNDIRSHSPTHTPTPETKPPTEDELQQQIKYWQIQLDRHRLKMSKVADSLLSYTEQYLEYDPFLLPPDPSNPWLSDDTTFWELEASKEPSQQRVKRWGFGMDEALKDPVGREQFLKFLESEFSSENLRFWLAVEDLKKRPIKEVPSRVQEIWQEFLAPGAPSAINLDSKSYDKTTQNVKEPGRYTFEDAQEHIYKLMKSDSYPRFIRSSAYQELLQAKKKGRNIPIFPCHKNCTPTLRASTNLL

SEQ ID NO: 102640 - DNA, 1356 bp, Artificial Sequence
  derived and/or modified sequence
atggaagatgtgatagccagaatgcaggatgagaagaacggaattcctatcagaactgtgaagagcttcctatccaagatccctagtgtgttctcaggaagtgacatcgtgcagtggctaattaaaaatctcaccatcgaagaccccgtggaggcgttacacctgggtaccctaatggccgcgcacggctacttctttcctattagcgaccacgttctgacactgaaggacgatggaactttctacaggtttcaaaccccctatttctggccttctaactgttgggagcctgaaaatacggactacgcagtctacttatgcaagagaacaatgcagaacaaagcaagactcgagctcgccgactatgaggccgagtccttggcccggctgcagagagccttcgcccgtaagtgggagttcatctttatgcaggcagaggcccaagccaaggtggacaagaagagggacaagattgagcggaaaatccttgactcacaggaaagggcattctgggacgtgcataggcccgtgcccggatgtgtcaacaccaccgaggttgatatcaaaaaaagctcaaggatgcggaacccccataagaccagaaaaagcgtttacggtcttcagaatgacattcgaagccatagcccgacccacacaccgacaccggagaccaaaccacctacagaagacgaactccaacaacagattaaatactggcagatccagctggaccgccataggctcaaaatgtccaaagtggcggatagcttgctgagttacaccgaacagtacctcgagtacgatccatttctgcttccccccgaccccagtaatccatggctgtccgatgacacaacattctgggaactggaagcatccaaggagccgtctcaacagagagttaagaggtgggggttcggtatggacgaagccctgaaggatcctgtcggacgggaacagtttctaaaatttctcgagtcagagttctctagcgagaatctgagattctggttggcagttgaggaccttaaaaagcgtcctatcaaggaggtgccctcccgcgtgcaggagatctggcaggaattcctggcccccggagcccctagcgctatcaacctggattcgaagagctatgacaagaccacccagaacgtaaaagagccgggcagatacactttcgaagacgctcaagagcatatctacaagttaatgaaaagcgacagttatcctcggttcattagatcctccgcatatcaggagctcttacaggcaaagaagaaggggagaaacatccccatcttcccttgccacaagaactgcacaccaacgctgcgtgccagtactaatttactgtag

SEQ ID NO: 102641 - DNA, 1434 bp, Artificial Sequence
  derived and/or modified sequence
atggcgcagggaaacaactacgggcagactagcaatggcgtcgcggatgagtcgccaaatatgttggtgtacagaaaaatggaagatgtgattgctaggatgcaggacgaaaagaatgggatccccattcgcaccgtaaagtcatttctctccaagattccctccgtgttctcaggcagcgacattgttcagtggctgatcaaaaatcttacgatcgaggaccccgttgaggccctgcacctgggcacactgatggcggcccacgggtatttctttccaatttcggaccatgtcctgaccttgaaagatgatgggacgttttatcggtttcagaccccttacttttggccgagcaattgttgggaacccgaaaacacggattacgctgtgtatctgtgtaagagaactatgcagaataaggctcggctcgaactcgccgactatgaggccgaatccctggcccgcctgcaaagagctttcgccagaaagtgggagtttatctttatgcaggcggaagcacaagctaaggtggacaaaaaaagagacaagatcgagaggaagatccttgattcccaggagagagccttctgggatgtccatcgccctgttcccggctgcgtgaacactaccgaagttgacattaaaaaatcttcaagaatgaggaatcctcataaaaccagaaaaagcgtttatggccttcaaaatgacattcggagccatagtcctacccataccccgactccggagacaaagccgccaaccgaggatgaactgcagcagcagatcaaatactggcagatccagctggacagacatagactgaaaatgtccaaggttgccgacagtctgttgagctatacggaacagtacctggaatacgaccccttcttgctgccacctgaccctagcaacccgtggctctcagatgatacaacattttgggagctcgaggcatccaaggagccatcacagcagcgggtgaagcgctggggctttggaatggatgaggcactgaaagaccccgtcggtcgcgagcagttcctaaaattcctggagagcgaattctcgtctgaaaacttacgcttttggctagctgtggaagacctgaagaaacgccctattaaagaagtcccaagcagagtgcaagagatctggcaggaattcctggcccctggcgctccctctgccataaaccttgacagcaagagttatgataaaacaacccagaatgtgaaggagccaggaagatatacatttgaagacgcccaagagcatatctacaaattaatgaaaagtgattcctaccctcggttcattcgcagttccgcgtatcaggaactcctgcaagcaaaaaagaaagggagaaacattcccatcttcccttgccataagaactgtactcccacactgcgggccagcaccaacctcctctag

SEQ ID NO: 102642 - DNA, 1182 bp, Artificial Sequence
  derived and/or modified sequence
atggcggcgcacggctatttcttcccaatttccgatcacgtcctgaccctgaaggatgacgggacgttttaccgattccagaccccgtacttctggccatcaaactgttgggaacccgagaacactgattatgcggtgtacctttgcaaacggaccatgcagaacaaggcaaggctcgagctggcggactatgaagccgagtcactcgccaggttgcagcgagctttcgcgagaaaatgggaatttatttttatgcaggcggaagcacaggccaaggtagataaaaaacgggacaagattgaacgcaagattctggacagtcaagagagagccttctgggacgttcacagacctgtgccagggtgcgtgaacactaccgaggtggacataaagaaaagcagtaggatgcgcaacccccacaagacccggaaaagcgtctatgggctgcagaacgatattcgctcgcactcgcctacccatacccccacccctgagaccaagcccccaacagaagacgaacttcagcaacagattaagtactggcagattcagctggaccggcatcgactgaagatgagtaaagtcgccgattcactgctgtcttataccgaacagtacctggagtacgacccttttctgttaccccccgacccaagcaatccctggctcagcgatgacacaacgttctgggaactcgaggccagcaaggaacccagccagcagcgggtgaagcgttggggtttcggcatggatgaagctctgaaggatccagttggacgcgagcagttccttaagttcctggaaagtgagttctcttccgaaaatctgagattttggctggcagtggaggaccttaaaaaacgccctataaaggaggtgccctcacgggtgcaggagatctggcaggaattccttgctccaggtgcaccctccgcgattaacttggattcaaagagttatgacaagactacgcagaatgtgaaagagcccggacgatacacttttgaagacgcccaagagcacatctataaactgatgaagagtgatagttacccccggtttatcagatcatccgcctaccaagaactgttacaggccaagaaaaaaggaagaaatatcccaatatttccctgtcacaaaaactgtaccccgaccttaagagcatcgaccaacctgctctag

SEQ ID NO: 102643 - DNA, 1356 bp, Artificial Sequence
  derived and/or modified sequence
atggaggatgtgattgccaggatgcaggatgagaagaatggcatccccatcagaacagtgaagagcttcctgagcaagatccccagcgtcttcagcggcagtgacatcgtgcagtggctgatcaagaacctgaccattgaagatcctgtggaggccctgcacctgggcaccctgatggccgcccacggctacttcttccccatcagtgaccacgtgctgaccctgaaggatgatggcaccttctaccgcttccagaccccctacttctggcccagcaactgctgggagcctgagaacacagattatgctgtgtacctgtgcaagaggaccatgcagaacaaggcccggctggagctggccgactatgaggccgagagcctggcccggctgcagagggcctttgccaggaagtgggagttcatcttcatgcaggccgaggcccaggccaaggtggacaagaagagggacaagattgaaaggaagatcctggacagccaggagcgggccttctgggatgtgcacaggcctgtgcccggctgtgtgaacaccacagaggtggacatcaagaagagcagcaggatgaggaacccccacaagaccaggaagtctgtgtatggcctgcagaatgacatccgcagccacagccccacccacacccccaccccagagaccaagccacccacagaagatgagctgcagcagcagatcaagtactggcagatccagctggacagacaccggctgaagatgagcaaggtggccgacagcctgctgagctacacagagcagtacctggagtatgaccccttcctgctgcccccagaccccagcaacccctggctgagtgatgacaccaccttctgggagctggaggccagcaaggagcccagccagcagagggtgaagcgctggggcttcggcatggatgaggccctgaaggaccctgtgggccgggagcagttcctgaagttcctggagagcgagttcagcagcgagaacctgcgcttctggctggccgtggaggacctgaagaagaggcccatcaaggaggtgcccagccgggtgcaggagatctggcaggagttcctggcccctggggcccccagcgccatcaacctggacagcaagagctatgacaagaccacccagaatgtgaaggagcccggccgctacacctttgaagatgcccaggagcacatctacaagctgatgaagagtgacagctacccccgcttcatccgcagcagcgcctaccaggagctgctgcaggccaagaagaagggcaggaacatccccatcttcccctgccacaagaactgcacccccaccctgcgggccagcaccaacctgctgtag

SEQ ID NO: 102644 - DNA, 1434 bp, Artificial Sequence
  derived and/or modified sequence
atggcccagggcaacaactacggccagaccagcaatggagtggctgatgagagccccaacatgctggtgtacaggaagatggaggatgtgattgccaggatgcaggatgagaagaatggcatccccatcagaacagtgaagagcttcctgagcaagatccccagcgtcttcagcggcagtgacatcgtgcagtggctgatcaagaacctgaccattgaagatcctgtggaggccctgcacctgggcaccctgatggccgcccacggctacttcttccccatcagtgaccacgtgctgaccctgaaggatgatggcaccttctaccgcttccagaccccctacttctggcccagcaactgctgggagcctgagaacacagattatgctgtgtacctgtgcaagaggaccatgcagaacaaggcccggctggagctggccgactatgaggccgagagcctggcccggctgcagagggcctttgccaggaagtgggagttcatcttcatgcaggccgaggcccaggccaaggtggacaagaagagggacaagattgaaaggaagatcctggacagccaggagcgggccttctgggatgtgcacaggcctgtgcccggctgtgtgaacaccacagaggtggacatcaagaagagcagcaggatgaggaacccccacaagaccaggaagtctgtgtatggcctgcagaatgacatccgcagccacagccccacccacacccccaccccagagaccaagccacccacagaagatgagctgcagcagcagatcaagtactggcagatccagctggacagacaccggctgaagatgagcaaggtggccgacagcctgctgagctacacagagcagtacctggagtatgaccccttcctgctgcccccagaccccagcaacccctggctgagtgatgacaccaccttctgggagctggaggccagcaaggagcccagccagcagagggtgaagcgctggggcttcggcatggatgaggccctgaaggaccctgtgggccgggagcagttcctgaagttcctggagagcgagttcagcagcgagaacctgcgcttctggctggccgtggaggacctgaagaagaggcccatcaaggaggtgcccagccgggtgcaggagatctggcaggagttcctggcccctggggcccccagcgccatcaacctggacagcaagagctatgacaagaccacccagaatgtgaaggagcccggccgctacacctttgaagatgcccaggagcacatctacaagctgatgaagagtgacagctacccccgcttcatccgcagcagcgcctaccaggagctgctgcaggccaagaagaagggcaggaacatccccatcttcccctgccacaagaactgcacccccaccctgcgggccagcaccaacctgctgtag

SEQ ID NO: 102645 - DNA, 1182 bp, Artificial Sequence
  derived and/or modified sequence
atggccgcccacggctacttcttccccatcagtgaccacgtgctgaccctgaaggatgatggcaccttctaccgcttccagaccccctacttctggcccagcaactgctgggagcctgagaacacagattatgctgtgtacctgtgcaagaggaccatgcagaacaaggcccggctggagctggccgactatgaggccgagagcctggcccggctgcagagggcctttgccaggaagtgggagttcatcttcatgcaggccgaggcccaggccaaggtggacaagaagagggacaagattgaaaggaagatcctggacagccaggagcgggccttctgggatgtgcacaggcctgtgcccggctgtgtgaacaccacagaggtggacatcaagaagagcagcaggatgaggaacccccacaagaccaggaagtctgtgtatggcctgcagaatgacatccgcagccacagccccacccacacccccaccccagagaccaagccacccacagaagatgagctgcagcagcagatcaagtactggcagatccagctggacagacaccggctgaagatgagcaaggtggccgacagcctgctgagctacacagagcagtacctggagtatgaccccttcctgctgcccccagaccccagcaacccctggctgagtgatgacaccaccttctgggagctggaggccagcaaggagcccagccagcagagggtgaagcgctggggcttcggcatggatgaggccctgaaggaccctgtgggccgggagcagttcctgaagttcctggagagcgagttcagcagcgagaacctgcgcttctggctggccgtggaggacctgaagaagaggcccatcaaggaggtgcccagccgggtgcaggagatctggcaggagttcctggcccctggggcccccagcgccatcaacctggacagcaagagctatgacaagaccacccagaatgtgaaggagcccggccgctacacctttgaagatgcccaggagcacatctacaagctgatgaagagtgacagctacccccgcttcatccgcagcagcgcctaccaggagctgctgcaggccaagaagaagggcaggaacatccccatcttcccctgccacaagaactgcacccccaccctgcgggccagcaccaacctgctgtag

SEQ ID NO: 102646 - DNA, 1356 bp, Artificial Sequence
  derived and/or modified sequence
atggaggacgtgatcgcccggatgcaggacgagaagaacggcatccccatcaggacagttaagtcatttctcagcaaaatcccatcagtgtttagcggaagtgatatcgtccaatggcttattaagaacctgactatagaagatcctgtggaggccctgcatcttgggaccctgatggccgcccacggctacttcttccccatctctgaccacgtcctgacacttaaagatgacgggacattctatagattccagactccctatttttggccaagcaattgttgggagccagagaacacggactatgctgtctacctgtgtaagcgcactatgcaaaataaggcccgacttgagctggctgactatgaggctgagtccttggcccgccttcagcgggcctttgcaaggaagtgggagttcatctttatgcaggccgaggcgcaggctaaggttgacaaaaagagggataaaattgaacggaagatcctagattcccaggaaagagcattttgggatgtgcaccgtcctgtgccagggtgcgtcaacacgacagaagttgacattaagaaatcctctcgaatgcgaaacccccataaaactaggaagtcggtgtatggcctacagaacgacattcggagccattctccaacccacacaccaaccccagagactaaacctccaaccgaggatgagcttcagcaacagatcaaatattggcagatacagctagataggcatcgcctcaagatgtctaaagttgctgattcattattgtcatatactgaacagtatctagagtatgatccctttttgctcccccctgacccgtccaatccctggctgtctgatgatacaacattttgggagctggaggcctcaaaagaacccagtcaacagagagtaaaacgttggggcttcggaatggacgaggcgctgaaggaccccgttgggcgcgagcagtttcttaaattcttggaaagtgaattcagctccgaaaacctgcggttttggctggcagtggaggatctcaaaaagcgacccattaaggaagtaccttcccgggtacaggagatctggcaagaattcttggcccctggggctccaagcgctatcaatctggactccaaatcctacgacaaaactacccagaacgtgaaggaaccaggccgctacaccttcgaggatgcccaggagcatatatataagctgatgaagtccgattcatacccacgattcatcagatcctctgcatatcaagagctcctgcaggccaagaaaaaaggaagaaatattcctatttttccctgtcataaaaactgtacaccgacactcagagctagtacaaacttgttgtag

SEQ ID NO: 102647 - DNA, 1434 bp, Artificial Sequence
  derived and/or modified sequence
atggcccagggcaacaactacggccagaccagcaacggcgtggccgacgagagccctaacatgttggtgtacagaaagatggaggacgtgatcgcgcgaatgcaggacgaaaaaaatggcatacccatcagaaccgtgaaaagctttctcagcaaaatccccagtgtcttttcaggttcagacatcgtccagtggttaatcaaaaatctaacaatcgaggaccccgtggaagctctgcatctcggaaccctcatggcggctcacggttactttttcccaatcagcgaccacgtccttaccctgaaggacgatggcaccttttatcgctttcagactccttatttctggccttccaactgttgggaacccgagaatactgattacgccgtatacctatgcaaaaggactatgcaaaacaaggcgcgcctagagctcgccgattacgaagcggagagccttgccagattacagcgggcctttgcccgaaagtgggaatttatattcatgcaggccgaggctcaggccaaggtcgacaaaaaaagagataagatagaacggaaaatcctggattcccaggagcgggccttctgggatgtccacagaccggtgcctggttgtgtaaataccaccgaggtcgacattaagaagagttctcggatgaggaatcctcacaagacccgcaagtccgtgtacgggcttcagaatgatatcagatcccactccccaacccacacccccactccagagaccaagcccccaacagaggacgaacttcagcagcagattaagtactggcaaatccaattggatcggcacagattgaagatgtcaaaggtcgctgactcattattgtcatacacggagcagtacctggaatacgatccattcttgctcccccccgacccaagcaacccttggctgtccgatgacactaccttctgggaactcgaggcttctaaagagcctagtcaacaacgagtaaagagatggggatttggaatggatgaagccttgaaagatccggtggggcgggaacagttcttaaaatttctggaatctgaattttcttccgaaaacttgagattctggctggcagtggaggatcttaagaagcgccccataaaggaggttccatctagagttcaggagatctggcaggagttccttgccccgggtgcaccatccgccatcaacttggacagcaaaagttacgacaaaacgacgcaaaacgtgaaggaacctggcagatataccttcgaagatgcccaagagcacatctacaagctgatgaaatctgattcttatcctaggtttatcagaagttccgcgtaccaggagctcttgcaggccaagaaaaaaggacgcaatattccaatcttcccctgccacaagaactgtacccctaccctacgggcctccacaaatctgctgtag

SEQ ID NO: 102648 - DNA, 1182 bp, Artificial Sequence
  derived and/or modified sequence
atggccgcccacggctacttcttccccatcagcgaccacgtgctgaccttaaaagacgacgggacattctataggtttcagaccccttatttctggccctctaactgctgggagcccgaaaataccgactacgctgtctatctttgtaagagaacaatgcagaacaaggcaagactggagctggccgactacgaagctgaaagtcttgcgaggctccagcgcgctttcgcccggaagtgggaatttatttttatgcaagcagaagcccaggcaaaggttgacaagaagagagacaagatcgagagaaagattctggacagccaggagcgtgcgttttgggacgtacacagacctgtgcccggctgtgtgaatacaaccgaggtagacattaagaaaagcagtcggatgcggaacccacacaagacgagaaaatccgtgtatggcttacaaaatgacatcagatcccattcacctacacacacacctaccccagaaacaaaaccaccaacagaggacgaattgcagcaacagataaagtattggcagatccagcttgatcgtcacagattgaagatgagcaaagtagcagattctctcctgtcttataccgagcaatacctagagtacgatccattcctgctgccacctgatccctccaatccgtggttaagtgacgacacaacgttctgggaactcgaggcttccaaggagccctcacaacagcgcgttaagcgatgggggtttggaatggacgaggctctgaaggatccagttggtcgcgagcagtttcttaagtttttagaaagtgagttctctagcgaaaatttgagattttggttagcggtcgaggacctcaagaaacgcccaatcaaagaggtaccttcgcgagtgcaggaaatctggcaagaatttcttgccccaggggccccgagtgcaattaatttggacagtaaatcttatgataagaccacacagaacgttaaagagcccggaagatacactttcgaagatgctcaagagcacatatataaactgatgaagtccgactcctatccccgctttattaggtcttctgcctatcaggagctccttcaggccaagaagaaagggagaaacatccccatcttcccttgtcacaaaaattgcaccccaacactgcgcgccagcacgaacctgctgtag

SEQ ID NO: 102649 - DNA, 1356 bp, Artificial Sequence
  derived and/or modified sequence
atggaggatgtgattgctagaatgcaggacgagaagaatggcatccccataaggaccgtgaaatcatttctcagtaaaattccctcagtgttttctggctcggatatcgtccagtggctaatcaaaaaccttaccatcgaagatcccgttgaagccctccacttagggacgctgatggccgctcacgggtatttttttcccatctcagatcacgtattgacactaaaggatgacggcaccttctaccgctttcagaccccatatttttggccaagcaactgctgggaacctgaaaacactgactacgccgtgtacttatgtaaacggaccatgcagaataaagcacgcctggagctggctgattacgaggcggagagtcttgcgaggctacagcgtgctttcgcgagaaaatgggaattcattttcatgcaggctgaagcgcaggccaaggtggataagaaacgggataagatcgagaggaaaatactggatagccaggagagggccttctgggatgtgcaccgtccagttcccggatgcgtcaacacaacggaggtggatatcaaaaaaagctccagaatgcggaacccgcataagactcgtaaatctgtgtatggattgcagaatgatatcaggtcacactcccccacacatacacccactcctgagacaaaacctcccaccgaggacgagctgcagcagcagattaagtactggcagattcagctggaccggcatagacttaaaatgtccaaagtcgcggactccctgctttcctatacagagcagtacctggaatacgacccctttctactgccccctgatccctcaaacccctggctcagcgatgatacaaccttctgggagcttgaggcctcaaaagaacccagtcagcagcgggtgaagcgttggggctttggtatggacgaggccctcaaagacccggtcggcagagaacaattcctaaaattcctcgagtccgaattctccagcgaaaatcttaggttctggctggccgtggaagacctgaagaaacgaccaattaaagaagtacccagcagagttcaggaaatttggcaggagttcttagctccgggagcacccagtgctatcaatcttgactcaaaatcttacgacaagaccacacagaacgtgaaggaacccggtcgctacacttttgaggacgcccaggagcacatttacaaactaatgaagtcagactcctatccccgatttatacgctccagcgcgtaccaggaattactgcaagccaagaagaaaggcagaaatatcccgatcttcccttgccacaaaaactgtactcctaccttgagggcctctaccaacctcctttag

SEQ ID NO: 102650 - DNA, 1434 bp, Artificial Sequence
  derived and/or modified sequence
atggcgcaaggtaacaactacggtcagacatctaacggagtggctgacgagagcccgaacatgctcgtgtaccgaaagatggaggacgtgattgctaggatgcaggacgagaaaaatggtatccccatacgaactgtcaaatccttcttgtctaagatacctagcgtctttagcggatccgacatcgtgcagtggctgattaaaaacctaaccatcgaagatccagttgaggcactgcacctcggtaccctgatggccgctcatggatatttttttcccatctcagatcacgtactgactttgaaggatgatggcaccttttaccggttccagacaccatatttctggcccagcaattgctgggagccggagaacaccgattacgcagtctatctttgtaagcgcacaatgcagaacaaggccagattggagctagccgattatgaggccgagagtctggctcggctacagagagctttcgcacgaaagtgggaattcatatttatgcaggctgaagctcaggccaaagtggacaagaagagagataagatagagagaaagattcttgactcacaggaacgagccttctgggatgtgcaccgcccagtgccaggatgtgtgaacaccacagaggtggacataaagaaatcctctcggatgcgcaatccccataaaaccagaaagtcagtttatggcctgcagaacgatatccgcagccactcgcctacacacacccctaccccagaaaccaagccccctaccgaggacgaactacaacaacagattaagtactggcagatccagctggaccggcaccggctgaaaatgagtaaggtcgccgattcattgctgtcctatactgagcagtatcttgagtatgatccctttcttctgccgccagatcctagcaacccatggctttcggatgacactactttctgggaattagaggccagcaaggagccatcccagcagcgggtgaagcgttggggttttggtatggatgaagctctgaaagaccctgtcggcagggaacagtttctcaagtttctggaatctgagtttagcagtgaaaacctgcggttttggttggccgtggaagatctgaaaaagcgtcctatcaaagaagtccccagtagggttcaggaaatatggcaagaatttttggcgccaggtgccccatcagcaattaaccttgacagtaagtcctatgataagaccacccagaacgtgaaggaacctggtcgctacacctttgaggacgcacaagagcacatttacaaacttatgaagtcggatagctacccccgttttatcagaagcagcgcctatcaggaacttttacaggctaagaagaaaggacgaaatatacccattttcccctgccacaaaaactgcacaccgacattgcgagccagtacaaatctcctgtag

SEQ ID NO: 102651 - DNA, 1182 bp, Artificial Sequence
  derived and/or modified sequence
atggccgctcacggctattttttccccatctctgaccatgtcctcaccctcaaggacgatgggactttctaccgattccagaccccttacttttggccgtccaattgctgggagccagagaacaccgactacgccgtgtatctgtgtaaaaggacaatgcagaataaggctagactggaacttgcagactacgaggctgagtccctggccagactgcagcgcgctttcgcacgcaagtgggagttcatctttatgcaggcagaagcgcaggctaaagtggacaaaaagcgtgataaaatcgagcgcaaaatacttgactcccaggagagggccttctgggacgtccaccggcctgtccccggatgcgtcaacaccacagaagttgatatcaagaagagctcgcgcatgagaaacccacacaagacaagaaagtcggtgtatgggctgcagaacgacattaggtcacactcgcccacacatacgcccactcctgaaactaagccacctaccgaggatgaacttcagcagcagattaagtactggcagatccagctggataggcacagattgaagatgtctaaagttgcagatagtctccttagctacacagaacaatacttggaatatgatccgttcctgctgccacctgaccccagtaatccatggctctcagatgacaccactttctgggaactagaagcctctaaggagcctagtcagcagcgtgtgaagagatggggatttggaatggatgaagccctgaaggaccctgtcgggagggaacagttcttaaagttcctggaaagtgagttctcaagcgaaaacttaagattttggctagccgtggaagacttgaaaaaaagacccatcaaggaggttcctagccgagtgcaagaaatctggcaagagttcctggctccaggggcaccgtccgcaattaatctcgactctaaaagctatgacaaaacgacccaaaacgtaaaggagccaggcagatacaccttcgaggacgctcaggagcatatttataagctgatgaagtcagactcctaccctcggtttattcgcagtagcgcgtatcaagaactcttacaagccaagaaaaaaggtcgcaatatcccaattttcccatgccataagaactgcaccccgacactgagagcatcaacaaacctcctgtag

SEQ ID NO: 102652 - DNA, 1822 bp, Artificial Sequence
  derived and/or modified sequence
tctttgaaagcagtcacacagcaggttaacaccctgcctccatgctgctcagtgaaacgttgcatttatggcttcccaaggaagggggaatctttatgtaggtttacaaagctgcttccgtgaaccgcagccatgagaaggttcacggataaattatgtctggataaagataaaaacagctgaatgcatgtacatgatcacgttttcagtctagaacaccaatcctatttttacttggagttaaaatttttttctcttgtggaaatgatgactcagaaaaatggaatattttggaatacaaccacagaagtcacttttactttccagcctcctattctcactcctttgggatcccatgaactgagaggggatgagactatacaaagaaaacactgccactcatagctacgcacctaaattcagcccgaagcagagatggaagacgtcatagcacggatgcaagatgaaaaaaatggaattcctattcgtacggtcaaaagctttctttccaagatacctagcgtcttctctggttcagacattgttcaatggttgataaagaacttaactatagaagatccagtggaggcgctccatttgggaacattaatggctgcccacggctacttctttccaatctcagatcatgtcctcacactcaaggatgatggcaccttttaccggtttcaaaccccctatttttggccatcaaattgttgggagccggaaaacacagattatgccgtttacctctgcaagagaacaatgcaaaacaaggcacgactggagctcgcagactatgaggctgagagcctggccaggctgcagagagcatttgcccggaagtgggagttcattttcatgcaagcagaagcacaagcaaaagtggacaagaagagagacaagattgaaaggaagatccttgacagccaagagagagcgttctgggacgtgcacaggcccgtgcctggatgtgtaaatacaactgaagtggacattaagaagtcatccagaatgagaaacccccacaaaacacggaagtctgtctatggtttacaaaatgatattagaagtcacagtcctacccacacacccacaccagaaactaaacctccaacagaagatgagttacaacaacagataaaatattggcaaatacagttagatagacatcggttaaaaatgtcaaaagtcgctgacagtctactaagttacacggaacagtatttagaatacgacccgtttcttttgccacctgacccttctaacccatggctgtccgatgacaccactttctgggaacttgaggcaagcaaagaaccgagccagcagagggtaaaacgatggggttttggcatggacgaggcattgaaagacccagttgggagagaacagttccttaaatttctagagtcagaattcagctcggaaaatttaagattctggctggcagtggaggacctgaaaaagaggcctattaaagaagtaccctcaagagttcaggaaatatggcaagagtttctggctcccggagcccccagtgctattaacttggattccaagagttatgacaaaaccacacagaacgtgaaggaacctggacgatacacatttgaagatgctcaggagcacatttacaaactgatgaaaagtgattcatacccacgttttataagatccagtgcctatcaggagcttctacaggcaaagaaaaagggcagaaacatccctattttcccatgccataaaaactgtacaccaacactgagggccagcactaacctgttatgaaaagaggtcatcgttgcagaaagataaaaga

SEQ ID NO: 102653 - DNA, 2206 bp, Artificial Sequence
  derived and/or modified sequence
tgaccttggcggaggagggcacactgataattcttgtatcttgagagtggaccaagttttgggtgacatggcccaggggaataattatgggcagaccagcaacggggtggccgatgaatcacccaacatgctggtgtacagaaagatggaagacgtcatagcacggatgcaagatgaaaaaaatggaattcctattcgtacggtcaaaagctttctttccaagatacctagcgtcttctctggttcagacattgttcaatggttgataaagaacttaactatagaagatccagtggaggcgctccatttgggaacattaatggctgcccacggctacttctttccaatctcagatcatgtcctcacactcaaggatgatggcaccttttaccggtttcaaaccccctatttttggccatcaaattgttgggagccggaaaacacagattatgccgtttacctctgcaagagaacaatgcaaaacaaggcacgactggagctcgcagactatgaggctgagagcctggccaggctgcagagagcatttgcccggaagtgggagttcattttcatgcaagcagaagcacaagcaaaagtggacaagaagagagacaagattgaaaggaagatccttgacagccaagagagagcgttctgggacgtgcacaggcccgtgcctggatgtgtaaatacaactgaagtggacattaagaagtcatccagaatgagaaacccccacaaaacacggaagtctgtctatggtttacaaaatgatattagaagtcacagtcctacccacacacccacaccagaaactaaacctccaacagaagatgagttacaacaacagataaaatattggcaaatacagttagatagacatcggttaaaaatgtcaaaagtcgctgacagtctactaagttacacggaacagtatttagaatacgacccgtttcttttgccacctgacccttctaacccatggctgtccgatgacaccactttctgggaacttgaggcaagcaaagaaccgagccagcagagggtaaaacgatggggttttggcatggacgaggcattgaaagacccagttgggagagaacagttccttaaatttctagagtcagaattcagctcggaaaatttaagattctggctggcagtggaggacctgaaaaagaggcctattaaagaagtaccctcaagagttcaggaaatatggcaagagtttctggctcccggagcccccagtgctattaacttggattccaagagttatgacaaaaccacacagaacgtgaaggaacctggacgatacacatttgaagatgctcaggagcacatttacaaactgatgaaaagtgattcatacccacgttttataagatccagtgcctatcaggagcttctacaggcaaagaaaaagggcagaaacatccctattttcccatgccataaaaactgtacaccaacactgagggccagcactaacctgttatgaaaagaggggaaatctctcacgtccaagaggttaacaagccttgctcagtcttactaaacggatcatcttgtagcatgaatgcagactggagtcactgcacacactttgtagctcaatgttgtgacctggagcagaggacattagaacaagatgttgcatgagcaaaggacctaaattgttatttttgtgtgtacattccatctccaatggactcttccgtctcaatgcctccattccaaactgttgtctgctttctttctccttctactatgctggatctgtgtctcttcctttttaacaagttcaagtgaagtaaaaccttttctttttttccttctttctctctctctctctctcaaagcttcagttagacacacagttcactgaaaattcagtcagtcaaaaactggaagaactgtaaaagaaaaaagtatatatcaataagtatacatgtggcttcacatttattaaacaataaattccgcacagaaagtttcatttcaccaatgtgtcacagtcagaaacaaactcatgtcttcgtctgttgtctgtacattctccgttaatgtttctcgcatttatttttataccatatttaaagaagaaacaccttttactccaaatgtattaaagttgatcccttctctgtaaatttgtgtatgtttatattgttgttttatctttcattaaaagatgcagaatctc

SEQ ID NO: 102654 - DNA, 2209 bp, Artificial Sequence
  derived and/or modified sequence
agcttctgtagtgttgccgaggatgtttggactcttgtttctgatgctggcatgaagatggggagggggacacaggtgaaatagggaaactgtgctagatttgcacctgggatgttcctctttgtcatgacggagatggaagacgtcatagcacggatgcaagatgaaaaaaatggaattcctattcgtacggtcaaaagctttctttccaagatacctagcgtcttctctggacaccatcaacctggagggaccggaaaacacgcatcacagggagtgagccactctgtagttgagaagtcaatttcatactagagctgaatggttttacggtccgcagctgtatccaagaagggcgagggggaaaattccatgcctcactggtaccaggttcagacattgttcaatggttgataaagaacttaactatagaagatccagtggaggcgctccatttgggaacattaatggctgcccacggctacttctttccaatctcagatcatgtcctcacactcaaggatgatggcaccttttaccggtttcaaaccccctatttttggccatcaaattgttgggagccggaaaacacagattatgccgtttacctctgcaagagaacaatgcaaaacaaggcacgactggagctcgcagactatgaggctgagagcctggccaggctgcagagagcatttgcccggaagtgggagttcattttcatgcaagcagaagcacaagcaaaagtggacaagaagagagacaagattgaaaggaagatccttgacagccaagagagagcgttctgggacgtgcacaggcccgtgcctggatgtgtaaatacaactgaagtggacattaagaagtcatccagaatgagaaacccccacaaaacacggaagtctgtctatggtttacaaaatgatattagaagtcacagtcctacccacacacccacaccagaaactaaacctccaacagaagatgagttacaacaacagataaaatattggcaaatacagttagatagacatcggttaaaaatgtcaaaagtcgctgacagtctactaagttacacggaacagtatttagaatacgacccgtttcttttgccacctgacccttctaacccatggctgtccgatgacaccactttctgggaacttgaggcaagcaaagaaccgagccagcagagggtaaaacgatggggttttggcatggacgaggcattgaaagacccagttgggagagaacagttccttaaatttctagagtcagaattcagctcggaaaatttaagattctggctggcagtggaggacctgaaaaagaggcctattaaagaagtaccctcaagagttcaggaaatatggcaagagtttctggctcccggagcccccagtgctattaacttggattccaagagttatgacaaaaccacacagaacgtgaaggaacctggacgatacacatttgaagatgctcaggagcacatttacaaactgatgaaaagtgattcatacccacgttttataagatccagtgcctatcaggagcttctacaggcaaagaaaaagggcagaaacatccctattttcccatgccataaaaactgtacaccaacactgagggccagcactaacctgttatgaaaagaggggaaatctctcacgtccaagaggttaacaagccttgctcagtcttactaaacggatcatcttgtagcatgaatgcagactggagtcactgcacacactttgtagctcaatgttgtgacctggagcagaggacattagaacaagatgttgcatgagcaaaggacctaaattgttatttttgtgtgtacattccatctccaatggactcttccgtctcaatgcctccattccaaactgttgtctgctttctttctccttctactatgctggatctgtgtctcttcctttttaacaagttcaagtgaagtaaaaccttttctttttttccttctttctctctctctctctctcaaagcttcagttagacacacagttcactgaaaattcagtcagtcaaaaactggaagaactgtaaaagaaaaaagtatatatcaataagtatacatgtggcttcacatttattaaacaataaattccgcacagaaagtttcatttcaccaatgtgtcacagtcagaaacaaactcatgtcttcgtctgttgtctgtacattctc

SEQ ID NO: 102655 - DNA, 1356 bp, Artificial Sequence
  derived and/or modified sequence
atggaggacgtgatcgccagaatgcaggacgagaagaacggcatccccatcagaaccgtgaagagcttcctgagcaagatccccagcgtgttcagcggcagcgacatcgtgcagtggctgatcaagaacctgaccatcgaggaccccgtggaggccctgcacctgggcaccctgatggccgcccacggctacttcttccccatcagcgaccacgtgctgaccctgaaggacgacggcaccttctacagattccagaccccctacttctggcccagcaactgctgggagcccgagaacaccgactacgccgtgtacctgtgcaagagaaccatgcagaacaaggccagactggagctggccgactacgaggccgagagcctggccagactgcagagagccttcgccagaaagtgggagttcatcttcatgcaggccgaggcccaggccaaggtggacaagaagagagacaagatcgagagaaagatcctggacagccaggagagagccttctgggacgtgcacagacccgtgcccggctgcgtgaacaccaccgaggtggacatcaagaagagcagcagaatgagaaacccccacaagaccagaaagagcgtgtacggcctgcagaacgacatcagaagccacagccccacccacacccccacccccgagaccaagccccccaccgaggacgagctgcagcagcagatcaagtactggcagatccagctggacagacacagactgaagatgagcaaggtggccgacagcctgctgagctacaccgagcagtacctggagtacgaccccttcctgctgccccccgaccccagcaacccctggctgagcgacgacaccaccttctgggagctggaggccagcaaggagcccagccagcagagagtgaagagatggggcttcggcatggacgaggccctgaaggaccccgtgggcagagagcagttcctgaagttcctggagagcgagttcagcagcgagaacctgagattctggctggccgtggaggacctgaagaagagacccatcaaggaggtgcccagcagagtgcaggagatctggcaggagttcctggcccccggcgcccccagcgccatcaacctggacagcaagagctacgacaagaccacccagaacgtgaaggagcccggcagatacaccttcgaggacgcccaggagcacatctacaagctgatgaagagcgacagctaccccagattcatcagaagcagcgcctaccaggagctgctgcaggccaagaagaagggcagaaacatccccatcttcccctgccacaagaactgcacccccaccctgagagccagcaccaacctgctgtag

SEQ ID NO: 102656 - DNA, 1434 bp, Artificial Sequence
  derived and/or modified sequence
atggcccagggcaacaactacggccagaccagcaacggcgtggccgacgagagccccaacatgctggtgtacagaaagatggaggacgtgatcgccagaatgcaggacgagaagaacggcatccccatcagaaccgtgaagagcttcctgagcaagatccccagcgtgttcagcggcagcgacatcgtgcagtggctgatcaagaacctgaccatcgaggaccccgtggaggccctgcacctgggcaccctgatggccgcccacggctacttcttccccatcagcgaccacgtgctgaccctgaaggacgacggcaccttctacagattccagaccccctacttctggcccagcaactgctgggagcccgagaacaccgactacgccgtgtacctgtgcaagagaaccatgcagaacaaggccagactggagctggccgactacgaggccgagagcctggccagactgcagagagccttcgccagaaagtgggagttcatcttcatgcaggccgaggcccaggccaaggtggacaagaagagagacaagatcgagagaaagatcctggacagccaggagagagccttctgggacgtgcacagacccgtgcccggctgcgtgaacaccaccgaggtggacatcaagaagagcagcagaatgagaaacccccacaagaccagaaagagcgtgtacggcctgcagaacgacatcagaagccacagccccacccacacccccacccccgagaccaagccccccaccgaggacgagctgcagcagcagatcaagtactggcagatccagctggacagacacagactgaagatgagcaaggtggccgacagcctgctgagctacaccgagcagtacctggagtacgaccccttcctgctgccccccgaccccagcaacccctggctgagcgacgacaccaccttctgggagctggaggccagcaaggagcccagccagcagagagtgaagagatggggcttcggcatggacgaggccctgaaggaccccgtgggcagagagcagttcctgaagttcctggagagcgagttcagcagcgagaacctgagattctggctggccgtggaggacctgaagaagagacccatcaaggaggtgcccagcagagtgcaggagatctggcaggagttcctggcccccggcgcccccagcgccatcaacctggacagcaagagctacgacaagaccacccagaacgtgaaggagcccggcagatacaccttcgaggacgcccaggagcacatctacaagctgatgaagagcgacagctaccccagattcatcagaagcagcgcctaccaggagctgctgcaggccaagaagaagggcagaaacatccccatcttcccctgccacaagaactgcacccccaccctgagagccagcaccaacctgctgtag

SEQ ID NO: 102657 - DNA, 1182 bp, Artificial Sequence
  derived and/or modified sequence
atggccgcccacggctacttcttccccatcagcgaccacgtgctgaccctgaaggacgacggcaccttctacagattccagaccccctacttctggcccagcaactgctgggagcccgagaacaccgactacgccgtgtacctgtgcaagagaaccatgcagaacaaggccagactggagctggccgactacgaggccgagagcctggccagactgcagagagccttcgccagaaagtgggagttcatcttcatgcaggccgaggcccaggccaaggtggacaagaagagagacaagatcgagagaaagatcctggacagccaggagagagccttctgggacgtgcacagacccgtgcccggctgcgtgaacaccaccgaggtggacatcaagaagagcagcagaatgagaaacccccacaagaccagaaagagcgtgtacggcctgcagaacgacatcagaagccacagccccacccacacccccacccccgagaccaagccccccaccgaggacgagctgcagcagcagatcaagtactggcagatccagctggacagacacagactgaagatgagcaaggtggccgacagcctgctgagctacaccgagcagtacctggagtacgaccccttcctgctgccccccgaccccagcaacccctggctgagcgacgacaccaccttctgggagctggaggccagcaaggagcccagccagcagagagtgaagagatggggcttcggcatggacgaggccctgaaggaccccgtgggcagagagcagttcctgaagttcctggagagcgagttcagcagcgagaacctgagattctggctggccgtggaggacctgaagaagagacccatcaaggaggtgcccagcagagtgcaggagatctggcaggagttcctggcccccggcgcccccagcgccatcaacctggacagcaagagctacgacaagaccacccagaacgtgaaggagcccggcagatacaccttcgaggacgcccaggagcacatctacaagctgatgaagagcgacagctaccccagattcatcagaagcagcgcctaccaggagctgctgcaggccaagaagaagggcagaaacatccccatcttcccctgccacaagaactgcacccccaccctgagagccagcaccaacctgctgtag

SEQ ID NO: 102658 - protein, 924 aa, Artificial Sequence
  derived and/or modified sequence
MHCVREEHSAVNMNLHYLENGTVMLNFIYRKELFFLPLGFALKALVSFSDYQIFQELIKGKEDDSFLRNSVSQMLRIVMEEGCSTQKQVLNYLGECFRVKLNVPDWYPNEQAAEFLFNQCICIHLKSNTEKFYMLCLMTRKLFALAKGECMEDNPDSLVNQEVLTPGQLFLMFLKEKLEGWLVSIKIAFDKKAQKTSVSMNTDNLMRIFTMGIDLTKPFEYLFATGNLRSKTGLGLLQDSGLCVVADKLNFIRYLSHFRCVHRGADFAKMRTTTVRRLLPESWGFLCPVHTPDGEPCGLMNHLTAVCEVVTQFVYTASIPALLCNLGVTPIDGAPHRSYSECYPVLLDGVMVGWVDKDLAPGIADSLRHFKVLREKRIPPWMEVVLIPMTGKPSLYPGLFLFTTPCRLVRPVQNLALGKEELIGTMEQIFMNVAIFEDEVFAGVTTHQELFPHSLLSVIANFIPFSDHNQSPRNMYQCQMGKQTMGFPLLTYQDRSDNKLYRLQTPQSPLVRPSMYDYYDMDNYPIGTNAIVAVISYTGYDMEDAMIVNKASWERGFAHGSVYKSEFIDLSEKIKQGDSSLVFGIKPGDPRVLQKLDDDGLPFIGAKLQYGDPYYSYLNLNTGESFVMYYKSKENCVVDNIKVCSNDTGSGKFKCVCITMRVPRNPTIGDKFASRHGQKGILSRLWPAEDMPFTESGMVPDILFNPHGFPSRMTIGMLIESMAGKSAALHGLCHDATPFIFSEENSALEYFGEMLKAAGYNFYGTERLYSGISGLELEADIFIGVVYYQRLRHMVSDKFQVRTTGARDRVTNQPIGGRNVQGGIRFGEMERDALLAHGTSFLLHDRLFNCSDRSVAHVCVKCGSLLSPLLEKPPPSWSAMRNRKYNCTLCSRSDTIDTVSVPYVFRYFVAELAAMNIKVKLDVV

SEQ ID NO: 102659 - DNA, 1380 bp, Artificial Sequence
  derived and/or modified sequence
atgaacgttgctatttttgaggacgaggtgtttgctggggttactacacatcaggaactttttccacacagcctactgtctgtgatcgcgaactttattcccttctcagaccacaaccagtcacccaggaatatgtaccagtgtcagatgggaaagcagactatgggattcccgctgttgacgtaccaggatcgatccgataataaactttaccggttgcagaccccacagtctcctctggtacgcccatccatgtatgattactacgatatggacaattatccaatcggaaccaacgcaatagtcgctgttataagttataccggatatgatatggaagatgctatgattgtgaacaaggccagctgggaaagaggattcgcccacggatctgtgtacaagtctgaatttatcgaccttagtgagaaaatcaagcagggggactcgagcctcgtattcggaattaagcccggcgacccacgcgtccttcaaaagctggacgatgatggactgccattcataggcgccaaattacagtacggggatccttattacagctatctgaacttgaatacaggggagagcttcgtaatgtattacaagtcaaaagaaaattgtgtcgtggacaacatcaaagtctgctccaatgacactggatctggaaagttcaagtgcgtgtgcattactatgagagttcccagaaacccaaccataggagataaattcgcgtccaggcacggccagaaaggcatcctctcccgcctttggcctgcagaagacatgccattcacagagtctggcatggttcccgacatactgtttaaccctcacggattcccaagtagaatgacaatagggatgctgatcgaatccatggcaggcaagagcgccgcactgcacggcctatgtcacgatgctacgccatttattttctcagaggagaactccgctctggaatattttggcgagatgctgaaggcagctggttacaatttttacgggaccgaaagactctattctggaatctctgggctcgagctcgaggctgacatattcatcggggttgtctattaccagcggctgcggcatatggtgtccgacaaattccaagtgcgcacaacaggagctagagatcgagtgaccaatcaacctattggcggaaggaatgtccaggggggcattcgattcggagaaatggagagagacgccctcctggcacatggcactagcttcctgctgcacgaccgcctgtttaactgctcagatcggtccgtggctcacgtgtgcgaggtgtggcagttcactctgtctacagtcggagaggctacgccattcctggtgtgccacgcccagcagaaaatccaactgtattcagtgtag

SEQ ID NO: 102660 - DNA, 1380 bp, Artificial Sequence
  derived and/or modified sequence
atgaatgtggccatctttgaagatgaggtgtttgctggggtgaccacccaccaggagctgttcccccacagcctgctgtctgtgattgccaacttcatccccttcagtgaccacaaccagagccccaggaacatgtaccagtgccagatgggcaagcagaccatgggcttccccctgctgacctaccaggacagaagtgacaacaagctgtaccgcctgcagaccccccagagccccctggtgcggcccagcatgtatgactactatgacatggacaactaccccatcggcaccaatgccatcgtggccgtcatctcctacacaggctatgacatggaggatgccatgattgtgaacaaggcctcctgggagcggggctttgcccacggctctgtgtacaagtctgagttcatcgacctgtctgagaagatcaagcagggcgacagcagcctggtgtttggcatcaagccaggggacccccgggtgctgcagaagctggatgatgatggcctgcccttcatcggggccaagctgcagtacggggacccctactacagctacctgaacctgaacacaggagagagctttgtgatgtactacaagagcaaggagaactgtgtggtggacaacatcaaggtgtgcagcaatgacaccggcagcggcaagttcaagtgtgtgtgcatcaccatgagggtgcccaggaaccccaccatcggggacaagtttgccagccgccacggccagaagggcatcctgagccggctgtggccagctgaggacatgcccttcacagagagcggcatggtgcctgacatcctcttcaacccccacggcttccccagcaggatgaccatcggcatgctgattgaatccatggccggcaagtctgctgccctgcacggcctgtgccatgatgccacccccttcatcttcagcgaggagaacagcgccctggagtactttggagagatgctgaaggccgccggctacaacttctatggaacagagcggctgtacagcggcatcagcggcctggagctggaggccgacatcttcatcggcgtggtgtactaccagaggctgcggcacatggtgtctgacaagttccaggtgaggaccaccggggcccgggacagagtgaccaaccagcccatcggcggcagaaatgtgcagggcggcatccgctttggagagatggagagagatgccctgctggcccacggcaccagcttcctgctgcatgacaggctcttcaactgcagcgacagatctgtggcccacgtgtgtgaggtgtggcagttcaccctgagcacagtgggggaggccacccccttcctggtgtgccacgcccagcagaagatccagctgtacagcgtgtag

SEQ ID NO: 102661 - DNA, 2859 bp, Artificial Sequence
  derived and/or modified sequence
cagatcttcatgaatgtcgctatctttgaggatgaagtttttgctggagttaccacacaccaggaactctttccacacagcctgctgagtgtgattgccaacttcatccctttctctgatcacaaccagagtccacggaacatgtaccaatgccagatgggtaagcaaactatgggctttccacttctcacttatcaagaccgatcggataacaaactgtatcgtcttcagactcctcagagtcccttggtgagaccctccatgtatgattattatgacatggataactatccaattgggaccaatgccatcgttgctgtgatttcttacactggctatgatatggaagatgccatgattgtgaataaggcctcttgggaacgaggctttgcccatggaagtgtctacaagtctgagttcatagacctctctgaaaaaattaaacaaggagatagtagcctggtgtttggcatcaaacctggtgacccacgcgttctgcagaagttagatgacgatggattgccgtttataggagcaaaactgcagtacggagatccgtattacagctacctcaacctcaacaccggggaaagttttgtgatgtactataagagtaaagaaaattgtgttgtggataacatcaaagtgtgcagtaatgacactgggagtggaaaattcaagtgtgtttgcatcactatgagagtgcctcggaacccaactatcggagataaatttgccagtcgccatgggcagaagggcattttaagcagattgtggccggctgaggacatgccttttactgagagtgggatggtcccagacattctgttcaatccccatggttttccatcccgcatgaccattgggatgttaattgagagtatggccgggaagtctgcagctttgcatggtctctgccatgatgctacacccttcatcttctcagaggagaactcggccttagaatactttggtgagatgttaaaggctgctggctacaatttctatggcaccgagaggttatatagtggcatcagtgggctagaactggaagcagacatcttcataggagtggtttattatcagcgcttacgccatatggtctcagacaaatttcaagtaaggacaactggagcccgagacagagtcaccaaccagcctattgggggaagaaatgtccagggtggaatccgttttggggagatggaacgggatgcgcttttagctcatggtacatcttttctccttcatgaccgcctcttcaactgctcagatcggtcggtagcccatgtgtgtgaagtgtggcagtttactctctccactgttggagaagccacccccttcttggtctgccatgcgcaacagaaaatacaactgtactctgtgtagtcgcagtgacactatcgatactgtttctgtgccttatgtttttcggtattttgtagctgaactggcagctatgaacatcaaagtgaaactggatgttgtttaacttgatgttgaccttttggattaagaggactatcagattaaagcaaaatgtaattttaattcaatgaagatatcattaccaggttactcttgagatttttcaacggtgttagaactctcaaccaagacctgaaaaccaagtatgcaaggtttctgaatctctctggtagattaactattgacaatgattttctgttatctttgttcaaaaagttcatgtcttctcaaaatatgaaatattgataaatggaagagcatacggtgacaagtctcctttccaaccccaggttccctacaccctgctctcagcaggcagtgagtgtcacacacctgttaatccatcttgagcaggacagtactatacaaatagaatgcaagctgtaatgtaattttatattttcttatagccacgttgaagtaaaaacaaacaggtacagtgttttttaccagctttatagaagtacagttgttacatatttaatgaatacaatttgatgggtctgactatatgcacacacctttgataccatcaccacaatcagggtaataaacatacctgtcatctccacaagtttcctcctgcccctttgttttttgctttttggttgctgttgagtttttgttttgtcttctgtggtaagaacacttaactcaagacctaccctcttaacaaatctttaagtgcacgatatagtattgttaattccaggcaccatgttgtacaacagatctttagaccttacttgtcttgcataactgaagctttatacctgttgaacaactctccatttccctggcccctagcaaccacccttctaccctgtttctatgagtttgactattacagatatctcatatagtgggatcatgcaatatttgtcctgtgactggcttatttcacttagcatagtgaaataagattcatccattttggaagccaggcatggtgctgtgcatctatagtccctgctatttgagaggctgaggtgggaggatcatttgagtgcaggagttcaaggacagcctgggtaatataggaagaccctgtcttgaagaccctgacctcaagtgatccacccacctcggcctccgaaagtgctaggattacaggtgtgagccactgtgcctggcctccggtgagtattttatatttagtctacacttccatacttggcttttttctgcttttatattgatctgctttcatagcagtgtgtagagtgccacttatgttttctttcttgtgtacagtattttattgtatggatttaccatcccctgtgtatttaagttgttccattctttggccattataacttttttctgcaaatattctggtgacttatctttggccattataaactgttg

SEQ ID NO: 102662 - DNA, 1380 bp, Artificial Sequence
  derived and/or modified sequence
atgaacgtggccatcttcgaggacgaggtgttcgccggcgtgaccacacaccaggaattattcccccatagtttactgagtgtcatagctaacttcattccattcagcgaccacaaccagagccctcggaacatgtaccagtgccagatggggaagcagacgatggggttcccgctccttacatatcaggaccgtagcgacaacaagctgtatagactgcaaactccgcagtccccactagttcgcccaagcatgtatgactactatgatatggacaactaccccatagggaccaatgctatcgttgcagtgatttcctacactggatacgacatggaggatgcaatgatcgtaaataaagcgtcttgggagcggggcttcgcacatggatcggtatacaaaagcgaatttattgatttatctgagaagataaaacagggcgactctagtttggttttcggaataaagccaggggaccccagagtactccaaaagctggatgatgatggactgcctttcatcggcgccaaattacagtacggcgatccatactactcatatctgaatcttaacaccggtgaatcatttgtcatgtattataaaagcaaggaaaactgcgtcgtagacaatatcaaggtctgcagcaacgacacaggctctggcaagttcaaatgtgtttgtatcactatgcgggtaccccgcaaccccacaatcggcgacaagttcgcatcccgtcatggccagaaaggcatcttgtcaaggctttggccagctgaggacatgccatttacggagagcgggatggtacccgacattcttttcaacccacacggctttccctctagaatgaccatcggcatgttgatcgagtccatggccggcaagtccgccgcattgcacggactttgccacgatgctaccccctttattttctcagaagaaaatagtgcgctcgagtactttggcgagatgttgaaagcagccggttataacttctacgggaccgagagactttacagtggaattagcggtctcgagctggaggcggatattttcattggagtggtgtattaccaaaggctgaggcatatggtctcagacaagtttcaggtgcggaccactggcgctcgagaccgggttactaatcagcctatcggaggtaggaacgttcagggcgggatcaggttcggcgagatggagcgcgacgccctgctcgcacacggcacatcgttcctgctgcacgaccgtctgtttaattgctctgatcgatccgtggcccatgtgtgtgaggtgtggcagtttaccctgagtacagtgggggaagcgactccattcctggtgtgtcatgcccagcaaaagatccagctttactccgtgtag

SEQ ID NO: 102663 - DNA, 1380 bp, Artificial Sequence
  derived and/or modified sequence
atgaacgtggccatcttcgaggatgaggtgttcgcgggtgtgacaacccaccaagagctgttcccccatagtctgttatctgtgatcgcaaattttatcccgttctccgatcacaatcagtctcccagaaacatgtatcagtgtcagatgggtaagcagaccatgggatttcccctgctcacatatcaagatcggagtgataacaagctttaccgcctgcaaaccccccaaagtcctctggtcaggcccagtatgtacgactactatgatatggataactaccctattggaactaatgctattgtggctgtgatctcatacaccggctatgatatggaggacgccatgatcgtcaacaaggcatcttgggaaagaggcttcgcacatggctctgtgtacaaatccgagttcatagatctgtccgaaaagataaagcagggcgacagtagtttagtcttcggcatcaaacccggtgaccccagggtgctccagaagctagatgacgatggcctgccattcattggagctaaactacagtacggggatccttactattcctacttgaacttgaacacaggagaatcattcgtgatgtattacaaaagtaaggaaaattgcgtggtggacaacattaaagtgtgtagcaacgacactggttcaggtaaattcaaatgcgtttgcatcaccatgcgggtacctcggaacccaacgatcggggataagttcgcttctcgccacggacagaaaggtatcttgtcaagattatggcccgcagaagacatgccattcacggaatctggaatggttccagatatcttatttaacccccatggctttccatcccggatgacaatcgggatgctcattgaatcaatggcgggaaagtccgccgcactccacgggttgtgccacgatgccaccccgtttatcttttccgaggagaactcagctctcgaatacttcggagaaatgctgaaggctgcaggctacaatttctacggcaccgaaagactgtactctgggatctcaggcctggagctggaagcggacatttttatcggggtggtctattaccagagactgaggcatatggtttcggacaaatttcaggtgcgaactactggtgccagagatcgagtaacgaaccagcccatcggcggtagaaacgtccaaggagggatcaggttcggagaaatggagcgtgacgcgctgcttgcccacggcacaagcttcctactgcatgatagactttttaattgttccgaccgcagcgtagcccacgtttgcgaagtctggcagttcacattgtctaccgtgggcgaggctactcccttccttgtttgccacgcacagcagaaaattcagctgtattccgtttag

SEQ ID NO: 102664 - DNA, 1380 bp, Artificial Sequence
  derived and/or modified sequence
atgaacgtggccatcttcgaggacgaggtgttcgccggcgtgaccacccaccaggagctgttcccccacagcctgctgagcgtgatcgccaacttcatccccttcagcgaccacaaccagagccccagaaacatgtaccagtgccagatgggcaagcagaccatgggcttccccctgctgacctaccaggacagaagcgacaacaagctgtacagactgcagaccccccagagccccctggtgagacccagcatgtacgactactacgacatggacaactaccccatcggcaccaacgccatcgtggccgtgatcagctacaccggctacgacatggaggacgccatgatcgtgaacaaggccagctgggagagaggcttcgcccacggcagcgtgtacaagagcgagttcatcgacctgagcgagaagatcaagcagggcgacagcagcctggtgttcggcatcaagcccggcgaccccagagtgctgcagaagctggacgacgacggcctgcccttcatcggcgccaagctgcagtacggcgacccctactacagctacctgaacctgaacaccggcgagagcttcgtgatgtactacaagagcaaggagaactgcgtggtggacaacatcaaggtgtgcagcaacgacaccggcagcggcaagttcaagtgcgtgtgcatcaccatgagagtgcccagaaaccccaccatcggcgacaagttcgccagcagacacggccagaagggcatcctgagcagactgtggcccgccgaggacatgcccttcaccgagagcggcatggtgcccgacatcctgttcaacccccacggcttccccagcagaatgaccatcggcatgctgatcgagagcatggccggcaagagcgccgccctgcacggcctgtgccacgacgccacccccttcatcttcagcgaggagaacagcgccctggagtacttcggcgagatgctgaaggccgccggctacaacttctacggcaccgagagactgtacagcggcatcagcggcctggagctggaggccgacatcttcatcggcgtggtgtactaccagagactgagacacatggtgagcgacaagttccaggtgagaaccaccggcgccagagacagagtgaccaaccagcccatcggcggcagaaacgtgcagggcggcatcagattcggcgagatggagagagacgccctgctggcccacggcaccagcttcctgctgcacgacagactgttcaactgcagcgacagaagcgtggcccacgtgtgcgaggtgtggcagttcaccctgagcaccgtgggcgaggccacccccttcctggtgtgccacgcccagcagaagatccagctgtacagcgtgtag

SEQ ID NO: 102665 - protein, 469 aa, Artificial Sequence
  derived and/or modified sequence
MAQGNNYGQTSNGVADESPNMLVYRKMEDVIARMQDEKNGIPIRTVKSFLSKIPSVFSGSDIVQWLIKNLTIEDPVEALHLGTLMAAHGYFFPISDHVLTLKDDGTFYRFQTPYFWPSNCWEPENTDYAVYLCKRTMQNKARLELADYEAESLARLQRAFARKWEFIFMQAEAQAKVDKKRDKIERKILDSQERAFWDVHRPVPGCVNTTEVDIKKSSRMRNPHKTRKSVYGLQNDIRSHSPTHTPTPETKPPTEDELQQQIKYWQIQLDRHRLKMSKVADSLLSYTEQYLEYDPFLLPPDPSNPWLSDDTTFWELEASKEPSQQRVKRWGFGMDEALKDPVGREQFLKFLESEFSSENLRFWLAVEDLKKRPIKEVPSRVQEIWQEFLAPGAPSAINLDSKSYDKTTQNVKEPGRYTFEDAQEHIYKLMKSDSYPRFIRSSAYQELLQAKKKGKSLTSKRLTSLAQSY

SEQ ID NO: 102666 - DNA, 1410 bp, Artificial Sequence
  derived and/or modified sequence
atggcccaggggaataactatggccaaacctccaatggggtggctgatgagtcccccaacatgcttgtgtatagaaagatggaggatgtaatcgcaagaatgcaggacgaaaagaatgggattcctattcgaacagtcaagagctttttgtcaaagatcccctctgtcttctcgggctccgacatcgtgcagtggctgatcaagaatctgaccattgaggatcccgtggaagctttgcacttggggaccttaatggccgcgcatggctattttttccccatctctgatcacgtcttaactctcaaggacgacgggacattctatcgttttcagaccccttacttctggccctcgaactgttgggaacctgaaaatactgattatgcagtctatctgtgcaagagaacaatgcagaataaagcgcggttggagctcgccgactatgaggctgagtcactggctaggctgcaaagggcttttgccagaaagtgggaatttatcttcatgcaggcggaggcccaggcaaaggtcgacaaaaaaagggacaaaattgagcggaagatcttggactcccaggaacgagctttctgggacgtgcaccgcccggttcccggatgcgtaaatacaactgaagtggatatcaaaaagagcagcagaatgagaaatccacataaaactaggaaaagcgtatacggactccagaacgacatcagaagccacagccccactcatacacccaccccagaaacaaagccgccaaccgaggatgagttgcaacagcagattaagtattggcagatacaactagatagacacagactgaagatgagcaaggtggcagatagcctcctgagttacaccgagcagtaccttgaatacgaccccttcttacttccgccagaccctagcaacccctggttgagtgacgatactacgttttgggagctggaagcatctaaggagccctcccagcagcgggtaaaaaggtggggatttggaatggacgaggccctgaaagatcctgtgggcagagagcagttcctgaaattcctagagagcgaattttcctctgagaatctccggttttggctcgccgtggaggatctgaagaagcgacctattaaggaggtgcctagcagagtacaggaaatttggcaggaattcctagctcctggcgccccttccgcaatcaacttagattccaagagctatgacaaaactactcagaatgtgaaagaacccgggcgctatactttcgaggacgcccaggaacatatctataaacttatgaaaagcgattcttatccaagatttattcggtcgtcggcctatcaagaattgttgcaggcgaaaaagaagggcaagagtctcacctccaaaaggctgacctcccttgcccagagctactag

SEQ ID NO: 102667 - DNA, 1410 bp, Artificial Sequence
  derived and/or modified sequence
atggcccagggcaataactacgggcagaccagcaacggggtcgcggacgaatccccaaatatgctggtgtaccgaaagatggaagatgttattgctcggatgcaagacgaaaagaatggaattcccatccgaaccgtaaaaagtttccttagtaagatccccagtgtattttcgggctctgacatagttcagtggctaatcaagaatctcaccattgaggatcctgtggaggccctgcatctgggtacactgatggctgctcacggctacttctttccgatctctgatcatgtactgaccctgaaggacgatggaacattttaccgatttcagacaccctacttctggccctccaattgctgggagcctgaaaatacggactacgctgtgtatctatgtaaaaggaccatgcagaataaggcccggctcgagttggcagattacgaagctgaaagccttgctagactgcagcgtgcttttgcacgcaaatgggagttcatctttatgcaagctgaggcccaagctaaggtcgataaaaagagagataaaattgaaaggaaaatactggattctcaggaacgggccttttgggacgtacacaggccagtgccaggatgtgtgaatacaactgaagtggacattaaaaagagtagtcggatgcgcaaccctcacaagacgaggaagtcggtgtatggtctgcaaaatgatatcaggagccattctcctacacatactccaacaccagaaacaaagccacctactgaagacgaacttcagcaacaaatcaagtattggcagattcagttggatcgtcatagactaaaaatgtccaaggtggcagattcgctactcagctatactgagcagtacctggaatatgatccatttctattgcctccagatccgagtaacccttggctgtctgacgatacaaccttctgggaattggaagcaagtaaggaaccaagccagcagagagtaaagaggtggggcttcgggatggacgaggctttaaaggatcctgtgggaagagaacagtttcttaagtttttagaatctgaatttagctctgaaaatctgcgattttggttggctgtcgaagatctaaagaaacggccgataaaggaggttccctctagggtacaggagatatggcaggaatttcttgcccccggcgccccgtctgcaattaatctggacagcaaaagctatgacaagaccacccagaatgttaaggagcctggccgctacacatttgaggatgcgcaagagcacatctataaactgatgaaatccgatagctaccctaggttcattagaagcagcgcatatcaggaactactgcaagcaaagaaaaagggtaagtccctcacttctaagagacttacgtccttggcccagagctattag

SEQ ID NO: 102668 - DNA, 1410 bp, Artificial Sequence
  derived and/or modified sequence
atggcccagggcaacaactacggccagaccagcaatggagtggctgatgagagccccaacatgctggtgtacaggaagatggaggatgtgattgccaggatgcaggatgagaagaatggcatccccatcagaacagtgaagagcttcctgagcaagatccccagcgtcttcagcggcagtgacatcgtgcagtggctgatcaagaacctgaccattgaagatcctgtggaggccctgcacctgggcaccctgatggccgcccacggctacttcttccccatcagtgaccacgtgctgaccctgaaggatgatggcaccttctaccgcttccagaccccctacttctggcccagcaactgctgggagcctgagaacacagattatgctgtgtacctgtgcaagaggaccatgcagaacaaggcccggctggagctggccgactatgaggccgagagcctggcccggctgcagagggcctttgccaggaagtgggagttcatcttcatgcaggccgaggcccaggccaaggtggacaagaagagggacaagattgaaaggaagatcctggacagccaggagcgggccttctgggatgtgcacaggcctgtgcccggctgtgtgaacaccacagaggtggacatcaagaagagcagcaggatgaggaacccccacaagaccaggaagtctgtgtatggcctgcagaatgacatccgcagccacagccccacccacacccccaccccagagaccaagccacccacagaagatgagctgcagcagcagatcaagtactggcagatccagctggacagacaccggctgaagatgagcaaggtggccgacagcctgctgagctacacagagcagtacctggagtatgaccccttcctgctgcccccagaccccagcaacccctggctgagtgatgacaccaccttctgggagctggaggccagcaaggagcccagccagcagagggtgaagcgctggggcttcggcatggatgaggccctgaaggaccctgtgggccgggagcagttcctgaagttcctggagagcgagttcagcagcgagaacctgcgcttctggctggccgtggaggacctgaagaagaggcccatcaaggaggtgcccagccgggtgcaggagatctggcaggagttcctggcccctggggcccccagcgccatcaacctggacagcaagagctatgacaagaccacccagaatgtgaaggagcccggccgctacacctttgaagatgcccaggagcacatctacaagctgatgaagagtgacagctacccccgcttcatccgcagcagcgcctaccaggagctgctgcaggccaagaagaagggcaagagcctgaccagcaagaggctgaccagcctggcccagagctactag

SEQ ID NO: 102669 - DNA, 1410 bp, Artificial Sequence
  derived and/or modified sequence
atggcccagggcaacaactacggccagaccagcaacggcgtggccgacgagtcacctaacatgctggtttacaggaagatggaggatgtgatagcacggatgcaagacgagaaaaatgggattccgattagaactgtaaagtcctttctatctaaaattccaagtgtctttagtggatcagatattgttcagtggctgattaagaatctaactatcgaggaccccgtggaggctctacaccttggcacactcatggcagcgcatggctatttcttccctatttctgatcacgtgctcaccctcaaagacgatggaacattctaccgctttcagaccccttacttctggccctctaactgttgggaaccagagaatactgattacgctgtttacctctgtaagagaacgatgcagaacaaagctcgtctggaattggccgactacgaggcagaaagcctggctcggcttcaacgcgccttcgcccggaaatgggaatttatattcatgcaggctgaagcgcaggcgaaggtcgataagaaacgggacaagatagagcgcaagattctggactcgcaggaaagagccttctgggatgtgcaccgccctgtgccaggatgcgtgaacacaaccgaggtggatattaaaaaaagttcccgcatgagaaacccccacaaaacacgcaagagtgtctatggcctgcagaacgacatcagatcacattcacccacccatacccccactcctgagaccaagcctcccacggaagatgaactgcagcaacagataaagtattggcagatccagctggaccgacaccgccttaagatgtccaaagtagcagacagcctgctctcatacaccgaacaatacctggagtacgatccgtttctacttccccccgacccaagcaatccatggctttctgacgacactacattctgggagctggaggccagtaaggaaccttctcaacaacgcgtaaagagatgggggttcggcatggacgaggcactgaaggacccagtaggccgcgaacagtttctgaaatttttggaatccgagttttctagcgagaatttgaggttctggctggcagtggaggacctgaaaaaaagacccatcaaagaggtcccaagtagggtacaggagatctggcaggaatttttggcacccggcgcgccctcggcgatcaacctggatagcaagtcctatgataagacaacccagaatgtcaaggaacctggcagatacaccttcgaggacgcccaggagcatatctacaagcttatgaaaagtgattcctatccgcgattcattaggtcatctgcttatcaagagcttcttcaagccaagaagaaagggaaaagtctgacaagcaaacgtctcaccagtctcgctcagagctattag

SEQ ID NO: 102670 - DNA, 1410 bp, Artificial Sequence
  derived and/or modified sequence
atggcccagggcaacaactacggccagaccagcaacggcgtggccgacgaaagtccaaatatgctcgtttatagaaagatggaggacgtcattgcacgcatgcaggacgaaaagaacgggatcccaataagaactgtgaagtccttcctgtcaaaaataccctccgtgttcagcggctcggacatagtgcaatggctgataaagaacctgactattgaagacccagttgaggcccttcatctggggaccctgatggcagcccacggctattttttcccaatcagcgatcacgttctgactctcaaggacgatggcaccttttacaggtttcagacaccatacttctggccctcaaattgctgggagcccgagaataccgactatgccgtgtatctgtgcaaacggacgatgcaaaataaagccagactggaacttgcagactatgaggccgagtccctcgcacgcctgcaaagggctttcgcccggaagtgggagttcattttcatgcaggcggaggcccaagccaaggtggataaaaagcgggataagatcgagcggaagattttagattcacaggagcgtgccttttgggacgtacatcgcccagttcccggttgcgtgaacactacagaggtcgatatcaaaaagagcagtaggatgcgcaatccacacaagacgcgtaagagcgtgtatgggttgcagaacgatataagatctcacagcccaacacacacgccaactccagaaacgaaaccaccaactgaagatgaattacagcaacagatcaaatactggcagattcaactggatagacacaggctaaagatgagtaaggtcgcagactccttgttgtcctatacagagcagtatctcgaatatgacccctttctgctaccaccagatccatctaacccttggctttctgatgataccacattttgggagctcgaggccagtaaagagccatcccaacaacgtgtgaaaaggtggggtttcggaatggacgaagctctgaaggatcccgtaggccgagaacagttcctgaagttcctggagtctgagttcagttccgaaaatctacggttctggctggctgttgaagacctgaagaagcggcccattaaagaggtgccgtctcgggtccaggaaatctggcaggaattcctggccccaggggccccatccgccatcaatctggatagtaagtcatacgataagactacacagaacgtgaaggagcctggcagatacacgtttgaagacgcccaggagcatatatacaagctgatgaagtcagattcctatcctcgtttcattagatcctccgcctatcaggagctccttcaagcgaagaagaagggaaagagcctcactagcaaacgcctcacgagcctggctcagagttactag

SEQ ID NO: 102671 - DNA, 1410 bp, Artificial Sequence
  derived and/or modified sequence
atggcacaggggaataactacggccaaacctcaaatggggttgccgacgagtctccaaatatgctagtataccgcaagatggaggatgtgattgcgagaatgcaggacgagaaaaacggtatcccaattcggacagtgaagagtttcctatccaagatccctagcgttttttctggttctgatattgtacaatggcttatcaagaacttaaccattgaagatcccgtggaagctctgcacctgggtactctcatggccgctcacggatacttctttcccatatccgaccacgtgttgactcttaaagacgatggcactttttataggtttcagaccccctatttctggccgagcaactgctgggagccggagaacaccgattatgcggtgtatctctgtaaaagaacaatgcaaaacaaggccaggctggaactagctgattacgaggctgaatctctggctcgccttcagcgcgctttcgcgaggaaatgggagttcatcttcatgcaggcagaggctcaagctaaagtcgacaaaaaaagagacaaaatcgaacgtaagatacttgactcccaggagcgagccttttgggacgttcataggcctgttcctggctgcgtgaataccacggaagtggatataaaaaagtcatccagaatgcgcaacccgcacaagactagaaagtcagtctacggcctccagaatgacattagatcgcacagtccaacccacactcccactccggagaccaagcccccaactgaagacgaactgcaacagcaaataaaatactggcagattcagctggatcggcatcgactcaaaatgtctaaagtggctgacagtcttctatcttatacggaacagtacctggaatacgacccattcctgttgccccctgatccgtccaacccttggttgtccgacgacaccacattttgggagctagaggccagtaaagagccctctcagcagcgagtcaaacgatggggctttggtatggacgaagccctgaaggaccccgttggtcgcgaacaattcctaaagtttctggagtccgaattctcgtctgaaaatctcaggttttggctggctgtcgaagatctgaaaaagagacctatcaaagaagtgcccagtcgggtgcaagagatatggcaggagttcctcgcccctggcgcaccaagcgccatcaacctcgattctaagagctacgacaaaaccacacagaatgtgaaggagcctggtcgctacacgttcgaggacgcacaggagcacatctataagctgatgaagagcgatagttaccccagatttatacgatcatccgcgtatcaagagctgctccaggccaagaaaaaagggaagagcctgacctccaaacggttgacaagcctggctcagtcctactag

SEQ ID NO: 102672 - DNA, 1410 bp, Artificial Sequence
  derived and/or modified sequence
atggcacaaggaaacaactacggccagacctctaacggcgtggctgatgaatcccccaacatgctggtctatagaaaaatggaagacgtcatcgctaggatgcaggacgaaaagaatggaattcccatacgcactgttaagtcctttctgagtaagatccctagcgtgttttcaggatctgatatcgtacagtggctgataaagaacctgaccatcgaggacccggtggaagccttgcacctcggtacactgatggcggctcatggctacttcttcccgattagcgatcacgtccttaccctgaaagacgatggtaccttttacagatttcaaaccccctacttctggccttccaattgctgggagccagaaaacacagattatgccgtttatctctgtaagcgcaccatgcagaacaaagcacgcctcgagttggccgattatgaagctgaatccctcgcgcgtcttcaacgagcatttgccagaaaatgggaattcatttttatgcaggcagaagcgcaggcaaaagtggacaagaaacgggacaaaatagaaagaaagatcctggactcccaggaaagagctttctgggacgtacaccggccagtgccaggatgcgtgaacacaaccgaagtggatatcaagaagagctcacggatgcgaaatccacataagaccagaaaatctgtctacggcctccagaacgatatcaggagccactcccccacacatacaccaacaccagaaaccaaacccccaaccgaagacgaattacagcaacagatcaagtattggcagattcagctggatcgtcaccgtctgaagatgagtaaggtggccgacagtctcctgtcatatactgaacaatacttagagtatgacccctttttgttgcccccagacccgagcaatccatggctgagcgatgatacaactttttgggagctggaagccagcaaagaaccatcccagcaacgggtgaagcgctggggctttggaatggacgaggcactcaaggacccagtcgggcgagaacaattcctgaaattcctcgaaagcgagttttcttccgagaacctgcgcttttggctggcagttgaggaccttaagaagagacccatcaaggaagtcccgagcagggtgcaggaaatatggcaagaattccttgctcctggcgctcctagcgctatcaacctggacagtaagagttatgataagaccacgcagaatgtgaaagagcccggacgatatacatttgaagatgctcaggagcacatctacaagctgatgaaatccgactcctacccacgttttattcgtagttccgcataccaagaactgctgcaggcgaagaaaaaaggtaagtccctcacctctaagcgcctcaccagcttggcgcaatcttactag

SEQ ID NO: 102673 - DNA, 1410 bp, Artificial Sequence
  derived and/or modified sequence
atggcccaggggaataattatgggcagaccagcaacggggtggccgatgaatcacccaacatgctggtgtacagaaagatggaagacgtcatagcacggatgcaagatgaaaaaaatggaattcctattcgtacggtcaaaagctttctttccaagatacctagcgtcttctctggttcagacattgttcaatggttgataaagaacttaactatagaagatccagtggaggcgctccatttgggaacattaatggctgcccacggctacttctttccaatctcagatcatgtcctcacactcaaggatgatggcaccttttaccggtttcaaaccccctatttttggccatcaaattgttgggagccggaaaacacagattatgccgtttacctctgcaagagaacaatgcaaaacaaggcacgactggagctcgcagactatgaggctgagagcctggccaggctgcagagagcatttgcccggaagtgggagttcattttcatgcaagcagaagcacaagcaaaagtggacaagaagagagacaagattgaaaggaagatccttgacagccaagagagagcgttctgggacgtgcacaggcccgtgcctggatgtgtaaatacaactgaagtggacattaagaagtcatccagaatgagaaacccccacaaaacacggaagtctgtctatggtttacaaaatgatattagaagtcacagtcctacccacacacccacaccagaaactaaacctccaacagaagatgagttacaacaacagataaaatattggcaaatacagttagatagacatcggttaaaaatgtcaaaagtcgctgacagtctactaagttacacggaacagtatttagaatacgacccgtttcttttgccacctgacccttctaacccatggctgtccgatgacaccactttctgggaacttgaggcaagcaaagaaccgagccagcagagggtaaaacgatggggttttggcatggacgaggcattgaaagacccagttgggagagaacagttccttaaatttctagagtcagaattcagctcggaaaatttaagattctggctggcagtggaggacctgaaaaagaggcctattaaagaagtaccctcaagagttcaggaaatatggcaagagtttctggctcccggagcccccagtgctattaacttggattccaagagttatgacaaaaccacacagaacgtgaaggaacctggacgatacacatttgaagatgctcaggagcacatttacaaactgatgaaaagtgattcatacccacgttttataagatccagtgcctatcaggagcttctacaggcaaagaaaaaggggaaatctctcacgtccaagaggttaacaagccttgctcagtcttactaa

SEQ ID NO: 102674 - DNA, 2295 bp, Artificial Sequence
  derived and/or modified sequence
gggcggcggcgaggcgagggtggcggtcgcctgagcagctagagccggggcggcgcggaatccgcatccgccgcgagtgtgatgaagctaccctgcctcgctgctccgcttgccgccagctgacaccgcctgcacccagcccgcccgggaggggagacgccgcggggccgtgaccttggcggaggagggcacactgataattcttgtatcttgagagtggaccaagttttgggtgacatggcccaggggaataattatgggcagaccagcaacggggtggccgatgaatcacccaacatgctggtgtacagaaagatggaagacgtcatagcacggatgcaagatgaaaaaaatggaattcctattcgtacggtcaaaagctttctttccaagatacctagcgtcttctctggttcagacattgttcaatggttgataaagaacttaactatagaagatccagtggaggcgctccatttgggaacattaatggctgcccacggctacttctttccaatctcagatcatgtcctcacactcaaggatgatggcaccttttaccggtttcaaaccccctatttttggccatcaaattgttgggagccggaaaacacagattatgccgtttacctctgcaagagaacaatgcaaaacaaggcacgactggagctcgcagactatgaggctgagagcctggccaggctgcagagagcatttgcccggaagtgggagttcattttcatgcaagcagaagcacaagcaaaagtggacaagaagagagacaagattgaaaggaagatccttgacagccaagagagagcgttctgggacgtgcacaggcccgtgcctggatgtgtaaatacaactgaagtggacattaagaagtcatccagaatgagaaacccccacaaaacacggaagtctgtctatggtttacaaaatgatattagaagtcacagtcctacccacacacccacaccagaaactaaacctccaacagaagatgagttacaacaacagataaaatattggcaaatacagttagatagacatcggttaaaaatgtcaaaagtcgctgacagtctactaagttacacggaacagtatttagaatacgacccgtttcttttgccacctgacccttctaacccatggctgtccgatgacaccactttctgggaacttgaggcaagcaaagaaccgagccagcagagggtaaaacgatggggttttggcatggacgaggcattgaaagacccagttgggagagaacagttccttaaatttctagagtcagaattcagctcggaaaatttaagattctggctggcagtggaggacctgaaaaagaggcctattaaagaagtaccctcaagagttcaggaaatatggcaagagtttctggctcccggagcccccagtgctattaacttggattccaagagttatgacaaaaccacacagaacgtgaaggaacctggacgatacacatttgaagatgctcaggagcacatttacaaactgatgaaaagtgattcatacccacgttttataagatccagtgcctatcaggagcttctacaggcaaagaaaaaggggaaatctctcacgtccaagaggttaacaagccttgctcagtcttactaaacggatcatcttgtagcatgaatgcagactggagtcactgcacacactttgtagctcaatgttgtgacctggagcagaggacattagaacaagatgttgcatgagcaaaggacctaaattgttatttttgtgtgtacattccatctccaatggactcttccgtctcaatgcctccattccaaactgttgtctgctttctttctccttctactatgctggatctgtgtctcttcctttttaacaagttcaagtgaagtaaaaccttttctttttttccttctttctctctctctctctctcaaagcttcagttagacacacagttcactgaaaattcagtcagtcaaaaactggaagaactgtaaaagaaaaaagtatatatcaataagtatacatgtggcttcacatttattaaacaataaattccgcacagaaagtttcatttcaccaatgtgtcacagtcagaaacaaactcatgtcttcgtctgttgtctgtacattctccgttaatgtttctcgcatttatttttataccatatttaaagaagaaacaccttttactccaaatgtattaaagttgatcccttctctgtaaatttgtgtatgtttatattgttgttttatctttcattaaaagatgcagaatctc

SEQ ID NO: 102675 - DNA, 1410 bp, Artificial Sequence
  derived and/or modified sequence
atggcccagggcaacaactacggccagaccagcaacggcgtggccgacgagagccccaacatgctggtgtacagaaagatggaggacgtgatcgccagaatgcaggacgagaagaacggcatccccatcagaaccgtgaagagcttcctgagcaagatccccagcgtgttcagcggcagcgacatcgtgcagtggctgatcaagaacctgaccatcgaggaccccgtggaggccctgcacctgggcaccctgatggccgcccacggctacttcttccccatcagcgaccacgtgctgaccctgaaggacgacggcaccttctacagattccagaccccctacttctggcccagcaactgctgggagcccgagaacaccgactacgccgtgtacctgtgcaagagaaccatgcagaacaaggccagactggagctggccgactacgaggccgagagcctggccagactgcagagagccttcgccagaaagtgggagttcatcttcatgcaggccgaggcccaggccaaggtggacaagaagagagacaagatcgagagaaagatcctggacagccaggagagagccttctgggacgtgcacagacccgtgcccggctgcgtgaacaccaccgaggtggacatcaagaagagcagcagaatgagaaacccccacaagaccagaaagagcgtgtacggcctgcagaacgacatcagaagccacagccccacccacacccccacccccgagaccaagccccccaccgaggacgagctgcagcagcagatcaagtactggcagatccagctggacagacacagactgaagatgagcaaggtggccgacagcctgctgagctacaccgagcagtacctggagtacgaccccttcctgctgccccccgaccccagcaacccctggctgagcgacgacaccaccttctgggagctggaggccagcaaggagcccagccagcagagagtgaagagatggggcttcggcatggacgaggccctgaaggaccccgtgggcagagagcagttcctgaagttcctggagagcgagttcagcagcgagaacctgagattctggctggccgtggaggacctgaagaagagacccatcaaggaggtgcccagcagagtgcaggagatctggcaggagttcctggcccccggcgcccccagcgccatcaacctggacagcaagagctacgacaagaccacccagaacgtgaaggagcccggcagatacaccttcgaggacgcccaggagcacatctacaagctgatgaagagcgacagctaccccagattcatcagaagcagcgcctaccaggagctgctgcaggccaagaagaagggcaagagcctgaccagcaagagactgaccagcctggcccagagctactag

SEQ ID NO: 102676 - protein, 74 aa, Artificial Sequence
  derived and/or modified sequence
MEGAHASLSLEDEVSGAGSRQRPLEGKGGETPAAEEPGSLKNYAVFATRDVSAAPEKEEEEAEGPLRAQDLRES

SEQ ID NO: 102677 - DNA, 225 bp, Artificial Sequence
  derived and/or modified sequence
atggagggcgcccacgccagcctgagcctggaggacgaggtgagcggcgccggcagcagacagagacccctggagggcaagggcggcgagacccccgccgccgaggagcccggcagcctgaagaactacgccgtgttcgccaccagagacgtgagcgccgcccccgagaaggaggaggaggaggccgagggccccctgagagcccaggacctgagagagagctag

SEQ ID NO: 102678 - DNA, 225 bp, Artificial Sequence
  derived and/or modified sequence
atggagggtgctcacgccagtctctccctggaagacgaagtcagtggagcagggtccaggcaacgccctttggagggaaagggaggggagaccccggccgccgaggagcccggatctttgaaaaactatgccgtttttgctacaagggatgtgagtgccgctccggaaaaagaagaagaggaagcggagggccctttgcgcgctcaggacttgcgggaatcttag

SEQ ID NO: 102679 - DNA, 225 bp, Artificial Sequence
  derived and/or modified sequence
atggagggcgcccacgccagcctgagcctggaggatgaggtgtctggagctggcagccggcagaggcccctggagggcaaaggaggagagaccccagctgctgaggagcccggcagcctgaagaactatgctgtgtttgccaccagagatgtgtctgctgcccctgagaaggaggaggaggaggccgagggccccctgcgggcccaggacctgcgggagagctag

SEQ ID NO: 102680 - DNA, 225 bp, Artificial Sequence
  derived and/or modified sequence
atggagggcgcccacgccagcctgagcctggaggacgaggtgagcggcgccggctccagacagcgacctctcgagggtaaaggcggtgagacccctgcagcagaggaaccgggcagcctcaagaactacgccgtcttcgctaccagagacgtctctgctgcacctgagaaggaggaagaggaagcagagggtccgctccgcgcccaggacctgcgagagagttag

SEQ ID NO: 102681 - DNA, 225 bp, Artificial Sequence
  derived and/or modified sequence
atggagggagcacacgcatcactttctttggaggacgaggtgagcggggcaggcagcagacagcgcccactcgaaggaaaaggaggagagactcccgcagctgaggagccaggatctctcaagaactacgcagtgttcgccactcgcgacgtcagcgcagcccctgaaaaagaagaagaagaggcggagggcccactgcgggcacaggacctccgcgaatcctag

SEQ ID NO: 102682 - DNA, 1830 bp, Artificial Sequence
  derived and/or modified sequence
ggctggggggcttagaattttatttttggtttacagcgcagaagaagagcagtgaggccggggcgcgggtggggagggcaaggcggcggctcaaaaaaaaagccagcccctcgcggcccgacagagtctcggcgccccgcgggtcggtggagcctcaggggtgagcgcaggccggagacaggggaacccgccgcgggacaggggaaggccggacggaacgcgggtaagctgccgcagcttccggccgggccactagcgcggaccctacggccggggcgggacttccggcaaggcgcggaagcggcggtagctgcagctggcgaagttgggcgactggcggatgcaggccttgcggcacgtcgtgtgcgccctgtccggcggcgtggacagcgccgtggccgcgctgctgctgaggcggagaggttaccaggtgacaggggtgtttatgaagaactgggactcactggatgaacatggggtctgtactgccgacaaagactgtgaagatgcttacagagtttgccagatcttagacatccctttccatcaagtgtcctacgtaaaggagtattggaatgatgtgttcaggggcagatgccattgccacaggtcactatgcaagaacttccctggaagatgaagaagtctttgagcagaagcacgttaagaagcccgaagggcttttcagaaatcggtttgaagttagaaatgcggtaaaactcctccaggcagctgacagctttaaagaccagaccttctttctcagccaggtttcccaggatgccctgaggagaaccatcttccctctggggggattaacgaaagagtttgtaaagaaaatcgctgctgagaatagacttcatcatgtgcttcagaagaaagagagcatgggcatgtgtttcatcgggaagaggaattttgaacatttccttcttcagtatctgcagcctcgacctggtcactttatttccatagaagacaataaggttctgggaacacataaaggttggttcctgtataccttgggccagagagcaaacataggtggcctgagagagccctggtacgtggtggagaaggacagcgtcaagggtgacgtgtttgtggccccccggacagaccacccagccctgtacagggacctgctgaggaccagccgcgtgcactggattgcggaggagcctcccgcagcactggtccgggacaagatgatggagtgccacttccgattccgccaccagatggcactagtgccctgtgtgctgaccctcaatcaagatggcaccgtgtgggtgacagctgtgcaggctgtgcgtgcccttgccacaggacagtttgctgtgttctacaagggggacgagtgcctgggcagcgggaagatcctgcggctggggccgtctgcctacacgctccagaagggccagcgcagagctgggatggccactgagagccccagtgacagcccagaagatggtccaggcctgagtcccttgctctgacagagatggatctgctagaaggaacctggagagcaggacccatggctgggcggctggtgagcagtccaggtgcccaagggccagcttgctgctgcccaaagcagaggaagccgggctggctgagggtccgaaaagcctgcaggggcccggcgagccccaggaagagcctcagctccaggctggggctctggctgctggagcatctgctggctggtggggtggcccgagttccccttcaccgcccccagggagggtttcccacctcagagtacaccgaggggacctgcagagggggctgtcgggacagcgtggaataaacattatttcaagg

SEQ ID NO: 102683 - protein, 190 aa, Artificial Sequence
  derived and/or modified sequence
MAGSSEEAPDYGRGVVIMDDWPGYDLNLFTYPQHYYGDLEYVLIPHGIIVDRIERLAKDIMKDIGYSDIMVLCVLKGGYKFCADLVEHLKNISRNSDRFVSMKVDFIRLKSYRNDQSMGEMQIIGGDDLSTLAGKSVLFAKDVVGTGRTMKALLSNIEKYKPNMIKVASLLVKRTSRSDGFRPDSHMRHQ

SEQ ID NO: 102684 - protein, 190 aa, Artificial Sequence
  derived and/or modified sequence
MAGSSEEAPDYGRGVVIMDDWPGYDLNLFTYPQHYYGDLEYVLIPHGIIVDRIERLAKDIMKDIGYSDIMVLCVLKGGYKFCADLVEHLKNISRNSDRFVSMKVDFIRLKSYRNDQSMGEMQIIGGDDLSTLAGKNVLIVEDVVGTGRTMKALLSNIEKYKPNMIKVASLLVKRTSRSDGFRPDSHMRHQ

SEQ ID NO: 102685 - DNA, 573 bp, Artificial Sequence
  derived and/or modified sequence
atggccggatccagtgaagaggcccctgattatggcaggggtgtagtgattatggatgactggcctggctacgacctaaacctctttacctatccgcaacattactacggggatcttgaatacgtactgataccacacgggataattgtcgacagaattgaacgtcttgccaaggacataatgaaagacattggctattcagacatcatggttctttgtgtcctcaaagggggctataaattctgcgctgacctggtcgaacatctaaaaaatatctccaggaacagcgaccgcttcgtgagtatgaaagtggacttcatccgactcaagtcctatcgaaacgatcagagcatgggggagatgcagataattggcggagatgatctgagcactctggcaggaaagtctgtgctgtttgccaaagacgtggtaggtaccgggcgcactatgaaggctctgcttagcaatatcgaaaaatataagcccaacatgataaaagtagccagccttctggtgaaacgaacaagccggtctgacggcttcaggccagatagtcatatgaggcaccagtag

SEQ ID NO: 102686 - DNA, 573 bp, Artificial Sequence
  derived and/or modified sequence
atggcaggttcctctgaggaggcccccgactacggccggggggtggttatcatggacgactggccaggttacgacttgaatctgttcacgtatccgcaacactactacggcgatctggaatatgtactcatcccccacggaatcatagtggatcggattgaaagactagcaaaggatatcatgaaggacatcgggtatagcgacatcatggtcttgtgtgtgcttaagggaggatacaaattttgcgccgatctggtggagcatctgaaaaatatctccagaaactcagaccgctttgtctccatgaaggtggattttatcagacttaaaagctatcgaaatgaccagagcatgggagagatgcagatcattggaggcgacgatctgtctacactggctgggaaaaacgttctcattgttgaggacgtggtgggaacgggaagaacaatgaaagccttactgtccaacattgaaaagtataaacccaacatgattaaagttgcctccttgttagtgaaacgcactagccggtctgatggcttccggcccgactcacacatgaggcatcagtag

SEQ ID NO: 102687 - DNA, 573 bp, Artificial Sequence
  derived and/or modified sequence
atggccggcagcagcgaggaggccccagactatggccggggcgtggtgatcatggatgactggccaggctatgacctgaacctcttcacctacccccagcactactacggggacctggagtatgtgctgatcccccacggcatcatcgtggacagaattgagcggctggccaaggacatcatgaaggacatcggctacagcgacatcatggtgctgtgtgtgctgaagggcggctacaagttctgtgccgacctggtggagcacctgaagaacatcagcaggaacagcgacagatttgtgtccatgaaggtggacttcatccggctgaagagctacagaaatgaccagagcatgggagagatgcagatcattggaggagatgacctgagcaccctggccggcaagtctgtgctgtttgccaaggatgtggtgggcaccggccgcaccatgaaggccctgctgagcaacatcgagaagtacaagcccaacatgatcaaggtggccagcctgctggtgaagaggaccagcagaagtgatggcttccggccagacagccacatgaggcaccagtag

SEQ ID NO: 102688 - DNA, 573 bp, Artificial Sequence
  derived and/or modified sequence
atggccggcagcagcgaggaggccccagactatggccggggcgtggtgatcatggatgactggccaggctatgacctgaacctcttcacctacccccagcactactacggggacctggagtatgtgctgatcccccacggcatcatcgtggacagaattgagcggctggccaaggacatcatgaaggacatcggctacagcgacatcatggtgctgtgtgtgctgaagggcggctacaagttctgtgccgacctggtggagcacctgaagaacatcagcaggaacagcgacagatttgtgtccatgaaggtggacttcatccggctgaagagctacagaaatgaccagagcatgggagagatgcagatcattggaggagatgacctgagcaccctggccggcaagaatgtgctgattgtggaggatgtggtgggcaccggccgcaccatgaaggccctgctgagcaacatcgagaagtacaagcccaacatgatcaaggtggccagcctgctggtgaagaggaccagcagaagtgatggcttccggccagacagccacatgaggcaccagtag

SEQ ID NO: 102689 - DNA, 573 bp, Artificial Sequence
  derived and/or modified sequence
atggccggcagcagcgaggaggcccccgactacggccggggcgtggtaattatggatgattggccagggtacgacctgaatctgtttacatacccacaacactattatggcgatctggagtacgtcctgattccacacgggattatcgtggaccggattgagcgtctggctaaggacattatgaaagacattgggtacagcgacattatggtgctgtgtgtgcttaagggtgggtacaaattttgcgctgacctggtggagcacctcaagaatatatccaggaactccgaccgcttcgtgagcatgaaagttgacttcataaggcttaaatcttaccgaaacgaccaaagtatgggggagatgcaaatcatcggcggtgatgacctgagcacattggcgggcaagagcgttctctttgcaaaagacgtggttggaacaggtcgaacgatgaaggctcttttaagtaacatcgagaaatataaacctaacatgatcaaggtagcaagcttacttgtgaagcggactagccgttcggacggattccgcccagatagccacatgagacaccagtag

SEQ ID NO: 102690 - DNA, 573 bp, Artificial Sequence
  derived and/or modified sequence
atggccggcagcagcgaggaggcccccgactacggccggggcgtggtgattatggatgactggcctggttatgatctgaatctgttcacctacccacagcattactatggcgatctggaatacgtccttatcccacatggtatcatcgtagataggatcgagagattggctaaagatattatgaaagacatcggttattccgatataatggttctgtgtgtgcttaaaggtggatataagttttgcgccgacctcgtggaacatctaaagaacatttcccgcaattccgacagatttgtcagtatgaaagttgactttatccgcctgaagagttataggaacgatcagtccatgggtgaaatgcagatcatcgggggcgacgacctgagtactttagccggtaagaatgttttgattgtggaggatgtggtggggacaggcaggacaatgaaggctctgttgtcaaatattgagaaatataagcccaacatgatcaaggtggctagcttgctggtgaagcggacaagtcggtccgacgggttccgcccagatagtcatatgaggcatcagtag

SEQ ID NO: 102691 - DNA, 1849 bp, Artificial Sequence
  derived and/or modified sequence
cttcccttcccgcgttccccgggagaaacatggccgggagcagcgaggaggcgccagactacgggcgaggcgtcgtgattatggatgattggccagggtatgacttgaatttattcacgtacccacagcactattatggagacttggagtatgtcctcatccctcatggtatcattgtggacagaattgagcggctggccaaggatattatgaaagacataggatatagtgacatcatggtcctgtgtgtgcttaaaggaggttacaaattctgtgctgatctcgtagaacaccttaagaacatcagccgaaattcagatcgatttgtctcaatgaaggttgatttcatcagactaaaaagttacaggaatgaccagtccatgggtgagatgcagataatcggaggcgatgatctttcaacgctggctggaaagtctgtcctttttgcaaaggatgttgtcggaactgggaggaccatgaaagcactactcagcaatatagagaaatacaagcccaacatgattaaggtagccagtttgttggtgaagagaacatccagaagtgacggctttagacctgactcacatatgcgtcatcaatgagcacggtaaagaaaaatatcgagtctaaagacatgaattctcaccactaaagtcccagatagcatcatatttacgcctgtacttgggaagccagctgtcaagtttgtccccccaggcatcttcactcagcaggatataaaagaaaaaaatgttcaaatgagagagctttcttttctgaggttaatataaagagtatcaaaggttcctaaggaaaagaaagcagtgcttttatttgacttgttccaaattaaacactccgccttgtgactcagcaatgctatctaccttcacactcctgagctccgccttcctttgttttgatacagtcattatatttgattagtattcccaggaatacccccacctagttactcaaatatttttcacttaactttttatactcttattttggtaataagcttacaatattaagaagctggggacttttttttaactgaagacttgagtcccctataccgggaatgcagctattaatagattcccatattttaaaaggagggaaaggacaatttaatataaatttctgtttgtgcatttctgacaggccattattatctgctttgacaaagcctttctgaaacgcagtgtacaatgaatcttaatgatgttatgaaacgagctttgctcggggctcttgattggagcttccggtatgtgatgacggtatgtcatgtatgcatggatgtactcaactgtgtttaatactctgaattttaattagaaaaaaatacaatagcagcaaggccctggtttctaagctgtatccttttattcatgtgggacatgagcaaatggcagaattaggggcgagtgctttcaatgctcgaaactaagcaagtataaatttttcctcttatttgcatgaaaggacaagacactgttatgccctgtcctaaatgtgaagacagaggttgaattttttaaaaaatatctttaaaagactgatcacaaaatccaaggtgctacaggaaacaagcacactcaagaaagtttttttctgaataacatttttttccaatttctccgttttataagacatttcctaatttatggggattttaattgaaaataaacttgagtcccaatagagctgtttttttctcacttcctacaaaatgcaaatgcaaaataaataactaagcagcttttgtttggttctgaaccgtatgtggcgtattgttattaggttctagcttcctttaaactaataaagaataagaaaactt

SEQ ID NO: 102692 - DNA, 747 bp, Artificial Sequence
  derived and/or modified sequence
gggagaaacatggccgggagcagcgaggaggcgccagactacgggcgaggcgtcgtgattatggatgattggccagggtatgacttgaatttattcacgtacccacagcactattatggagacttggagtatgtcctcatccctcatggtatcattgtggacagaattgagcggctggccaaggatattatgaaagacataggatatagtgacatcatggtcctgtgtgtgcttaaaggaggttacaaattctgtgctgatctcgtagaacaccttaagaacatcagccgaaattcagatcgatttgtctcaatgaaggttgatttcatcagactaaaaagttacaggaatgaccagtccatgggtgagatgcagataatcggaggcgatgatctttcaacgctggctggaaagaatgttctcattgttgaggatgttgtcggaactgggaggaccatgaaagcactactcagcaatatagagaaatacaagcccaacatgattaaggtagccagtttgttggtgaagagaacatccagaagtgacggctttagacctgactcacatatgcgtcatcaatgagcacggtaaagaaaaatatcgagtctaaagacatgaattctcaccactaaagtcccagatagcatcatatttacgcctgtacttgggaagccagctgtcaagtttgtccccccaggcatcttcactcagcaggatataaaagaaaaaaatgttcaaatgagagag

SEQ ID NO: 102693 - DNA, 573 bp, Artificial Sequence
  derived and/or modified sequence
atggcgggaagctcagaggaggccccagactacggtagaggggttgtcattatggacgattggccaggctatgacttgaacttatttacatatccccaacactactacggagaccttgaatacgttctgattcctcacggcattattgtggatcgcatcgagcggctggccaaagatatcatgaaggacatcgggtactcagatatcatggtgctctgcgtcctgaagggtggatacaagttctgcgccgacctagtggagcacctgaaaaatatctctcggaactccgaccgctttgtcagtatgaaagtggactttatacggctgaaatcctataggaatgatcagtcgatgggcgagatgcaaatcatcggaggtgacgatctgagcacattagctggcaaaagtgttcttttcgcaaaagatgtcgtgggaaccggacgcacgatgaaggcgcttctctctaatatcgagaagtataagcccaacatgattaaggtggccagcctgctggtgaagcggacatcgcggtctgacggattcaggccagattctcacatgagacaccagtag

SEQ ID NO: 102694 - DNA, 573 bp, Artificial Sequence
  derived and/or modified sequence
atggccggtagcagcgaagaggcaccagactacggccgaggtgttgtgataatggacgattggcctggttacgatctcaatctgttcacgtatccccaacactactacggagacctggagtacgtgctgatccctcacggtattatcgtggatagaatcgagcggttggcaaaagacatcatgaaagacattgggtattctgatatcatggtgctttgtgtgctgaagggcggttacaagttctgcgccgatctcgtggagcaccttaaaaacatcagccgcaatagcgatagattcgtaagcatgaaggtggactttattagactgaaatcttatagaaacgatcagtctatgggagagatgcagatcatcgggggtgacgacttgtccacactggcgggtaagaatgtgttgatcgttgaagacgtggtcggcaccggtaggaccatgaaagcgcttctgtcaaacatcgaaaagtataagcccaatatgataaaggtcgccagcttactggtgaagcgcacatcccggagtgatggcttccgccctgatagccatatgagacatcagtag

SEQ ID NO: 102695 - DNA, 573 bp, Artificial Sequence
  derived and/or modified sequence
atggccggcagcagcgaggaggcccccgactacggcagaggcgtggtgatcatggacgactggcccggctacgacctgaacctgttcacctacccccagcactactacggcgacctggagtacgtgctgatcccccacggcatcatcgtggacagaatcgagagactggccaaggacatcatgaaggacatcggctacagcgacatcatggtgctgtgcgtgctgaagggcggctacaagttctgcgccgacctggtggagcacctgaagaacatcagcagaaacagcgacagattcgtgagcatgaaggtggacttcatcagactgaagagctacagaaacgaccagagcatgggcgagatgcagatcatcggcggcgacgacctgagcaccctggccggcaagagcgtgctgttcgccaaggacgtggtgggcaccggcagaaccatgaaggccctgctgagcaacatcgagaagtacaagcccaacatgatcaaggtggccagcctgctggtgaagagaaccagcagaagcgacggcttcagacccgacagccacatgagacaccagtag

SEQ ID NO: 102696 - DNA, 573 bp, Artificial Sequence
  derived and/or modified sequence
atggccggcagcagcgaggaggcccccgactacggcagaggcgtggtgatcatggacgactggcccggctacgacctgaacctgttcacctacccccagcactactacggcgacctggagtacgtgctgatcccccacggcatcatcgtggacagaatcgagagactggccaaggacatcatgaaggacatcggctacagcgacatcatggtgctgtgcgtgctgaagggcggctacaagttctgcgccgacctggtggagcacctgaagaacatcagcagaaacagcgacagattcgtgagcatgaaggtggacttcatcagactgaagagctacagaaacgaccagagcatgggcgagatgcagatcatcggcggcgacgacctgagcaccctggccggcaagaacgtgctgatcgtggaggacgtggtgggcaccggcagaaccatgaaggccctgctgagcaacatcgagaagtacaagcccaacatgatcaaggtggccagcctgctggtgaagagaaccagcagaagcgacggcttcagacccgacagccacatgagacaccagtag

SEQ ID NO: 102697 - DNA, 930 bp, Artificial Sequence
  derived and/or modified sequence
atgaacagtggcgtgaacctccagagaagtctgtcttcacccccctcctctaagcgcccgaaaacaattagcattgacgagaacatggagccttcccccacgggcgacttttacccatcaccctccagtcccgctgccggttccaggacttggcacgaaagggaccaggacatgtcgtcaccgacaaccatgaagaagccagagaaacccctcttttcctccgccagtccgcaagattccagccctcggctcagtacatttccccaacaccatcatcctggcataccgggtgtggcacacagcgttatcagtacacgtacccctcctcccccaagcccactcccgttccctactcaggctattttacccccagccccaagtagctactttagccaccccacgatccgctatccaccccatctcaacccccaggacacactcaagaattatgtcccatcatacgacccttccagcccacagaccagccaacctaatggatcaggacaggtcgtgggtaaagtgcccggtcacttcacccccgtgctggctccgtccccacatccatctgcggtgaggcccgtcaccttgagcatgactgacactaagcctattacgacgtccaccgaggcatatacagcatcaggaacatcgcaggctaatcgatacgtaggattgtccccgcgagacccaagcttcttgcaccagcagcagttgaggatctgcgactggactatgaaccagaacggacggcacctttatcccagtacttctgaagacaccttagggatcacatggcagagccccgggacgtgggctagtctggtcccgttccaggtatcgaataggacccccatattgccagctaatgttcagaactatggcctgaatatcatcggtgagcccttccttcaggccgagacatctaattag

SEQ ID NO: 102698 - DNA, 930 bp, Artificial Sequence
  derived and/or modified sequence
atgaacagcggcgtgaacctgcagaggagcctgagcagcccccccagcagcaagaggcccaagaccatcagcattgatgagaacatggagcccagccccaccggggacttctaccccagccccagcagccctgctgctggcagcaggacctggcatgagcgggaccaggacatgagcagccccaccaccatgaagaagccagagaagcccctcttcagcagcgccagcccccaggacagcagcccccggctgagcaccttcccccagcaccaccaccctggcatccctggggtggcccacagcgtcatcagcaccaggaccccacctccacccagccccctgcccttccccacccaggccatcctgcccccagcccccagcagctacttcagccaccccaccatccgctacccaccccacctgaacccccaggacaccctgaagaactacgtgcccagctatgaccccagcagcccccagaccagccagcccaatggaagtggccaggtggtgggcaaggtgcccggccacttcacccctgtgctggcccccagcccccaccccagcgctgtgcggcctgtgaccctgtccatgacagacaccaagcccatcaccaccagcacagaggcctacacagccagcggcaccagccaggccaaccgctacgtgggcctgagcccccgggaccccagcttcctgcaccagcagcagctgcgcatctgtgactggaccatgaaccagaatggccgccacctgtaccccagcaccagcgaggacaccctgggcatcacctggcagagccctggcacctgggccagcctggtgcccttccaggtgagcaacagaacacccatcctgcctgccaacgtgcagaactacggcctgaacatcatcggggagcccttcctgcaggccgagaccagcaactag

SEQ ID NO: 102699 - DNA, 930 bp, Artificial Sequence
  derived and/or modified sequence
atgaacagcggcgtgaacctgcagcggagcctgagcagccccccctcttccaagaggcctaagacaatctcaatcgatgaaaatatggaaccgtcacccaccggagatttttatcccagtccctcgtcgcccgccgcgggttcacggacctggcatgagcgggaccaggatatgtcaagtcctaccacaatgaaaaagcccgagaagccgttgtttagttcagcgagccctcaggattctagtccccgactttccacatttccacaacatcatcaccccgggatccccggcgtcgctcactccgtgattagcacacgcacacccccgccgcccagcccccttccttttcccactcaggctattctgccacctgctccctcttcttatttctcacacccgacgattagataccctcctcacctgaatccccaggatactcttaagaactacgtgccttcttacgatccttcaagtccccagacctctcaacctaacgggtcaggacaggtggttggcaaggtgccagggcacttcacccccgttcttgccccgagccctcatccatctgcagtgcggcccgttacactgagtatgactgacacaaagcccatcaccacatctacagaagcctataccgcaagtgggacctcccaggccaatcggtacgttggactttcacccagagacccatcattcctccaccaacagcagttgcgcatctgcgactggacgatgaatcagaacggacgacatctgtacccttcaaccagtgaagacactctaggaattacatggcagtctccaggcacatgggccagcctggtaccatttcaggtatctaataggactccaatacttcccgccaatgtgcagaattatggtctgaacattatcggggaacccttcctgcaggcagagaccagtaattag

SEQ ID NO: 102700 - DNA, 930 bp, Artificial Sequence
  derived and/or modified sequence
atgaactctggagtgaacttacagaggagcttgtcatcccccccttcttccaagcgtcctaagactatcagcattgatgaaaacatggaacctagccccactggagacttctacccatccccgagtagtcccgctgccggaagtaggacttggcatgagcgggatcaagatatgagcagtcctaccacgatgaagaaacctgagaagcctctcttcagctcggctagcccacaggacagctctcccaggctgtcaacgttccctcagcaccaccacccaggcattcctggcgtggcacacagtgtgatctccacccggacgccgcctcccccttctccattaccatttccaacacaggctatactgcccccagcacccagctcgtacttcagccacccgaccattcgataccctccacatctcaatccacaggatacactgaaaaactacgttcccagttacgatcctagctcaccacagacaagccaacccaatggaagtgggcaagtcgtgggaaaggtgccaggacacttcactcctgttctcgcacccagcccgcacccgtcggccgtccgaccagtgaccctgtctatgactgataccaagccaatcactacatctactgaggcctacaccgcctctggaacctctcaggccaaccggtatgtggggttgagtcccagggacccctcattcctccatcagcaacagctaagaatatgcgattggacaatgaatcagaatggacgccatttgtacccaagtacatctgaggacactctcggcatcacatggcagagtcccggtacttgggcatcattggtgccattccaggtctcaaatcgaactccgatcctgcctgccaatgtccaaaactacggtttaaatattatcggggaaccctttcttcaggctgagacctcgaactag

SEQ ID NO: 102701 - DNA, 930 bp, Artificial Sequence
  derived and/or modified sequence
atgaacagcggcgtgaacctgcagagaagcctgagcagcccccccagcagcaagagacccaagaccatcagcatcgacgagaacatggagcccagccccaccggcgacttctaccccagccccagcagccccgccgccggcagcagaacctggcacgagagagaccaggacatgagcagccccaccaccatgaagaagcccgagaagcccctgttcagcagcgccagcccccaggacagcagccccagactgagcaccttcccccagcaccaccaccccggcatccccggcgtggcccacagcgtgatcagcaccagaaccccccccccccccagccccctgcccttccccacccaggccatcctgccccccgcccccagcagctacttcagccaccccaccatcagataccccccccacctgaacccccaggacaccctgaagaactacgtgcccagctacgaccccagcagcccccagaccagccagcccaacggcagcggccaggtggtgggcaaggtgcccggccacttcacccccgtgctggcccccagcccccaccccagcgccgtgagacccgtgaccctgagcatgaccgacaccaagcccatcaccaccagcaccgaggcctacaccgccagcggcaccagccaggccaacagatacgtgggcctgagccccagagaccccagcttcctgcaccagcagcagctgagaatctgcgactggaccatgaaccagaacggcagacacctgtaccccagcaccagcgaggacaccctgggcatcacctggcagagccccggcacctgggccagcctggtgcccttccaggtgagcaacagaacccccatcctgcccgccaacgtgcagaactacggcctgaacatcatcggcgagcccttcctgcaggccgagaccagcaactag

SEQ ID NO: 102702 - protein, 895 aa, Artificial Sequence
  derived and/or modified sequence
MVVDEQQRLTAQLTLQRQKIQELTTNAKETHTKLALAEARVQEEEQKATRLEKELQTQTTKFHQDQDTIMAKLTNEDSQNRQLQQKLAALSRQIDELEETNRSLRKAEEELQDIKEKISKGEYGNAGIMAEVEELRKRVLDMEGKDEELIKMEEQCRDLNKRLERETLQSKDFKLEVEKLSKRIMALEKLEDAFNKSKQECYSLKCNLEKERMTTKQLSQELESLKVRIKELEAIESRLEKTEFTLKEDLTKLKTLTVMFVDERKTMSEKLKKTEDKLQAASSQLQVEQNKVTTVTEKLIEETKRALKSKTDVEEKMYSVTKERDDLKNKLKAEEEKGNDLLSRVNMLKNRLQSLEAIEKDFLKNKLNQDSGKSTTALHQENNKIKELSQEVERLKLKLKDMKAIEDDLMKTEDEYETLERRYANERDKAQFLSKELEHVKMELAKYKLAEKTETSHEQWLFKRLQEEEAKSGHLSREVDALKEKIHEYMATEDLICHLQGDHSVLQKKLNQQENRNRDLGREIENLTKELERYRHFSKSLRPSLNGRRISDPQVFSKEVQTEAVDNEPPDYKSLIPLERAVINGQLYEESENQDEDPNDEGSVLSFKCSQSTPCPVNRKLWIPWMKSKEGHLQNGKMQTKPNANFVQPGDLVLSHTPGQPLHIKVTPDHVQNTATLEITSPTTESPHSYTSTAVIPNCGTPKQRITILQNASITPVKSKTSTEDLMNLEQGMSPITMATFARAQTPESCGSLTPERTMSPIQVLAVTGSASSPEQGRSPEPTEISAKHAIFRVSPDRQSSWQFQRSNSNSSSVITTEDNKIHIHLGSPYMQAVASPVRPASPSAPLQDNRTQGLINGALNKTTNKVTSSITITPTATPLPRQSQITVEPLLLPH

SEQ ID NO: 102703 - protein, 711 aa, Artificial Sequence
  derived and/or modified sequence
MALEKLEDAFNKSKQECYSLKCNLEKERMTTKQLSQELESLKVRIKELEAIESRLEKTEFTLKEDLTKLKTLTVMFVDERKTMSEKLKKTEDKLQAASSQLQVEQNKVTTVTEKLIEETKRALKSKTDVEEKMYSVTKERDDLKNKLKAEEEKGNDLLSRVNMLKNRLQSLEAIEKDFLKNKLNQDSGKSTTALHQENNKIKELSQEVERLKLKLKDMKAIEDDLMKTEDEYETLERRYANERDKAQFLSKELEHVKMELAKYKLAEKTETSHEQWLFKRLQEEEAKSGHLSREVDALKEKIHEYMATEDLICHLQGDHSVLQKKLNQQENRNRDLGREIENLTKELERYRHFSKSLRPSLNGRRISDPQVFSKEVQTEAVDNEPPDYKSLIPLERAVINGQLYEESENQDEDPNDEGSVLSFKCSQSTPCPVNRKLWIPWMKSKEGHLQNGKMQTKPNANFVQPGDLVLSHTPGQPLHIKVTPDHVQNTATLEITSPTTESPHSYTSTAVIPNCGTPKQRITILQNASITPVKSKTSTEDLMNLEQGMSPITMATFARAQTPESCGSLTPERTMSPIQVLAVTGSASSPEQGRSPEPTEISAKHAIFRVSPDRQSSWQFQRSNSNSSSVITTEDNKIHIHLGSPYMQAVASPVRPASPSAPLQDNRTQGLINGALNKTTNKVTSSITITPTATPLPRQSQITVEPLLLPH

SEQ ID NO: 102704 - DNA, 2321 bp, Artificial Sequence
  derived and/or modified sequence
ttcagattaaagaagctaattgatcaagaaatcaagtctcaggaggagaaggagcaagaaaaggagaaaagggtcaccaccctgaaagaggagctgaccaagctgaagtcttttgctttgatggtggtggatgaacagcaaaggttgaaaaactcagtaaaagaattatggctctggaaaagttagaagacgctttcaacaaaagcaaacaagaatgctactctctgaaatgcaatttagaaaaagaaaggatgaccacaaagcagttgtctcaagaactggagagtttaaaagtaaggatcaaagagctagaagccattgaaagtcggctagaaaagacagaattcactctaaaagaggatttaactaaactgaaaacattaactgtgatgtttgtagatgaacggaaaacaatgagtgaaaaattaaagaaaactgaagataaattacaagctgcttcttctcagcttcaagtggagcaaaataaagtaacaacagttactgagaagttaattgaggaaactaaaagggcgctcaagtccaaaaccgatgtagaagaaaagatgtacagcgtaaccaaggagagagatgatttaaaaaacaaattgaaagcggaagaagagaaaggaaatgatctcctgtcaagagttaatatgttgaaaaataggcttcaatcattggaagcaattgagaaagatttcctaaaaaacaaattaaatcaagactctgggaaatccacaacagcattacaccaagaaaacaataagattaaggagctctctcaagaagtggaaagactgaaactgaagctaaaggacatgaaagccattgaggatgacctcatgaaaacagaagatgaatatgagactctagaacgaaggtatgctaatgaacgagacaaagctcaatttttatctaaagagctagaacatgttaaaatggaacttgctaagtacaagttagcagaaaagacagagaccagccatgaacaatggcttttcaaaaggcttcaagaagaagaagctaagtcagggcacctctcaagagaagtggatgcattaaaagagaaaattcatgaatacatggcaactgaagacctaatatgtcacctccagggagatcactcagtcctgcaaaaaaaactaaatcaacaagaaaacaggaacagagatttaggaagagagattgaaaacctcactaaggagttagagaggtaccggcatttcagtaagagcctcaggcctagtctcaatggaagaagaatttccgatcctcaagtattttctaaagaagttcagacagaagcagtagacaatgaaccacctgattacaagagcctcattcctctggaacgtgcagtcatcaatggtcagttatatgaggagagtgagaatcaagacgaggaccctaatgatgagggatctgtgctgtccttcaaatgcagccagtctactccatgtcctgttaacagaaagctatggattccctggatgaaatccaaggagggccatcttcagaatggaaaaatgcaaactaaacccaatgccaactttgtgcaacctggagatctagtcctaagccacacacctgggcagccacttcatataaaggttactccagaccatgtacaaaacacagccactcttgaaatcacaagtccaaccacagagagtcctcactcttacacgagtactgcagtgataccgaactgtggcacgccaaagcaaaggataaccatcctccaaaacgcctccataacaccagtaaagtccaaaacctctaccgaagacctcatgaatttagaacaaggcatgtccccaattaccatggcaacctttgccagagcacagaccccagagtcttgtggttctctaactccagaaaggacaatgtcccctattcaggttttggctgtgactggttcagctagctctcctgagcagggacgctccccagaaccaacagaaatcagtgccaagcatgcgatattcagagtctccccagaccggcagtcatcatggcagtttcagcgttcaaacagcaatagctcaagtgtgataactactgaggataataaaatccacattcacttaggaagtccttacatgcaagctgtagccagccctgtgagacctgccagcccttcagcaccactgcaggataaccgaactcaaggcttaattaacggggcactaaacaaaacaaccaataaagtcaccagcagtattactatcacaccaacagccacacctcttcctcgacaatcacaaattacagtggaaccacttcttctgcctcattgaactcaacatccttcagac

SEQ ID NO: 102705 - DNA, 2688 bp, Artificial Sequence
  derived and/or modified sequence
atggtagtggacgaacagcagcgtctaacggctcagctgaccctgcaacgccagaaaatccaggagttaacaacgaacgccaaggaaacgcatacaaagcttgctctggccgaggccagggttcaggaagaagagcagaaagcaacacgcctggagaaggaactgcagacccagacaacaaagtttcaccaggatcaggatacaataatggctaaactgactaacgaggacagccaaaaccgacagctccagcagaagctcgccgccctcagcagacagattgatgaattggaggaaaccaaccggtctttgaggaaggctgaagaagagctacaagatattaaggagaagatttctaaaggtgagtacggaaatgcaggcatcatggctgaggtcgaagagttaagaaaacgggtgttggacatggaggggaaagatgaggagctgattaagatggaggaacagtgtcgagacttgaacaaaagattggaaagagagactctccagagcaaagatttcaagctcgaagtggaaaagttgagcaaacgaatcatggccctggagaagctggaggatgcttttaataagtcaaagcaggaatgttactccctcaaatgcaatcttgagaaggagaggatgaccacgaagcagttgagccaggagctggagtcccttaaggtgcgaattaaggaactggaggccattgagtcgaggctcgaaaagaccgaatttactttgaaagaggatctcaccaagctcaagacattaactgtgatgtttgtcgacgagaggaaaacgatgagtgagaagcttaagaaaactgaagataaactccaggccgctagcagtcagctgcaggtggaacagaataaggttaccaccgtgactgaaaaactgattgaggagacaaaaagagctttaaaaagcaagacagatgtagaggaaaagatgtactctgtgacaaaagaacgcgacgacttgaagaataagttgaaggcagaagaagagaaaggaaacgatctcctgagtcgcgttaacatgctcaagaaccggctccagtccttggaggccatagagaaggattttctcaagaacaaactcaaccaggactcaggcaagtccaccacagcgttgcaccaagagaacaataagattaaagaactgagccaggaagtggagaggttgaaactcaagcttaaagatatgaaggccatcgaggacgatctgatgaaaacagaggacgaatacgaaaccctcgagcgcaggtacgccaatgaaagagacaaggctcaattcttaagcaaggagcttgagcacgtgaaaatggagctggcaaaatacaaactggccgaaaaaacggagacatcgcatgagcaatggcttttcaaaaggctccaagaagaagaggccaagagcgggcacctgtctcgcgaagtggacgccctgaaagagaaaatccacgagtacatggccacagaagatctgatttgccatttgcaaggagatcactctgtgctacaaaaaaaactcaatcaacaggagaacaggaaccgggatctgggtcgagagattgaaaacctcacgaaagagctggagagataccgtcatttctctaaaagcctgagaccctcactgaatgggcgtcggatttcagacccacaggtgttcagcaaagaggtgcagactgaagcagttgacaatgaaccacctgactataaatcccttattccgctcgaacgcgcagtgatcaacgggcaactgtacgaggaaagcgagaaccaagatgaagacccaaacgacgaggggtccgtactgtcatttaaatgctctcagtctacaccctgtcccgtgaataggaagctatggatcccatggatgaaatcaaaggagggccatctccagaatggtaaaatgcagacgaaacctaacgccaatttcgtccagccaggagatctcgttttgtctcatacacctggccagccactgcacatcaaggtcacccctgaccacgtgcagaacacagccaccctagagatcacgagccctactacagaatctccccatagctatacgtccactgccgtcattccaaattgcggaactcctaaacagagaattactatccttcaaaatgcttccatcacccccgtgaaaagtaagacaagtacagaagacctgatgaaccttgaacaaggaatgagtccgattaccatggctacatttgctagagcacagacccccgagagttgtgggagtctgacaccagaacggaccatgtctccaatccaggtacttgccgtgacaggctcggcaagctccccagagcaaggcagatctcccgagccgaccgagatctccgccaagcacgcaatttttcgcgtgtctcccgaccgccagagtagttggcaattccagcgcagcaattctaacagctcatctgtcattactaccgaagacaacaaaatccatatccacttaggcagtccgtacatgcaggcggtggcatcccccgtgcgaccagcttcgcctagcgcacctctgcaggacaaccggacccaaggcctgataaacggtgccctaaacaagactactaacaaagtcacctcgagtattacaatcaccccaacagctaccccattacctcggcaaagccagatcacagtggaaccactgcttcttcctcattag

SEQ ID NO: 102706 - DNA, 2136 bp, Artificial Sequence
  derived and/or modified sequence
atggcgctggaaaaacttgaggatgcgttcaataaatctaagcaggagtgctattcgctaaaatgtaacctggaaaaagagcggatgaccactaagcagctatcacaggagttggaaagtctaaaagtgagaatcaaggagcttgaagcaatcgagtcccgacttgaaaaaacagaatttacattaaaagaagatttaactaaactgaaaaccctcactgttatgttcgtggatgagcgaaaaaccatgagcgaaaaattgaagaagaccgaggacaagctccaggctgcctcaagtcagctgcaggtggaacagaacaaagttaccaccgtcaccgaaaagctgatcgaggaaaccaaacgggccttaaaaagcaagactgatgttgaggagaaaatgtactcggtgaccaaggaacgcgacgacctcaagaataagctaaaagctgaagaagaaaagggcaatgacctcctgagtagggtgaacatgctcaagaaccgcctccagagcttggaggccattgaaaaagattttttaaaaaacaaacttaatcaggactcaggcaaatccactactgcgcttcatcaagaaaataataagattaaggagctttcacaggaggtcgagaggctgaagctgaagttaaaagacatgaaagccatcgaagatgacctcatgaagacagaagacgaatacgaaacgctggaacggagatacgccaacgaaagggataaggcccagtttctcagtaaggagctcgaacacgtgaaaatggagttggcaaagtacaagttggctgagaaaacagagaccagtcacgagcagtggctctttaagcgtctccaagaggaggaagctaagagtggccacctttcccgtgaagtggacgccctcaaagaaaaaattcatgagtatatggcaactgaggaccttatctgtcatctgcagggggatcattctgtgctgcagaagaaattaaatcagcaagagaacagaaatcgtgatttgggtagggaaatagagaatctaactaaagagcttgagcggtatcggcatttctctaaaagcctaagaccaagcctgaatgggagaagaatttcagatccacaggtcttctcaaaggaagtgcagaccgaagccgtggacaatgaaccaccggactacaaatcccttattcccttggagagagccgtgataaatggacagctgtacgaagaaagtgagaatcaggacgaggatccaaacgatgagggctcggtcctcagtttcaagtgctcgcagtctacaccatgtcctgtcaaccgtaaactctggattccatggatgaagtccaaggaagggcatcttcagaacggcaaaatgcagacaaagcctaatgccaatttcgtgcagcccggcgatttagttctctctcacactccaggccagcctctgcatatcaaggtcaccccagaccacgtgcagaacaccgcaaccctcgaaattacaagtccaacaaccgagagcccgcatagttatacctctaccgctgtgatccctaactgcggcactccaaagcagcggatcacaatactgcagaatgcaagtatcaccccggtcaaatcgaagacatctacggaagatctgatgaacttggaacagggtatgagcccaatcacaatggctacattcgccagagctcagactccggaaagctgtggctcgctcactcccgaacggactatgagccctattcaggttctcgccgtcactggcagtgcctcatcacctgagcagggcagatcccccgagccaaccgagatctctgccaaacatgctatttttcgcgtgtccccggaccgccagtcttcatggcaatttcaaaggtcaaactccaactcctcaagtgtgatcaccacagaggataataagattcacattcacctcgggagcccttacatgcaagccgtggcctcgcctgtgcgccctgcaagtccatctgctccactccaggacaaccggacacaggggctgataaacggggccttaaataagacaacaaacaaggtgacctccagcatcaccattactcctaccgctaccccacttccgaggcagtcccagataaccgtggagcccctactgctccctcattag

SEQ ID NO: 102707 - DNA, 2514 bp, Artificial Sequence
  derived and/or modified sequence
atggtggtcgacgagcagcagcgcttaaccgcccagctgaccctgcagcgacagaagatccaggaactgacaactaacgccaaagagacacacacaaaactagccctcgctgaggcaagagttcaggaggaggagcagaaggctacccggctggaaaaggagctgcagacccagacaaccaagtttcaccaggaccaggatactattatggccaaactaaccaacgaagactcacagaaccgtcagctgcagcagaaactggccgccctatcccgccagattgacgagctggaggagacaaacagatccttgcgcaaggcggaagaggaactgcaggatattaaagagaaaatttcgaaaggggaatacggcaatgccggcattatggcagaggtcgaagagctgcgcaaacgtgttctggacatggaaggaaaggacgaggagttgatcaagatggaagaacagtgtagagacctgaacaagcgacttgagcgcgagacactccaaagcaaggacttcaagctggaagtggaaaagctctctaagcgtatcatggctctggaaaagctggaggatgccttcaacaaaagtaaacaggagtgctacagtctcaaatgcaatctcgaaaaagagcggatgactactaagcagctcagtcaggagctcgaaagcctgaaggttaggatcaaagagcttgaggccatcgagagccgtctggaaaagaccgaatttaccctgaaggaagacctcacgaaattgaaaactctgaccgtgatgttcgtcgacgagaggaagacgatgtccgagaaactgaagaaaacagaagataaactgcaggcagcatcgagccagctacaggtggagcagaacaaagtgaccactgtgactgaaaaactgatagaagaaacaaagcgagctctgaaaagcaagactgatgtggaagagaaaatgtacagcgtgaccaaagaacgtgatgatttgaagaacaaactcaaggccgaggaggagaaggggaatgacctcctgtctagagttaatatgctaaagaacaggctgcagtctctggaagccatcgaaaaggactttctgaaaaataagctgaaccaagattctggtaagtctacaacagctctccaccaggagaacaacaaaattaaggagttgtcccaggaggtggagcgcctgaagctgaagctcaaagacatgaaagccatcgaggacgatctgatgaagaccgaagacgaatacgagacacttgaaaggcgttatgctaatgagagagacaaggctcagttcctctccaaggagctggagcatgttaagatggaactggctaagtacaagctggcagaaaagactgagacaagccacgaacaatggctctttaagcggcttcaggaagaggaggctaaatctggtcatctgtcacgcgaggtagatgcactgaaggaaaaaatacatgaatatatggctactgaggatctgatctgtcatctgcagggtgatcacagtgtcctgcagaagaagctcaatcagcaggaaaatcgcaatcgggacttgggccgggaaatcgagaatttaacgaaagagctggagaggtaccgacactttagtaagtccctgcgccccagcctgaatggacgcagaatcagcgatccgcaggtattctcaaaggaggttcagacagaagccgtcgataatgagccccccgattataagtccttgattcccctggagagagcggtcattaacggtcaactgtacgaggagagcgagaatcaagacgaagatcctaatgatgaggggagcgtgctcagttttaaatgcagtcagtccaccccctgccctgtcaatcgaaagctctggatcccctggatgaaatcaaaggaggggcacctgcagaatggtaaaatgcaaacgaagccaaacgccaatttcgtccagcccggtgatctcgtcctatcgcacaccccagggcagcctttacacataaaggtcacacctgaccatgtccaaaatacagctacactcgaaattacaagtcccactacagaatccccacatagctatacaagtactgctgtgattccaaactgcggtaccccaaaacaacggataacaatcctgcagaacgccagcataacaccggtgaaaagcaagacctccactgaagatctcatgaacctggagcagggcatgtctccaattacgatggctacattcgcacgcgcccagactcctgagtcttgcggttccctgacaccagagcggaccatgagcccaatccaagtgttggctgtgacaggctcagcctcaagccccgagcaaggccgctctccagagcccaccgagatctccgcaaaacacgccatcttcagagtgagccctgacaggcaaagtagttggcagtttcagaggagtaatagcaattcttcatcagtcattactacagaagataacaagattcacattcacttaggcagtccatacatgcaggctgtggcaagtccgtag

SEQ ID NO: 102708 - DNA, 2688 bp, Artificial Sequence
  derived and/or modified sequence
atggtggtggatgagcagcagaggctgacagcccagctgaccctgcagaggcagaagatccaggagctgaccaccaatgccaaggagacccacaccaagctggccctggccgaggcccgggtgcaggaggaggagcagaaggccacccggctggagaaggagctgcagacccagaccaccaagttccaccaggaccaggacaccatcatggccaagctgaccaatgaagacagccagaaccggcagctgcagcagaagctggccgccctgagccggcagattgatgagctggaggagaccaacagaagcctgaggaaggccgaggaggagctgcaggacatcaaggagaagatcagcaagggggagtatggaaatgccggcatcatggccgaggtggaggagctgaggaagagggtgctggacatggagggcaaggatgaggagctgatcaagatggaggagcagtgccgggacctgaacaagaggctggagcgggagaccctgcagagcaaggacttcaagctggaggtggagaagctgagcaagaggatcatggccctggagaagctggaggatgccttcaacaagagcaagcaggagtgctacagcctgaagtgcaacctggagaaggagaggatgaccaccaagcagctgagccaggagctggagagcctgaaggtgcgcatcaaggagctggaggccatcgagagccggctggagaagacagagttcaccctgaaggaggacctgaccaagctgaagaccctgactgtgatgtttgtggatgagaggaagaccatgtctgagaagctgaagaagacagaggacaagctgcaggccgccagcagccagctgcaggtggagcagaacaaggtgaccaccgtgacagagaagctgattgaggagaccaagagggccctgaagagcaagacagatgtggaggagaagatgtacagcgtgaccaaggagagagatgacctgaagaacaagctgaaggccgaggaggagaagggaaatgacctgctgagccgggtgaacatgctgaagaaccggctgcagagcctggaggccatcgagaaggacttcctgaagaacaagctgaaccaggacagcggcaagagcaccacagccctgcaccaggagaacaacaagatcaaggagctgagccaggaggtggagcggctgaagctgaagctgaaggacatgaaggccattgaagatgacctgatgaagacagaagatgaatatgagaccctggagaggagatatgccaatgaaagagacaaggcccagttcctgagcaaggagctggagcacgtgaagatggagctggccaagtacaagctggccgagaagacagagaccagccatgagcagtggctgttcaagaggctgcaggaggaggaggccaagagcggccacctgagccgggaggtggatgccctgaaggagaagatccacgagtacatggccacagaagatctcatctgccacctgcagggcgaccacagcgtgctgcagaagaagctgaaccagcaggagaacagaaacagagacctgggccgggagattgagaacctgaccaaggagctggagcgctaccgccacttcagcaagagcctgcggcccagcctgaatggccgccgcatcagtgacccccaggtgttcagcaaggaggtgcagacagaggccgtggacaatgaacctccagactacaagagcctcatccccctggagagagctgtgatcaatggccagctgtatgaggagagcgagaaccaggatgaggaccccaatgatgagggctctgtgctgtccttcaagtgcagccagagcaccccctgccctgtgaacaggaagctgtggatcccctggatgaagagcaaggagggccacctgcagaatggcaagatgcagaccaagcccaatgccaactttgtgcagcccggggacctggtgctgagccacaccccaggccagcccctgcacatcaaggtgaccccagaccacgtgcagaacacagccaccctggagatcaccagccccaccacagagagcccccacagctacaccagcacagctgtgatccccaactgtggcacccccaagcagaggatcaccatcctgcagaatgccagcatcacccctgtgaagagcaagaccagcacagaggacctgatgaacctggagcagggcatgagccccatcaccatggccacctttgcccgggcccagaccccagagagctgtggcagcctgaccccagagaggaccatgagccccatccaggtgctggccgtgacaggcagcgccagcagccctgagcagggccgcagccctgagcccacagagatcagcgccaagcacgccatcttccgggtgtccccagaccggcagagctcctggcagttccagaggagcaacagcaacagcagcagcgtcatcaccacagaggacaacaagatccacatccacctgggcagcccctacatgcaggccgtggccagccctgtgcggcctgccagccccagcgcccccctgcaggacaacagaacccagggcctcatcaatggagccctgaacaagaccaccaacaaggtgaccagcagcatcaccatcacccccacagccacccccctgccccggcagagccagatcaccgtggagcccctgctgctgccccactag

SEQ ID NO: 102709 - DNA, 2136 bp, Artificial Sequence
  derived and/or modified sequence
atggccctggagaagctggaggatgccttcaacaagagcaagcaggagtgctacagcctgaagtgcaacctggagaaggagaggatgaccaccaagcagctgagccaggagctggagagcctgaaggtgcgcatcaaggagctggaggccatcgagagccggctggagaagacagagttcaccctgaaggaggacctgaccaagctgaagaccctgactgtgatgtttgtggatgagaggaagaccatgtctgagaagctgaagaagacagaggacaagctgcaggccgccagcagccagctgcaggtggagcagaacaaggtgaccaccgtgacagagaagctgattgaggagaccaagagggccctgaagagcaagacagatgtggaggagaagatgtacagcgtgaccaaggagagagatgacctgaagaacaagctgaaggccgaggaggagaagggaaatgacctgctgagccgggtgaacatgctgaagaaccggctgcagagcctggaggccatcgagaaggacttcctgaagaacaagctgaaccaggacagcggcaagagcaccacagccctgcaccaggagaacaacaagatcaaggagctgagccaggaggtggagcggctgaagctgaagctgaaggacatgaaggccattgaagatgacctgatgaagacagaagatgaatatgagaccctggagaggagatatgccaatgaaagagacaaggcccagttcctgagcaaggagctggagcacgtgaagatggagctggccaagtacaagctggccgagaagacagagaccagccatgagcagtggctgttcaagaggctgcaggaggaggaggccaagagcggccacctgagccgggaggtggatgccctgaaggagaagatccacgagtacatggccacagaagatctcatctgccacctgcagggcgaccacagcgtgctgcagaagaagctgaaccagcaggagaacagaaacagagacctgggccgggagattgagaacctgaccaaggagctggagcgctaccgccacttcagcaagagcctgcggcccagcctgaatggccgccgcatcagtgacccccaggtgttcagcaaggaggtgcagacagaggccgtggacaatgaacctccagactacaagagcctcatccccctggagagagctgtgatcaatggccagctgtatgaggagagcgagaaccaggatgaggaccccaatgatgagggctctgtgctgtccttcaagtgcagccagagcaccccctgccctgtgaacaggaagctgtggatcccctggatgaagagcaaggagggccacctgcagaatggcaagatgcagaccaagcccaatgccaactttgtgcagcccggggacctggtgctgagccacaccccaggccagcccctgcacatcaaggtgaccccagaccacgtgcagaacacagccaccctggagatcaccagccccaccacagagagcccccacagctacaccagcacagctgtgatccccaactgtggcacccccaagcagaggatcaccatcctgcagaatgccagcatcacccctgtgaagagcaagaccagcacagaggacctgatgaacctggagcagggcatgagccccatcaccatggccacctttgcccgggcccagaccccagagagctgtggcagcctgaccccagagaggaccatgagccccatccaggtgctggccgtgacaggcagcgccagcagccctgagcagggccgcagccctgagcccacagagatcagcgccaagcacgccatcttccgggtgtccccagaccggcagagctcctggcagttccagaggagcaacagcaacagcagcagcgtcatcaccacagaggacaacaagatccacatccacctgggcagcccctacatgcaggccgtggccagccctgtgcggcctgccagccccagcgcccccctgcaggacaacagaacccagggcctcatcaatggagccctgaacaagaccaccaacaaggtgaccagcagcatcaccatcacccccacagccacccccctgccccggcagagccagatcaccgtggagcccctgctgctgccccactag

SEQ ID NO: 102710 - DNA, 2514 bp, Artificial Sequence
  derived and/or modified sequence
atggtggtggatgagcagcagaggctgacagcccagctgaccctgcagaggcagaagatccaggagctgaccaccaatgccaaggagacccacaccaagctggccctggccgaggcccgggtgcaggaggaggagcagaaggccacccggctggagaaggagctgcagacccagaccaccaagttccaccaggaccaggacaccatcatggccaagctgaccaatgaagacagccagaaccggcagctgcagcagaagctggccgccctgagccggcagattgatgagctggaggagaccaacagaagcctgaggaaggccgaggaggagctgcaggacatcaaggagaagatcagcaagggggagtatggaaatgccggcatcatggccgaggtggaggagctgaggaagagggtgctggacatggagggcaaggatgaggagctgatcaagatggaggagcagtgccgggacctgaacaagaggctggagcgggagaccctgcagagcaaggacttcaagctggaggtggagaagctgagcaagaggatcatggccctggagaagctggaggatgccttcaacaagagcaagcaggagtgctacagcctgaagtgcaacctggagaaggagaggatgaccaccaagcagctgagccaggagctggagagcctgaaggtgcgcatcaaggagctggaggccatcgagagccggctggagaagacagagttcaccctgaaggaggacctgaccaagctgaagaccctgactgtgatgtttgtggatgagaggaagaccatgtctgagaagctgaagaagacagaggacaagctgcaggccgccagcagccagctgcaggtggagcagaacaaggtgaccaccgtgacagagaagctgattgaggagaccaagagggccctgaagagcaagacagatgtggaggagaagatgtacagcgtgaccaaggagagagatgacctgaagaacaagctgaaggccgaggaggagaagggaaatgacctgctgagccgggtgaacatgctgaagaaccggctgcagagcctggaggccatcgagaaggacttcctgaagaacaagctgaaccaggacagcggcaagagcaccacagccctgcaccaggagaacaacaagatcaaggagctgagccaggaggtggagcggctgaagctgaagctgaaggacatgaaggccattgaagatgacctgatgaagacagaagatgaatatgagaccctggagaggagatatgccaatgaaagagacaaggcccagttcctgagcaaggagctggagcacgtgaagatggagctggccaagtacaagctggccgagaagacagagaccagccatgagcagtggctgttcaagaggctgcaggaggaggaggccaagagcggccacctgagccgggaggtggatgccctgaaggagaagatccacgagtacatggccacagaagatctcatctgccacctgcagggcgaccacagcgtgctgcagaagaagctgaaccagcaggagaacagaaacagagacctgggccgggagattgagaacctgaccaaggagctggagcgctaccgccacttcagcaagagcctgcggcccagcctgaatggccgccgcatcagtgacccccaggtgttcagcaaggaggtgcagacagaggccgtggacaatgaacctccagactacaagagcctcatccccctggagagagctgtgatcaatggccagctgtatgaggagagcgagaaccaggatgaggaccccaatgatgagggctctgtgctgtccttcaagtgcagccagagcaccccctgccctgtgaacaggaagctgtggatcccctggatgaagagcaaggagggccacctgcagaatggcaagatgcagaccaagcccaatgccaactttgtgcagcccggggacctggtgctgagccacaccccaggccagcccctgcacatcaaggtgaccccagaccacgtgcagaacacagccaccctggagatcaccagccccaccacagagagcccccacagctacaccagcacagctgtgatccccaactgtggcacccccaagcagaggatcaccatcctgcagaatgccagcatcacccctgtgaagagcaagaccagcacagaggacctgatgaacctggagcagggcatgagccccatcaccatggccacctttgcccgggcccagaccccagagagctgtggcagcctgaccccagagaggaccatgagccccatccaggtgctggccgtgacaggcagcgccagcagccctgagcagggccgcagccctgagcccacagagatcagcgccaagcacgccatcttccgggtgtccccagaccggcagagctcctggcagttccagaggagcaacagcaacagcagcagcgtcatcaccacagaggacaacaagatccacatccacctgggcagcccctacatgcaggccgtggccagcccctag

SEQ ID NO: 102711 - DNA, 2688 bp, Artificial Sequence
  derived and/or modified sequence
atggtggtggacgagcagcagcggctgaccgcccagctgaccctgcaaagacagaagatacaggagttgactacaaacgccaaggaaacccacacaaaattggcactcgccgaggcaagagtccaggaggaggagcagaaggccacaaggttggaaaaggagcttcaaacccagacaactaagttccatcaagatcaggacacaataatggcaaaactgacaaatgaggactcccagaatcggcaactgcaacagaaactggcggctctgtctaggcagatcgacgagctggaggaaaccaatagatccctgcggaaagctgaggaagagctgcaggacattaaagaaaagattagtaagggcgagtatggcaacgctggcatcatggccgaggtagaggagctgaggaagcgggttctggacatggagggcaaggatgaagagctgatcaagatggaggagcagtgtagagatttgaataagaggttggaaagggaaactctgcaatctaaagatttcaagttggaagttgagaaactgtctaagcgtataatggcactggaaaagttggaagacgcattcaataaaagcaagcaggaatgctactcgctgaaatgtaacctggagaaggaaagaatgacaactaagcagctgtcccaggagttggagagcctgaaagtgcggatcaaggagctcgaggccatcgaaagccgcctcgaaaaaaccgaatttacattaaaggaagacctgacgaaactgaagactctgactgtcatgtttgtagatgagcgaaagacaatgagcgagaaactcaagaaaaccgaagataagctccaggccgcgtcaagccagctgcaagtggaacagaataaagtcactacagtgaccgagaagctgatcgaagagactaagcgggctctgaaatccaagacggatgtcgaggagaagatgtactccgtaaccaaggagcgggacgatctgaagaacaagctcaaagccgaagaggagaaggggaatgacctgctgagccgggtgaatatgctgaagaacagactgcagtctctggaggcaatcgagaaggacttcctgaagaataagctcaaccaggacagcgggaagtcgaccaccgccctgcatcaggagaataacaaaataaaggagctctctcaagaagtggaacggttgaaactaaagttgaaggatatgaaggcaatcgaggatgatctgatgaagacagaagatgagtacgagaccctggagaggcgctacgccaacgagcgcgacaaagcgcagttcctgagcaaggaactggagcacgtaaaaatggagctagccaagtacaagctcgccgaaaagacggaaacctctcatgagcagtggttattcaaaagactacaagaagaggaggcgaagagcgggcacctaagtcgcgaggtggacgccctgaaggagaagattcacgaatacatggccactgaagatctaatttgccatttacaaggcgatcactcagtcttgcagaagaaattaaaccaacaagaaaataggaaccgggacctgggccgagagattgagaaccttacgaaggagctggaacgctaccgccatttctcaaagtctcttcgcccgagtctgaacggaagaaggattagtgaccctcaggttttcagcaaagaggtgcagaccgaagctgtggataatgaacctcctgactacaaatcactcattcccctcgagcgtgccgtaatcaatggtcagctgtatgaagagtctgagaaccaagatgaagaccctaacgacgagggatctgtgctgagcttcaagtgctcccaatctacaccttgtccagtgaacagaaaactgtggattccatggatgaaatccaaggaaggccatctgcagaatgggaaaatgcaaacgaagcccaatgcgaatttcgtccaacctggcgaccttgtcttgagtcacactcctggccagcctctgcacattaaagtgactccagatcatgtccaaaatacagcaactctagaaataactagtcccaccaccgagtccccacacagttatacatccacagccgtgatccctaactgtggcacacctaagcagagaataactattcttcagaatgcgagcattactcctgtgaagtcaaagaccagcaccgaggacttaatgaatcttgagcaggggatgagccccattacgatggcaacatttgcgcgggcccagacaccggagagctgcggctctttaacccctgaacggactatgagcccaattcaggttctggccgtcacgggctccgcatcctccccagaacagggaaggagtccagaacctacagagatctctgcaaaacatgcaatattccgggtcagtccagatagacagagttcatggcagttccagcgctcaaacagtaatagctcttctgtcattacaaccgaagataataagatccacatccacctgggcagtccgtacatgcaagccgttgcgagcccagtgcgtccagccagccccagtgcacctctgcaggacaatcgcacccagggtctgattaatggcgctctgaacaaaactacaaacaaagtaacatcctcgattacgatcacgcctaccgcgacccccctgcctcgccaaagccagatcactgtcgaacctcttcttctcccccactag

SEQ ID NO: 102712 - DNA, 2136 bp, Artificial Sequence
  derived and/or modified sequence
atggccctggagaagctggaggacgccttcaacaagagcaagcaggagtgttactccctgaagtgtaatttggagaaggaacgaatgaccactaaacagctgagtcaggagctggagagccttaaggtgcgcatcaaggagttagaagcaattgagtcacgcctggagaaaaccgaatttactttgaaagaggatctgactaaactgaagacattgactgttatgttcgtggacgagcgaaaaaccatgagcgagaagctgaaaaaaacagaggataagcttcaagccgctagctcccaattgcaggtcgagcaaaataaagtgacaactgtgactgagaagctgatcgaggaaaccaaacgggcactaaaatctaagactgacgtggaagaaaaaatgtattcagtcacaaaagagcgggatgacctgaaaaataaactgaaggcggaggaggagaaaggtaacgatctgcttagcagagtgaatatgctgaagaatcgcctgcagtctctggaggctatcgagaaagattttcttaagaacaagttgaaccaggatagcggtaaatccactacagcactccatcaggaaaacaataagattaaagaactgtcccaggaagtcgagagacttaaactgaagctcaaagacatgaaggcaatcgaggatgatcttatgaaaactgaggatgagtacgagactctggagcgccgctatgccaacgagcgggataaagctcaattcttgtccaaagagctggagcacgtaaaaatggagttggctaaatacaagctggctgaaaaaactgagacctctcacgaacagtggctctttaaacgcttacaggaggaagaagctaaatctggccaccttagccgcgaggttgacgccctcaaggaaaagattcacgaatatatggcaacagaggatctgatttgccatctgcagggggatcacagcgtcctccaaaaaaaacttaatcagcaagaaaataggaatcgggatctgggcagggaaatcgagaatctgaccaaagaactggaacgctacagacatttcagtaagagtctccgaccaagcctcaatgggagacgcatcagtgacccacaagtgtttagtaaggaagtccagaccgaggctgtggataatgagccccccgattataagtcccttatacccctcgagcgagcagtcattaacggccagttatacgaagagtcagagaatcaggatgaggaccctaacgatgaagggtcggtgctctcgttcaaatgttcacaatctacaccctgccccgtgaaccggaaactgtggattccctggatgaagtcgaaagagggccacctccagaacggcaaaatgcagactaaaccgaacgctaatttcgtccagcctggtgacctggtcctatcccatacgcccggccaaccattgcatataaaagttactcctgatcatgtgcagaatacagcgaccttagagattacatcccctacaacagaatcccctcacagttatacaagcactgcggtgattcccaattgcgggacgcctaagcagcggatcacaatcctccagaacgcttctatcacccctgtgaaaagtaaaacttccaccgaggatctgatgaatctggaacaaggcatgagccccattaccatggccacatttgctagggcacagactccagagagctgcggttccttgacaccagaaaggactatgtcccccattcaagtgttagccgttacaggtagtgcttcaagcccggagcaaggtcgctcaccagagccaacagaaatatcagccaaacacgccatatttagagtgagccctgaccgacagtctagctggcagttccagcgcagtaactccaactcgagctcggtgattaccactgaggacaataagattcatattcacctcggaagcccatatatgcaggccgtggcttccccagtccgaccagcctctcccagcgccccactgcaggataaccgcactcagggcttaatcaacggcgcacttaacaaaacaaccaacaaggtgactagttctattaccattacaccaaccgctacccctttgccccgtcaaagccagatcacggtggagcctctgttgctgccacactag

SEQ ID NO: 102713 - DNA, 2514 bp, Artificial Sequence
  derived and/or modified sequence
atggtggtggacgagcagcagcggctgaccgcccagctgaccctgcagcgacagaaaattcaggagctcaccacaaacgcgaaggagactcatactaagctcgctctggccgaggccagggtacaggaagaagagcagaaggctacccgcctcgaaaaagaacttcagactcagactacaaagttccaccaagaccaagacacgatcatggctaaactgacaaatgaagactcacaaaacagacagctccagcaaaaactggcagccctcagccgacagatcgacgagctggaggagacaaaccgaagtctgagaaaggctgaagaagagctgcaggatattaaggagaaaattagtaaaggcgagtacggaaatgcgggaatcatggccgaagtagaagagctgagaaagcgtgtgctagatatggaggggaaggatgaagagcttatcaaaatggaagaacaatgtcgcgacctcaataagcgccttgagcgagaaacgctccaaagcaaggactttaagttggaggtcgagaagctgtctaagaggatcatggctctagagaaattggaagatgcttttaataaatccaagcaagaatgttacagtttaaagtgtaatttggaaaaagaacggatgactaccaaacagctctcacaggagctggaatcactgaaggtccggattaaggagctggaggccatagagtccagactggaaaagaccgagtttaccctaaaagaggaccttaccaagctaaagacgcttaccgtaatgtttgtggacgagcgcaagactatgtccgagaagttgaagaagaccgaggataagctgcaggcagcatcgagtcaacttcaggtggagcagaacaaggtcacaacagtgaccgaaaagctgatcgaagaaaccaagagagcactcaagagcaaaaccgatgtcgaggagaaaatgtatagcgtgactaaggagagagacgacctgaaaaacaagcttaaagcagaagaggagaaaggtaacgacctgctctccagggttaacatgcttaagaaccggttgcagtcgctggaagctatcgagaaagatttcctcaagaacaaactcaaccaggattccggcaagtctaccactgctctgcaccaggaaaataacaagattaaagaacttagccaggaggtagagcgcttaaagttgaagctgaaggacatgaaagctatcgaggatgacctgatgaaaacagaagatgagtacgagacattagaacggcggtatgccaatgagagagacaaggcacagttcctgtccaaagagttagagcacgtaaaaatggaactcgccaagtacaagctcgccgagaaaactgaaacatcacacgaacagtggctgttcaagcgactgcaagaagaggaggccaaatctggtcacttatccagagaggtggatgctttgaaagaaaagatccacgagtacatggccaccgaggacctcatctgccatctccagggtgaccattctgttttgcaaaagaaactcaatcagcaggagaatcggaaccgcgacctcggacgcgagatcgagaatttgactaaggagttggagaggtaccgtcacttcagcaaatcgctgaggccgtcgctgaacggacgcagaatatctgatcctcaggtgttttctaaggaggtgcagacagaagccgtcgataacgaacctcccgactataagtccctgattcccctggaacgcgcggttatcaatggccagctttacgaggaatcagagaatcaggatgaggacccaaatgacgaaggcagcgttctgtcgttcaagtgtagccagagtacaccttgcccagtgaacaggaagctgtggataccatggatgaagtccaaggaaggtcatttacagaatggtaagatgcagacaaaacctaatgccaattttgtacagccgggggacctggtgctaagtcataccccaggccagccactccacattaaggtcacccctgaccatgtgcagaatacggcgactctcgaaattactagtcccacaaccgaaagcccacactcctacacttcaaccgcagtaattcctaattgcgggactcccaagcagaggatcacaatcttgcagaacgctagtattacacccgttaaatcaaagaccagtaccgaagaccttatgaatttggaacaagggatgagccctattaccatggcaactttcgccagggctcagaccccagagagctgcgggtcacttaccccagagagaacaatgtcgcccattcaagtgctggccgttactggatcagcaagcagccctgagcaggggcgctccccagaaccgacagagatctctgctaagcacgctatattcagagtatcccccgaccgacagtctagctggcagtttcagaggagcaactctaattctagctctgtgataactactgaggacaataagatccacattcatcttggttctccatacatgcaggccgttgccagcccatag

SEQ ID NO: 102714 - DNA, 2688 bp, Artificial Sequence
  derived and/or modified sequence
atggtggtcgatgagcagcagcgcctgaccgcacagctaactctgcagaggcagaaaattcaagagcttactaccaatgccaaagagactcataccaaactcgcactcgctgaagcccgagtccaggaagaggagcagaaggctactcggttggaaaaggagctgcaaacccagaccaccaagttccatcaagatcaggacactatcatggccaagctgactaatgaagactcccaaaacagacaattgcagcagaaactggccgcattgagcagacagattgatgaactcgaagaaacaaacaggagcctcagaaaggcggaagaggaactgcaggatataaaagaaaaaatctccaaaggcgagtacggaaacgccggaattatggctgaagtggaagaactgcgtaagcgggtgttggatatggagggcaaggatgaggagctcatcaagatggaagaacagtgcagagatcttaacaagaggctcgaaagagagacactccagagcaaggactttaaactagaagtcgaaaaactctctaagcggatcatggccctggaaaagctcgaggatgcatttaacaagtcgaaacaggagtgttatagcctgaaatgcaacctggagaaagaacggatgaccacaaaacaactgagtcaggaattggagtctctaaaagtgcggatcaaggagctggaagccatcgaaagccgcctggagaaaaccgaattcacgttaaaggaagatttaacaaagctgaaaacactgaccgtgatgttcgtggacgagcgaaagaccatgtccgaaaaacttaagaagacagaagacaaactccaagctgcatcctcccagttacaagtcgagcagaacaaggtaacaacagtcactgaaaagttgattgaagagacgaagagggccctaaaaagcaagactgatgtggaggaaaagatgtactctgttaccaaggagcgggatgacttgaagaataagctgaaggctgaagaagaaaagggcaatgatctactgagcagagtgaacatgctgaagaatcgcttgcagtccttagaggctatagagaaggacttcctcaaaaataaattgaaccaggacagtggcaagagtactacagctctccaccaggagaacaataagatcaaagaactttctcaggaagtcgaacgcttgaagctgaagctaaaggatatgaaagcaatagaggacgatctgatgaagaccgaagatgagtatgagacactggaacgacggtatgccaatgagcgggataaagcccagttccttagtaaagagctcgagcatgtgaagatggaactggcaaagtataaactagctgagaaaacagagacctcccatgagcagtggctgtttaaaaggttacaggaagaggaggccaagagtggccacctgtctagagaggttgatgcacttaaggaaaagatacacgaatatatggctacggaagacctgatctgtcacctgcaaggcgaccatagtgtgctgcagaagaagttgaaccagcaagagaaccggaatagggatctcgggagggaaatcgaaaatcttacaaaggagctggaacgttatcgacatttctctaagtccctgcgtccgtcacttaatggtcgaaggatatctgatccccaggttttttcgaaggaggtccaaactgaggccgtcgataatgagccacctgactacaagtcacttatccctctggagcgggctgtcataaatggacagctgtatgaggaaagtgaaaatcaggatgaggacccgaacgatgaaggctccgtcctctcattcaagtgcagccaaagcactccgtgccccgtcaatcgtaagctgtggatcccctggatgaaaagcaaggaagggcacctgcagaacggcaagatgcaaaccaagccaaatgctaactttgtacagccaggagatctggtgctgtctcacacccccggtcagcctcttcacattaaggtgacacccgatcacgtacagaatactgcaacgctcgagatcacttctcccactacagaatccccacactcctatacatccactgctgtaatccctaattgcggcacgcccaagcagcggattaccattttgcagaatgctagcattacccctgtgaagagcaagacgagcactgaggaccttatgaatctcgagcagggaatgagcccgattacaatggctactttcgcgagagcccagacccctgagagctgcggcagcctgacccctgagcgaacaatgagccctatccaggttctggctgtcactggatctgcctcttcacctgaacaggggagaagtccggagcctacagaaatatcagccaagcacgccatcttccgcgtgtctcctgaccgacaaagtagttggcagttccagcgctctaattctaatagctcaagcgttatcacaaccgaagataacaagatacacattcacctcggctccccatacatgcaggctgtcgcaagccccgtgcgccctgcctctccttcggctccacttcaggacaatcgtacacaaggtctcatcaacggcgctctaaacaaaaccaccaataaagtaacatctagcatcaccatcacccctacagccactcctttgcctagacagtctcagataacagtagagcctctccttttaccacattag

SEQ ID NO: 102715 - DNA, 2136 bp, Artificial Sequence
  derived and/or modified sequence
atggccctagaaaagctggaagacgcctttaataagtccaagcaggagtgctactcactcaagtgtaatctcgagaaggagcgaatgacaacaaagcagctctctcaggagttggaaagtctgaaggtccggataaaggaactcgaagccatcgagtccaggctggagaaaacggagttcacccttaaggaggatctgacgaagctcaagacactcaccgtcatgttcgtggacgaaagaaagactatgtcggaaaagctgaagaaaaccgaagataagctccaggcagcttccagccaactccaagtggaacaaaacaaggtcaccaccgtcacggaaaagcttattgaggagaccaaacgcgcactaaagagcaagacagatgtggaggagaagatgtactctgtgactaaagagagggatgatctgaaaaacaagctgaaggccgaggaggagaaagggaacgacctgctgagccgcgtgaatatgctgaagaatcgactccaatctctggaggctattgagaaagattttctgaaaaacaaactgaatcaggattctggaaagagcacaactgcgctgcaccaagagaacaacaaaattaaggagcttagccaggaggtggagaggctgaagctgaagctgaaggacatgaaagctatcgaggacgacctgatgaagaccgaggatgaatatgaaaccttggaaaggaggtacgctaatgaacgagacaaggcccagttccttagcaaagaactcgagcacgtgaaaatggagctcgctaagtataagctcgccgagaaaacagagaccagtcatgaacaatggcttttcaagcgtcttcaggaggaagaggcaaagtcggggcacctgagccgggaggtggacgctctgaaggagaaaattcacgaatacatggcaaccgaagacctgatttgccaccttcaaggtgaccattctgtccttcaaaagaaactaaaccagcaggaaaatcgaaatcgggatctcggaagagagatcgagaacctgaccaaggaactcgaaagataccggcacttcagcaagtcccttaggcctagcctgaacggtcggaggatttccgacccacaagtgttcagtaaagaagtgcaaactgaggccgtggataacgagcctcccgactataagagtctgattccactcgagcgggcagtgataaacgggcagctgtacgaagagtcagaaaaccaggacgaagaccctaatgacgagggatccgtgctctccttcaagtgcagccaatcaaccccatgcccagtgaatcgaaaattgtggattccgtggatgaaatcgaaggaagggcatctgcagaatggaaagatgcagaccaaaccaaacgctaattttgtgcagcccggagatctggtattatcgcatacgcccggtcaaccactacacataaaggtgacccccgaccatgtacagaacacggctaccctagagataactagtccgactaccgagagcccccactcgtataccagtacggctgtcatccccaactgcggcaccccaaagcagcgcattacaatcttacaaaatgcctcaattactcccgtgaaaagcaagaccagcaccgaggacctgatgaacctggagcagggaatgagtccaatcactatggccacctttgctagggcccaaactcccgagtcttgtggtagccttactcctgaacggacaatgtcgcccatccaggtcctcgcagtgactggtagtgcttcgtcccctgagcagggcaggtcccctgagcccaccgagatctcagccaagcacgctatattccgggtgtctcccgacaggcaatcttcttggcagtttcagcggtcgaactctaactctagcagcgtgatcacaaccgaagacaacaaaattcatattcacctgggttcaccttatatgcaggctgtggctagccccgtccgcccagcatccccgtctgcgcctttgcaggacaatcgcacacaggggctgatcaacggggctttgaacaagaccaccaacaaggtgaccagctccatcactatcaccccaacagccactcctctgcccagacagtctcagattaccgtggagccattactgctgccacactag

SEQ ID NO: 102716 - DNA, 2514 bp, Artificial Sequence
  derived and/or modified sequence
atggtcgtagacgagcagcaaagactaaccgcacagctcactctgcagcggcaaaagattcaagaactgacaactaatgccaaggagactcacacaaagctggctctcgctgaggcaagagtacaggaagaggaacagaaagctacccgtttagagaaagagctgcagacccagaccaccaaattccatcaggaccaggataccattatggcaaaacttacaaatgaagacagccagaacagacagttacagcagaaactcgctgcattgtccagacagatagacgagcttgaagaaactaataggtcactgcggaaagcagaagaggagttgcaggatattaaggaaaaaatttccaagggagagtatggcaacgcaggtatcatggccgaggttgaggagctgaggaagcgtgtcctggacatggagggcaaggatgaggagctcatcaagatggaggaacagtgccgcgacctcaataaacggctggagcgcgagactctgcagagcaaagacttcaagttagaagtggagaaactgtccaagagaatcatggccctggagaagctggaggatgcatttaataaatctaagcaagaatgttattcgcttaaatgcaacctcgaaaaggagagaatgacaacaaaacagctgtcacaagaactagaatctttaaaggtaagaattaaagaactcgaggccatcgagtcaaggcttgagaagactgagttcacactgaaggaagaccttactaagctaaaaacactgacagtgatgttcgtcgacgagcggaaaacaatgtccgagaaattgaagaaaaccgaggataaactgcaagcggcaagctcacagttacaagtggagcagaataaagtgaccacagtgacggaaaagcttattgaggaaactaagcgtgctctgaagtctaaaaccgacgtcgaagaaaaaatgtactcagtgacaaaagaaagggacgacctaaaaaacaagcttaaggccgaagaggagaagggcaacgatctgctatccagagtgaatatgctgaagaaccgactgcagtcactggaggccattgaaaaggatttcttgaaaaataagcttaatcaggacagtggcaaatccaccactgctcttcatcaagaaaacaataagataaaggagctaagtcaagaagtggagagactcaagctgaagttaaaagacatgaaggctatcgaggacgacctgatgaagactgaagatgaatacgagacactagagcgcagatatgcaaacgaacgcgacaaggcgcagttcctgagcaaggagttggaacacgtgaagatggaactggctaaatacaaattagcagagaaaactgagacaagccatgagcagtggctcttcaagcgtctccaggaagaggaagccaagagcggccacctatctcgcgaagtggacgcccttaaagaaaagatacacgagtacatggcaacggaagatctgatctgccatctacagggtgaccactctgttctccaaaaaaagctgaaccagcaggaaaacagaaatagggacctgggacgagagattgagaatctaactaaggaactcgaacgctaccggcatttttcaaagagtctcagaccaagcctgaacggacgcagaatctcagatccacaggtgtttagcaaggaggttcaaacagaggctgtggataatgagccccctgactacaagagtttgatccctcttgagcgcgctgtgatcaatggacaattgtatgaagagtccgaaaatcaggacgaagatcccaacgatgaaggcagcgtgctgtctttcaagtgttctcagtctacaccctgccctgtcaaccgcaaactttggatcccttggatgaaatccaaggagggtcatctacaaaatggaaagatgcaaaccaaacccaatgcaaacttcgttcagccaggtgatttagttttgtctcacaccccaggccaacctctgcatatcaaggtgacccctgatcacgtgcagaataccgcaaccctcgaaatcacaagtccaaccacagaatccccccattcatatacttctactgccgtgatccccaactgcggtactccaaaacagagaattacaatcctgcagaacgcgtctatcactccagtcaagagcaagacctccaccgaggacctaatgaatttagagcaaggcatgtcacctattaccatggccaccttcgctagggctcaaacaccagaaagctgtggctcactgacacccgagcggacaatgtccccgatccaagtgctggctgtcaccggctctgcctcatcacccgagcagggacgttctcctgaaccaactgagatctcagccaagcacgcaatttttcgcgtgtcccccgaccgacagagttcatggcagtttcagcgatcgaattcaaatagctcttcggtgatcactacagaagataacaagattcatatccacttaggaagcccctacatgcaggccgtggctagcccatag

SEQ ID NO: 102717 - DNA, 2688 bp, Artificial Sequence
  derived and/or modified sequence
atggtggtggacgagcagcagagactgaccgcccagctgaccctgcagagacagaagatccaggagctgaccaccaacgccaaggagacccacaccaagctggccctggccgaggccagagtgcaggaggaggagcagaaggccaccagactggagaaggagctgcagacccagaccaccaagttccaccaggaccaggacaccatcatggccaagctgaccaacgaggacagccagaacagacagctgcagcagaagctggccgccctgagcagacagatcgacgagctggaggagaccaacagaagcctgagaaaggccgaggaggagctgcaggacatcaaggagaagatcagcaagggcgagtacggcaacgccggcatcatggccgaggtggaggagctgagaaagagagtgctggacatggagggcaaggacgaggagctgatcaagatggaggagcagtgcagagacctgaacaagagactggagagagagaccctgcagagcaaggacttcaagctggaggtggagaagctgagcaagagaatcatggccctggagaagctggaggacgccttcaacaagagcaagcaggagtgctacagcctgaagtgcaacctggagaaggagagaatgaccaccaagcagctgagccaggagctggagagcctgaaggtgagaatcaaggagctggaggccatcgagagcagactggagaagaccgagttcaccctgaaggaggacctgaccaagctgaagaccctgaccgtgatgttcgtggacgagagaaagaccatgagcgagaagctgaagaagaccgaggacaagctgcaggccgccagcagccagctgcaggtggagcagaacaaggtgaccaccgtgaccgagaagctgatcgaggagaccaagagagccctgaagagcaagaccgacgtggaggagaagatgtacagcgtgaccaaggagagagacgacctgaagaacaagctgaaggccgaggaggagaagggcaacgacctgctgagcagagtgaacatgctgaagaacagactgcagagcctggaggccatcgagaaggacttcctgaagaacaagctgaaccaggacagcggcaagagcaccaccgccctgcaccaggagaacaacaagatcaaggagctgagccaggaggtggagagactgaagctgaagctgaaggacatgaaggccatcgaggacgacctgatgaagaccgaggacgagtacgagaccctggagagaagatacgccaacgagagagacaaggcccagttcctgagcaaggagctggagcacgtgaagatggagctggccaagtacaagctggccgagaagaccgagaccagccacgagcagtggctgttcaagagactgcaggaggaggaggccaagagcggccacctgagcagagaggtggacgccctgaaggagaagatccacgagtacatggccaccgaggacctgatctgccacctgcagggcgaccacagcgtgctgcagaagaagctgaaccagcaggagaacagaaacagagacctgggcagagagatcgagaacctgaccaaggagctggagagatacagacacttcagcaagagcctgagacccagcctgaacggcagaagaatcagcgacccccaggtgttcagcaaggaggtgcagaccgaggccgtggacaacgagccccccgactacaagagcctgatccccctggagagagccgtgatcaacggccagctgtacgaggagagcgagaaccaggacgaggaccccaacgacgagggcagcgtgctgagcttcaagtgcagccagagcaccccctgccccgtgaacagaaagctgtggatcccctggatgaagagcaaggagggccacctgcagaacggcaagatgcagaccaagcccaacgccaacttcgtgcagcccggcgacctggtgctgagccacacccccggccagcccctgcacatcaaggtgacccccgaccacgtgcagaacaccgccaccctggagatcaccagccccaccaccgagagcccccacagctacaccagcaccgccgtgatccccaactgcggcacccccaagcagagaatcaccatcctgcagaacgccagcatcacccccgtgaagagcaagaccagcaccgaggacctgatgaacctggagcagggcatgagccccatcaccatggccaccttcgccagagcccagacccccgagagctgcggcagcctgacccccgagagaaccatgagccccatccaggtgctggccgtgaccggcagcgccagcagccccgagcagggcagaagccccgagcccaccgagatcagcgccaagcacgccatcttcagagtgagccccgacagacagagcagctggcagttccagagaagcaacagcaacagcagcagcgtgatcaccaccgaggacaacaagatccacatccacctgggcagcccctacatgcaggccgtggccagccccgtgagacccgccagccccagcgcccccctgcaggacaacagaacccagggcctgatcaacggcgccctgaacaagaccaccaacaaggtgaccagcagcatcaccatcacccccaccgccacccccctgcccagacagagccagatcaccgtggagcccctgctgctgccccactag

SEQ ID NO: 102718 - DNA, 2136 bp, Artificial Sequence
  derived and/or modified sequence
atggccctggagaagctggaggacgccttcaacaagagcaagcaggagtgctacagcctgaagtgcaacctggagaaggagagaatgaccaccaagcagctgagccaggagctggagagcctgaaggtgagaatcaaggagctggaggccatcgagagcagactggagaagaccgagttcaccctgaaggaggacctgaccaagctgaagaccctgaccgtgatgttcgtggacgagagaaagaccatgagcgagaagctgaagaagaccgaggacaagctgcaggccgccagcagccagctgcaggtggagcagaacaaggtgaccaccgtgaccgagaagctgatcgaggagaccaagagagccctgaagagcaagaccgacgtggaggagaagatgtacagcgtgaccaaggagagagacgacctgaagaacaagctgaaggccgaggaggagaagggcaacgacctgctgagcagagtgaacatgctgaagaacagactgcagagcctggaggccatcgagaaggacttcctgaagaacaagctgaaccaggacagcggcaagagcaccaccgccctgcaccaggagaacaacaagatcaaggagctgagccaggaggtggagagactgaagctgaagctgaaggacatgaaggccatcgaggacgacctgatgaagaccgaggacgagtacgagaccctggagagaagatacgccaacgagagagacaaggcccagttcctgagcaaggagctggagcacgtgaagatggagctggccaagtacaagctggccgagaagaccgagaccagccacgagcagtggctgttcaagagactgcaggaggaggaggccaagagcggccacctgagcagagaggtggacgccctgaaggagaagatccacgagtacatggccaccgaggacctgatctgccacctgcagggcgaccacagcgtgctgcagaagaagctgaaccagcaggagaacagaaacagagacctgggcagagagatcgagaacctgaccaaggagctggagagatacagacacttcagcaagagcctgagacccagcctgaacggcagaagaatcagcgacccccaggtgttcagcaaggaggtgcagaccgaggccgtggacaacgagccccccgactacaagagcctgatccccctggagagagccgtgatcaacggccagctgtacgaggagagcgagaaccaggacgaggaccccaacgacgagggcagcgtgctgagcttcaagtgcagccagagcaccccctgccccgtgaacagaaagctgtggatcccctggatgaagagcaaggagggccacctgcagaacggcaagatgcagaccaagcccaacgccaacttcgtgcagcccggcgacctggtgctgagccacacccccggccagcccctgcacatcaaggtgacccccgaccacgtgcagaacaccgccaccctggagatcaccagccccaccaccgagagcccccacagctacaccagcaccgccgtgatccccaactgcggcacccccaagcagagaatcaccatcctgcagaacgccagcatcacccccgtgaagagcaagaccagcaccgaggacctgatgaacctggagcagggcatgagccccatcaccatggccaccttcgccagagcccagacccccgagagctgcggcagcctgacccccgagagaaccatgagccccatccaggtgctggccgtgaccggcagcgccagcagccccgagcagggcagaagccccgagcccaccgagatcagcgccaagcacgccatcttcagagtgagccccgacagacagagcagctggcagttccagagaagcaacagcaacagcagcagcgtgatcaccaccgaggacaacaagatccacatccacctgggcagcccctacatgcaggccgtggccagccccgtgagacccgccagccccagcgcccccctgcaggacaacagaacccagggcctgatcaacggcgccctgaacaagaccaccaacaaggtgaccagcagcatcaccatcacccccaccgccacccccctgcccagacagagccagatcaccgtggagcccctgctgctgccccactag

SEQ ID NO: 102719 - DNA, 2514 bp, Artificial Sequence
  derived and/or modified sequence
atggtggtggacgagcagcagagactgaccgcccagctgaccctgcagagacagaagatccaggagctgaccaccaacgccaaggagacccacaccaagctggccctggccgaggccagagtgcaggaggaggagcagaaggccaccagactggagaaggagctgcagacccagaccaccaagttccaccaggaccaggacaccatcatggccaagctgaccaacgaggacagccagaacagacagctgcagcagaagctggccgccctgagcagacagatcgacgagctggaggagaccaacagaagcctgagaaaggccgaggaggagctgcaggacatcaaggagaagatcagcaagggcgagtacggcaacgccggcatcatggccgaggtggaggagctgagaaagagagtgctggacatggagggcaaggacgaggagctgatcaagatggaggagcagtgcagagacctgaacaagagactggagagagagaccctgcagagcaaggacttcaagctggaggtggagaagctgagcaagagaatcatggccctggagaagctggaggacgccttcaacaagagcaagcaggagtgctacagcctgaagtgcaacctggagaaggagagaatgaccaccaagcagctgagccaggagctggagagcctgaaggtgagaatcaaggagctggaggccatcgagagcagactggagaagaccgagttcaccctgaaggaggacctgaccaagctgaagaccctgaccgtgatgttcgtggacgagagaaagaccatgagcgagaagctgaagaagaccgaggacaagctgcaggccgccagcagccagctgcaggtggagcagaacaaggtgaccaccgtgaccgagaagctgatcgaggagaccaagagagccctgaagagcaagaccgacgtggaggagaagatgtacagcgtgaccaaggagagagacgacctgaagaacaagctgaaggccgaggaggagaagggcaacgacctgctgagcagagtgaacatgctgaagaacagactgcagagcctggaggccatcgagaaggacttcctgaagaacaagctgaaccaggacagcggcaagagcaccaccgccctgcaccaggagaacaacaagatcaaggagctgagccaggaggtggagagactgaagctgaagctgaaggacatgaaggccatcgaggacgacctgatgaagaccgaggacgagtacgagaccctggagagaagatacgccaacgagagagacaaggcccagttcctgagcaaggagctggagcacgtgaagatggagctggccaagtacaagctggccgagaagaccgagaccagccacgagcagtggctgttcaagagactgcaggaggaggaggccaagagcggccacctgagcagagaggtggacgccctgaaggagaagatccacgagtacatggccaccgaggacctgatctgccacctgcagggcgaccacagcgtgctgcagaagaagctgaaccagcaggagaacagaaacagagacctgggcagagagatcgagaacctgaccaaggagctggagagatacagacacttcagcaagagcctgagacccagcctgaacggcagaagaatcagcgacccccaggtgttcagcaaggaggtgcagaccgaggccgtggacaacgagccccccgactacaagagcctgatccccctggagagagccgtgatcaacggccagctgtacgaggagagcgagaaccaggacgaggaccccaacgacgagggcagcgtgctgagcttcaagtgcagccagagcaccccctgccccgtgaacagaaagctgtggatcccctggatgaagagcaaggagggccacctgcagaacggcaagatgcagaccaagcccaacgccaacttcgtgcagcccggcgacctggtgctgagccacacccccggccagcccctgcacatcaaggtgacccccgaccacgtgcagaacaccgccaccctggagatcaccagccccaccaccgagagcccccacagctacaccagcaccgccgtgatccccaactgcggcacccccaagcagagaatcaccatcctgcagaacgccagcatcacccccgtgaagagcaagaccagcaccgaggacctgatgaacctggagcagggcatgagccccatcaccatggccaccttcgccagagcccagacccccgagagctgcggcagcctgacccccgagagaaccatgagccccatccaggtgctggccgtgaccggcagcgccagcagccccgagcagggcagaagccccgagcccaccgagatcagcgccaagcacgccatcttcagagtgagccccgacagacagagcagctggcagttccagagaagcaacagcaacagcagcagcgtgatcaccaccgaggacaacaagatccacatccacctgggcagcccctacatgcaggccgtggccagcccctag

SEQ ID NO: 102720 - protein, 148 aa, Artificial Sequence
  derived and/or modified sequence
MEVVTFGDVAVHFSREEWQCLDPGQRALYREVMLENHSSVAGLAGFLVFKPELISRLEQGEEPWVLDLQGAEGTEAPRTSKTGFLGRPTMGQEPRHPHAPPATPVPGLPKHCSQRLTLPPPGLSSSPLGHFLVHDQDRRRGTSAIWMV

SEQ ID NO: 102721 - DNA, 447 bp, Artificial Sequence
  derived and/or modified sequence
atggaggtggtgaccttcggcgacgtggccgtgcacttcagcagagaggagtggcagtgcctggaccccggccagagagccctgtacagagaggtgatgctggagaaccacagcagcgtggccggcctggccggcttcctggtgttcaagcccgagctgatcagcagactggagcagggcgaggagccctgggtgctggacctgcagggcgccgagggcaccgaggcccccagaaccagcaagaccggcttcctgggcagacccaccatgggccaggagcccagacacccccacgccccccccgccacccccgtgcccggcctgcccaagcactgcagccagagactgaccctgcccccccccggcctgagcagcagccccctgggccacttcctggtgcacgaccaggacagaagaagaggcaccagcgccatctggatggtgtag

SEQ ID NO: 102722 - DNA, 447 bp, Artificial Sequence
  derived and/or modified sequence
atggaagttgttacttttggcgacgtggcagtgcatttcagccgtgaagaatggcagtgtcttgacccagggcagcgggcactctaccgggaagtgatgctggaaaaccacagttccgtcgctggcttagctgggtttctggtgtttaagccggagctgatctccaggctagagcagggcgaggagccctgggtcttggacctgcaaggcgccgaaggtacagaggcaccccgcactagcaaaactggcttcttagggcgaccgaccatgggtcaggaaccgaggcacccacacgctccccctgccacacccgtccccggcttgcccaaacattgctctcaacggctcacgcttcctccacccggtctcagctcctcccctctgggtcactttctggttcacgatcaggacagaagacggggaacctcggcaatatggatggtttag

SEQ ID NO: 102723 - DNA, 447 bp, Artificial Sequence
  derived and/or modified sequence
atggaggtggtgacctttggagatgtggccgtgcacttcagccgggaggagtggcagtgcctggaccccggccagagggccctgtaccgggaggtgatgctggagaaccacagctctgtggccggcctggccggcttcctggtgttcaagccagagctgatcagccggctggagcagggcgaggagccctgggtgctggacctgcagggcgctgagggcacagaggcccccaggaccagcaagacaggcttcctgggccggcccaccatgggccaggagcccaggcacccccacgcccccccagccacccctgtgcccggcctgcccaagcactgcagccagaggctgaccctgcccccacctggcctgagcagcagccccctgggccacttcctggtgcatgaccaggacagaagaagaggcaccagcgccatctggatggtgtag

SEQ ID NO: 102724 - DNA, 447 bp, Artificial Sequence
  derived and/or modified sequence
atggaggtggtgaccttcggcgacgtggccgtgcacttcagccgggaggagtggcagtgtttagaccccggtcagagggctctgtatcgggaggtaatgcttgagaatcatagttccgtcgccgggctggcgggctttctcgtattcaaacctgagcttattagcaggctggagcagggcgaagaaccttgggtccttgaccttcagggtgctgagggcacagaagccccccgtacctccaagactgggttcctcggaaggcccacgatggggcaggaaccccgccacccccacgcacctccagcaacccctgtacctggccttccaaagcactgcagccagagattaaccttgccacctccggggctatcgtcctctcctctgggccactttctagtgcatgatcaggatagacgtcgcgggaccagcgccatctggatggtttag

SEQ ID NO: 102725 - DNA, 447 bp, Artificial Sequence
  derived and/or modified sequence
atggaagtggtgacctttggagatgttgccgtccacttttcccgtgaggagtggcagtgcctggatcccggacagagagctctgtaccgcgaggttatgttggaaaatcacagcagcgtcgcgggtctcgctggttttctggtgttcaaaccagaactcatttcccgcctagagcagggagaggaaccatgggttctggacctccagggcgctgaaggcacggaggcacctagaactagcaaaaccggattcctgggacgaccgaccatggggcaggaaccacggcacccgcacgcccctccagccaccccagttcctgggctgcccaagcattgtagtcagcggctaaccttaccaccgccaggtctgtcctcctcgccactgggccacttcttagtgcacgatcaggatagaagacgagggacaagcgcaatttggatggtgtag

SEQ ID NO: 102726 - DNA, 1874 bp, Artificial Sequence
  derived and/or modified sequence
cgtttccggcggcgtcgcgcgtttgcgagcctcgggtggtcctcagggagggtctctcggccagaacacgtggatgcccacccaccactgagcctcatggaggtggtaacatttggcgatgtggctgtgcacttctctcgggaggagtggcagtgtctggaccctggccagagggccctctacagggaagtgatgctggagaaccacagcagtgtggctggactagcaggattcctggttttcaagcctgagctgatctctcggctggagcagggagaagagccatgggtcctcgacctgcagggagcagaggggacagaggcaccaaggacctccaagacaggctttctgggccgcccaaccatgggacaagagccaaggcacccacatgcaccgcctgcaactcctgttcctggccttccaaaacactgctcacaaagactgaccctgcctcctcctgggctctcgtcatctcctcttggccacttcctggttcatgatcaggacagaaggaggggaacgtcagccatatggatggtctgaaaattccagattctgtgctaaccataatgctgtgttcttttcactaacagcaaccagccaaaaaggggctggggtgcaagcttcattctgcttcagcacctggattctctctggattgacatggtcctaagtcaggggctggcaaaccattcgtagctttttacatttctgaatggttggggagaaaataagagacttgtgacatttgaaaactatgttaaaatcgaatttgactgtgcacagtgtccctgggcttggtgatgcccaagcgtcttcatggagcctctggcggctttcttgctgcagcagtgtttaccacaccagccaagtcaccttgaacttggaaaatgacttcatgccctccagccactgaaggattatttttcctctcagcccttagtggtttctttacctaaatgtcacggtacaactgagaataaggcagctgggtcagttcaatagaagtaaacctaaagtccaacaatccaggttagatattagccacggagggatgggaggaggagtcttctttttttttgagacggaatctcgctctgtccctcaggctgaagtgcagtggtgcggtctcggctcactgcaagctccgccacctgggttcacgccattctcctgcctcagcctcccgagtagctgggactacaggtgcctgctaccacgcccggctaatttttttgtatttttaatagagacggggtttcactgtgttagccagctggtctcgatcttctgacctcgtgatccgcccgcctcggcctccctaagtgctgggatgacaggcgtgagccaccatgccgagctgaggaggagtcctcttctagctgcacgatgtggaaatgacacatcatgtccatggggcagcttgctgagagccaagggtgtgagcacatgacttaaattcaagctactgcacagctttgagatctgagtatcacatggaagcatccaggtggcccctggcacacaggctggtggttcttttgtggagagggagaggaagaggggctgctcatggggtagtgcaggtgctagaatatcctgttaacctgttcacactgcactgcaattcgggcttcggtaagctcatctaaagagtttccaggccaggcacggtggctcacgcctgtaattccagcactttgagaggccaaggaaggatcacgtgaccccaggagttcggagaccacagtgagctgtgatcgcaccactgcactctagcctgggtgacagagtgaggccctgtctccacaatatataaataaaaacattttgggtttctgttttggagacaataaattaaatctataacctag

SEQ ID NO: 102727 - protein, 970 aa, Artificial Sequence [sequence omitted]

SEQ ID NO: 102728 - DNA, 2913 bp, Artificial Sequence
  derived and/or modified sequence
atgagaatgagcgacaccgtgaccgtgaaggacgagaccgccaccatgaaggacctggaggccgaggtgaaggacaccaccagagtggagaacctgatcaagagcgagaactacggcaagatcctggtggagaagaacgagcactgcatcgagaacaacatcgacctgcaggagaagatccagatccagctgacccagagcttcgagaaggaggagaagcccagcaaggacgaggccgagaaggagaaggccagcgacaagctgcccagaaagatgctgagcagagacagcagccaggagtacaccgacagcaccggcatcgacctgcacgagttcctggtgaacaccctgaagaacaaccccagagacagaatgatgctgctgaagctggagcaggagatcctggacttcatcggcaacaacgagagccccagaaagaagttcccccccatgaccagctaccacagaatgctgctgcacagagtggccgcctacttcggcctggaccacaacgtggaccagagcggcaagagcgtgatcgtgaacaagaccagcaacaccagaatccccgaccagaagttcaacgagcacatcaaggacgacaagggcgaggacttccagaagagatacatcctgaagagagacaacagcagcttcgacaaggacgacaaccagatgagaatcagactgaaggacgacagaagaagcaagagcatcgaggagagagaggaggagtaccagagagccagagacagaatcttcagccaggacagcctgtgcagccaggagaactacatcatcgacaagagactgcaggacgaggacgccagcagcacccagcagagaagacagatcttcagagtgaacaaggacgccagcggcagaagcaccaacagccaccagagcagcaccgagaacgagctgaagtacagcgagcccagaccctggagcagcaccgacagcgacagcagcctgagaaacctgaagcccgccgtgaccaaggccagcagcttcagcggcatcagcgtgctgaccagaggcgacagcagcggcagcagcaagagcatcggcagactgagcaagaccggccagcccttcatcaaccccgacggcagccccgtggtgtacaacccccccatgacccagcagcccgtgagaagccaggtgcccggccccccccagccccccctgcccgcccccccccagcagcccgccgccaaccacatcttcagccaggacaacctgggcagccagttcagccacatgagcctggccagacagcccagcgccgacggcagcgacccccacgccgccatgttccagagcaccgtggtgctgcagagcccccagcagagcggctacatcatgaccgccgccccccccccccaccccccccccccccccccccccccccccccccccccccccctgccccccggccagcccgtgcccaccgccggctaccccgccagcggccaccccgtgagccagcccgtgctgcagcagcagggctacatccagcagcccagcccccagatgcccgcctgctactgcgcccccggccactaccacagcagccagccccagtacagacccgtgcccagcgtgcactacaacagccacctgaaccagcccctgccccagcccgcccagcagaccggctaccaggtgatccccaaccagcagcagaactaccagggcatcgtgggcgtgcagcagccccagagccagagcctggtgagcggccagcccaacagcatcggcaaccagatccagggcgtggtgatcccctacaccagcgtgcccacctaccaggtgagcctgccccagggcagccagggcatcccccaccagacctaccagcagcccgtgatgttccccaaccagagcaaccagggcagcatgcccaccaccggcatgcccgtgtactacagcgtgatcccccccggccagcagaacaacctgagcagcagcgtgggctacctgcagcaccccggcagcgagcaggtgcagttccccagaaccaccagcccctgcagcagccagcagctgcagggccaccagtgcaccgccggccccccccccccccccggcggcggcatggtgatgatgcagctgagcgtgcccaacaacccccagagctgcgcccacagccccccccagtggaagcagaacaagtactactgcgaccaccagagaggccagaagtgcgtggagttcagcagcgtggacaacatcgtgcagcacagcccccagctgagcagccccatcatcagccccgcccagagccccgcccccgcccagctgagcaccctgaagaccgtgagacccagcggcccccccctgagcatcatgccccagttcagcagacccttcgtgcccggccagggcgacagcagataccccctgctgggccagcccctgcagtacaacccccccgccgtgctgcacggccacatccccaaccagcagggccagcccggcagcagacacggcaacagaggcagaagacaggccaagaaggccgccagcaccgacctgggcgccggcgagaccgtggtgggcaaggtgctggagatcaccgagctgcccgacggcatcaccagaatggaggccgagaagctgttcggcgagctgttcaagatcggcgccaagatcagatggctgagagacccccagagccagcccagaagacaccccctgtgctgcggcagcggcgacaacaccgccaaccccgagagaagcaagcccagcgacctggccagcacctacaccgtgctggccaccttccccagcatcagcgccgcccagaacgccctgaagaagcagatcaacagcgtgaacaagttcaagctgagaaccagcaagaagcactacgacttccacatcctggagagagccagcagccagtag

SEQ ID NO: 102729 - DNA, 2913 bp, Artificial Sequence
  derived and/or modified sequence
atgaggatgtctgacacggtgaccgtcaaggatgaaaccgctacaatgaaggacctggaggccgaggtgaaggacaccactcgggttgagaacctcatcaaatctgagaactatggcaaaatcctcgtggagaagaatgagcactgcattgaaaataacatcgacctgcaggaaaaaatacagatccagctaacgcagtccttcgagaaagaggaaaagccttccaaggacgaggccgagaaggagaaggctagcgacaagctccctcgcaagatgctttccagagattcatcccaggaatacacggatagcacaggcattgaccttcatgaatttctggtcaacacattaaagaataaccctagagacagaatgatgctattaaaactggagcaggagatactcgacttcattggaaataatgaatcacccagaaagaagttccctcccatgacatcgtaccataggatgctgttgcaccgggtcgctgcctacttcggactcgatcataacgtagatcagtcagggaagtctgtgatcgtgaataagacatcaaacacccgtattcccgaccagaaatttaacgagcacattaaggatgacaaaggagaagactttcagaaaaggtatattcttaaacgggataatagctcgtttgataaagacgataatcagatgagaataagactgaaagacgaccgcaggtccaaatccatcgaagagagggaagaagaatatcagcgggcccgggatcgtattttttcccaggattcactttgtagtcaggagaactatatcattgataaaagattgcaggatgaagatgcttctagcacccagcagcggcgtcaaatctttcgagtgaataaagatgcgagtggcagatccacaaattcccatcagtcctccaccgagaatgagctgaagtactctgaacccaggccttggtcaagcaccgactccgattcgtcactccggaacctgaaacccgctgtgaccaaggccagtagtttctcaggcataagcgtgttgaccaggggtgattcaagcggaagctccaaatctattgggcgactgtcaaaaaccgggcagccttttatcaaccccgatggaagccctgtcgtttacaacccgccaatgacccagcagccggtaagatcccaggttcccgggcccccgcagccaccgttaccagcccctccacagcagccagctgccaatcacatctttagccaagacaatctggggtctcagttcagccacatgtccctcgctaggcagccatctgctgacggcagtgacccacacgccgcgatgttccaatcgacagttgtactgcaaagcccacagcaaagcggttacatcatgaccgccgctccccctcctcacccgccccctccgcctcccccaccgcccccccccccccccctacccccaggtcaaccagtccccactgctggctaccccgcatccggacatcccgtctcccagcctgtcctacaacagcagggctatattcagcagccatcaccacagatgcccgcttgctactgtgccccaggacattaccactcctctcagccccagtaccgaccagtgcctagtgtgcactacaacagccacttgaaccagcctctcccacagccagcacagcagaccggataccaggtgatccctaatcaacaacaaaactatcagggtattgtgggcgtgcagcagccacaatcccagtctttggtgtctggccaacctaactctattggaaaccagattcaaggagtggtgatcccctatacgagtgtgccaacctaccaggtcagcctcccccaagggtcccagggtattccgcaccagacataccagcagcctgtgatgttccctaatcagtccaaccaggggtcgatgccaacgactgggatgccagtgtattacagcgtaatccccccgggtcaacaaaacaatctctcttcatccgtgggctacctgcagcaccctggctccgagcaagtgcaattcccacgaaccacaagcccctgttcctcgcagcagctacaaggacaccagtgtacggccggtccaccaccccctccaggaggggggatggtgatgatgcaacttagcgtccccaacaacccgcagtcttgcgcccattctcctcctcagtggaaacagaataagtattattgtgatcaccagcggggccagaagtgcgtagaattttcaagcgtagataatattgtacagcatagtccccagctgagtagcccaatcatatctcccgcccaaagtccagcaccagcacagcttagtaccttgaagaccgtccggccgagcggcccgcctctaagcattatgcctcaattcagtagacctttcgtgccggggcagggtgattcaagatatcccctgctcgggcaaccgcttcagtataatcctccagcggtcttacatggacacattccaaatcagcaaggccagcctggctctcggcatggtaacagaggtcgacgacaggcaaagaaagcggccagcacggatctgggtgccggagaaaccgtggtaggtaaagtcctggaaatcaccgagttacctgacggcatcacccgcatggaggctgaaaagctgtttggtgaactgttcaaaatcggggccaagattcggtggcttcgcgaccctcagtcccagccacgacggcaccccctgtgttgtggatcaggggataacaccgccaaccctgagagaagcaaaccaagcgacttggctagcacctatacagtgttggccactttcccctcaatcagtgcagctcagaacgctttgaaaaaacaaatcaacagcgttaacaagttcaagttgcgcacctcgaagaagcactacgacttccacattctggagagggcctcttcacagtag

SEQ ID NO: 102730 - DNA, 2913 bp, Artificial Sequence
  derived and/or modified sequence
atgaggatgtctgacacagtgacagtgaaggatgaaacagccaccatgaaggacctggaggccgaggtgaaggacaccaccagggtggagaacctgatcaagtctgagaactacggcaagatcctggtggagaagaatgagcactgcatcgagaacaacatcgacctgcaggagaagatccagatccagctgacccagagctttgagaaggaggagaagcccagcaaggatgaagctgagaaggagaaggccagtgacaagctgcccaggaagatgctgagccgggacagcagccaggagtacacagacagcactggaattgacctgcacgagttcctggtgaacaccctgaagaacaacccccgggacaggatgatgctgctgaagctggagcaggagatcctggacttcatcggcaacaatgaaagccccaggaagaagtttcctcccatgaccagctaccacaggatgctgctgcaccgggtggccgcctacttcggcctggaccacaacgtggaccagagcggcaagagcgtcatcgtgaacaagaccagcaacacccgcatcccagaccagaagttcaatgagcacatcaaggatgacaagggggaggacttccagaagcgctacatcctgaagagggacaacagcagctttgacaaggatgacaaccagatgaggatccggctgaaggatgaccggcgcagcaagagcattgaggagcgggaggaggagtaccagagggcccgggaccgcatcttcagccaggacagcctgtgcagccaggagaactacatcatcgacaagaggctgcaggatgaagatgccagcagcacccagcagaggcggcagatcttccgggtgaacaaggatgccagcggccgcagcaccaacagccaccagagcagcacagaaaatgagctgaagtacagcgagccccggccctggagcagcacagacagcgacagcagcctgaggaacctgaagccagctgtgaccaaggccagcagcttcagcggcatctctgtgctgaccaggggggacagcagcggcagcagcaagagcatcggccgcctgagcaagacaggccagcccttcatcaacccagatggcagccctgtggtgtacaacccccccatgacccagcagcctgtgcgcagccaggtgcccggccccccccagccccccctgcctgccccaccccagcagcctgctgccaaccacatcttcagccaggacaacctgggcagccagttcagccacatgagcctggcccggcagcccagcgcagatggcagtgacccccatgctgccatgttccagagcacagtggtgctgcagagcccccagcagagcggctacatcatgacagctgcccccccaccccaccccccacctcctcctcctcctcctcctcctcctccacccctgcccccaggccagcctgtgcccacagctggctacccagccagcggccaccctgtgtcccagcctgtgctgcagcagcagggctacatccagcagcccagcccccagatgcctgcctgctactgtgcccctggccactaccacagcagccagccccagtacagacctgtgcccagcgtgcactacaacagccacctgaaccagcccctgccccagcctgcccagcagacaggctaccaggtgatccccaaccagcagcagaactaccagggcatcgtgggcgtgcagcagccccagagccagagcctggtgtctggccagcccaacagcatcggcaaccagatccagggcgtggtgatcccctacacctctgtgcccacctaccaggtgtccctgccccagggcagccagggcatcccccaccagacctaccagcagcctgtgatgttccccaaccagagcaaccagggctccatgcccaccaccggcatgcctgtgtactacagcgtcatccccccaggccagcagaacaacctgagcagctctgtgggctacctgcagcaccctggcagcgagcaggtgcagttccccaggaccaccagcccctgcagcagccagcagctgcagggccaccagtgcacagctggccccccacctcctcctgggggcggcatggtgatgatgcagctgtctgtgcccaacaacccccagagctgtgcccacagccccccccagtggaagcagaacaagtactactgtgaccaccagaggggccagaagtgtgtggagttcagctctgtggacaacatcgtgcagcacagcccccagctgagcagccccatcatcagccctgcccagagccctgccccagcccagctgagcaccctgaagacagtgcggcccagcggcccccccctgagcatcatgccccagttcagccggccctttgtgcccggccagggcgacagccgctaccccctgctgggccagcccctgcagtacaaccccccagctgtgctgcacggccacatccccaaccagcagggccagcccggcagcagacatggcaacagaggccggcggcaggccaagaaggccgccagcacagacctgggcgctggggagaccgtggtgggcaaggtgctggagatcacagagctgcctgatggcatcaccaggatggaggccgagaagctgtttggagagctgttcaagatcggggccaagatccgctggctgcgggacccccagagccagcccaggaggcaccccctgtgctgcggcagcggggacaacacagccaaccctgagaggagcaagcccagcgacctggccagcacctacacagtgctggccaccttccccagcatctctgctgcccagaatgccctgaagaagcagatcaacagcgtgaacaagttcaagctgcggaccagcaagaagcactatgacttccacatcctggagcgggccagcagccagtag

SEQ ID NO: 102731 - DNA, 2913 bp, Artificial Sequence
  derived and/or modified sequence
atgcggatgagcgacaccgtgaccgtgaaggacgagaccgccaccatgaaagaccttgaagccgaggtgaaagacacgacacgggtggagaaccttatcaagagtgaaaactacggaaagattctggtggagaagaacgaacattgcattgaaaataacattgacctgcaagagaaaatccagatccagctgacccagagcttcgagaaagaagagaaaccctcaaaagatgaagccgaaaaggaaaaggcttccgacaagcttccgaggaagatgctcagccgcgatagcagccaggaatatacggatagcacagggattgaccttcacgagtttctggtgaatacactgaaaaacaacccaagggatcgcatgatgttattaaaactggagcaggagattctggatttcatcgggaacaatgaatccccccggaaaaaatttcccccgatgacgtcctaccacaggatgttgctccatagggtggcagcatactttgggctcgaccataacgtagaccagagcgggaagtccgttattgtgaataagactagcaacactagaattccggaccagaaattcaacgaacatattaaagacgacaaaggtgaggactttcagaagcgctacatcttgaagcgggataattcatcatttgacaaagatgacaaccagatgaggatcaggctaaaggatgatcggcgctcgaagagtatcgaggaacgggaggaagaataccagagggctcgcgataggatctttagccaggactccctctgtagccaggaaaactacataattgacaagcgcttacaggacgaggacgcaagctcaacacagcagcgtcgccagatatttcgggtgaataaggatgcgagcggccggtctaccaactcccaccagagctcgacggagaatgaactgaaatacagcgaacctaggccttggagctcaactgacagcgattccagtcttcgaaacctcaaacccgcagtgactaaagccagttctttttctggtatttcagtcctgacgcgtggagattctagtggatcctcgaagagtatcggccgcttgagcaaaaccgggcagccctttattaacccagatggcagtcctgtggtgtacaatccccccatgacccagcagccagtgaggtcgcaggtgcccggtcccccacaacctcctctccccgcaccaccccagcagcccgcggcgaaccatatattctcacaggataatctgggaagccagttctctcacatgtcgttggcgcgccaaccatccgcagatggaagtgatcctcatgccgctatgtttcaatcaaccgttgtgctacagagtcctcagcagtccggatatattatgaccgccgccccacctccacacccccctcctccccctccacccccccctccgcctcccccactgccccctgggcagcccgtcccaaccgccgggtatccagcgtcgggccatccagtatctcagccagtcttacagcagcaagggtatatccagcagcctagcccccaaatgccggcttgttattgcgcaccaggccattaccactcttcgcaaccacaataccgtcccgttcctagcgtccattacaatagccatctaaatcagcccctgcctcagcctgcacagcagaccggatatcaggtcattcctaatcagcagcaaaactaccagggaatcgtcggagtgcagcagccacagtcccaatcattggtcagcggtcagccaaactccatcggaaaccagatccagggggtcgtgatcccttatacttcagtcccgacttatcaggtttctcttccccagggaagtcagggaattccccaccagacataccaacagcctgttatgttccccaatcagagcaaccagggtagtatgcccactactggaatgcctgtgtattatagtgtgatccctcccggccagcagaataatctgagtagtagcgttggatatcttcagcacccggggtccgaacaggttcagtttccacgtacgacctctccatgctcctcacagcagctgcagggccaccagtgcactgccggccctccgccgccacctggcggcggcatggttatgatgcagctttctgtccccaacaaccctcaatcttgcgctcacagcccaccacaatggaaacagaacaaatattattgcgatcaccaacggggacagaagtgcgtggagtttagctcagttgataacatagtacagcattcgcctcagctttctagtccaatcatcagtcctgcccagagcccggcccctgctcagctatcaacactgaagaccgtgagacctagtggtcctcccttgagtatcatgcctcagtttagccgacccttcgtgcctgggcagggagattctcgatacccgttgctgggccagccccttcaatacaacccacccgcggtgctccacggacatatacccaaccaacagggacagccaggctcacggcatggcaacagaggccgtagacaggcgaagaaggcagcatcaaccgacctcggcgccggcgaaaccgtggtcggaaaggtcttggaaatcaccgagcttccagacgggataaccaggatggaagccgaaaaactgttcggggagctctttaagatcggggctaaaattaggtggctcagggatccacagagccagcctcgacggcacccattatgctgtggcagcggggacaacaccgcgaatcctgagcggtccaaaccatcagacctggccagtacgtacacggtgttggcaactttcccctccatttccgctgctcagaatgccctcaagaaacagattaactccgtcaacaagttcaagctacggacatcaaagaaacattacgactttcatatcctggagcgggcatcaagccagtag

SEQ ID NO: 102732 - DNA, 2913 bp, Artificial Sequence
  derived and/or modified sequence
atgcgcatgtcggataccgtgactgtcaaggatgaaaccgcaacgatgaaggatctcgaagctgaggtcaaagatacaacaagggtcgaaaacctcattaaatctgaaaattacggcaagattctcgttgagaaaaatgagcactgtatcgagaacaacatcgatctccaggagaaaattcagattcagctgactcagtctttcgagaaggaggagaagcctagcaaggacgaagcggagaaagagaaagcaagtgataaactaccaagaaagatgctgagtagagatagctcacaggagtacacagactcgacaggcatcgacttgcacgagttcctggtgaatactctcaaaaacaaccctagagaccgcatgatgctcttgaagctggagcaagaaatcttggattttatagggaataacgagagcccgcgaaaaaaattcccaccaatgacttcctaccatagaatgctgctgcaccgagtggcagcttattttgggctggatcacaacgtggaccaaagcggcaagagcgtgattgttaacaagacctctaatactagaattcccgatcagaaatttaatgaacacattaaagatgacaaaggggaagatttccagaaacgctatattctaaaaagggacaacagctcttttgacaaggacgataaccaaatgagaattcggttgaaggatgacagacgctccaaaagtatagaggagagagaggaagagtaccagagagccagggatcgaatcttctcacaggattccctgtgctctcaggagaactacatcatcgataagcggctgcaggatgaagacgcctcttcaacacagcagagacgccagatctttcgagtcaataaggatgccagcgggcgttctactaatagtcatcaatctagcaccgaaaacgaactgaaatactctgaaccgcgaccttggtcatcaactgatagtgacagttcattaaggaacctgaaacctgcagtgacaaaggctagctcattttccgggatttccgtattgactcggggagattcttctggatctagtaaaagtatcggaaggctgagtaagacagggcagccattcatcaaccccgatgggagtcctgtggtatataatccaccaatgacacaacagccagtgcggagtcaggtccccggaccaccgcaaccgccattacctgccccacctcagcagccagccgctaaccacatcttctcccaggacaacctgggttcccagttcagccacatgagtctagcccgacagccaagtgccgacggcagcgatcctcacgctgctatgttccagagcactgtggtcctgcagagccctcaacagtctgggtacattatgaccgcagccccaccaccacacccaccgcctcccccacctccgcctccgcctccccctccccttccaccaggccagccagttccaacagctggatacccagcttcagggcatcctgtgagccagccggtgctccaacagcagggctatattcagcagccaagtccccagatgccagcatgttactgcgcccctggccattatcactcctctcaacctcagtaccgaccagtcccttctgttcattacaattcacatctgaatcagccattaccacagcccgcacagcagacaggctaccaagttatcccaaaccagcaacagaattatcagggtattgtaggggtccagcagccgcagagtcagtccctcgtgtcgggacagcccaacagtatcgggaaccagatacagggggtggtaatcccatatacctccgtacctacctatcaggtgagcctgccgcagggctcacagggaattccgcatcagacataccagcaacccgtgatgtttcctaatcagtcgaatcagggatcgatgcctactaccggcatgccagtctactattccgtgatccctccaggtcagcaaaataacctgtctagcagcgtcgggtacctccagcatcccggatcagagcaagttcagtttccgcgtactacctccccatgttcatctcagcagttgcagggacaccagtgtaccgccggtcccccaccccctcccggtggtggcatggtgatgatgcagctgagcgttcccaataatcctcagtcatgtgctcactctcctccacagtggaaacagaataaatattactgcgatcatcagagaggtcaaaagtgcgtcgagttctcctcagtagacaatatcgtgcagcacagtccccagctcagcagcccaatcattagccccgcacaatcgccagcccctgcccagttgagcacactgaaaactgttcggccttcggggcctcctttgtcaattatgccccaatttagccgacccttcgtgcctgggcagggtgatagccgctaccctctgttgggccagcccctccagtacaacccccctgcggtgctccacggtcacatcccaaaccagcagggccagccgggatcacgccacggcaaccgcggtcgccgtcaggccaaaaaggccgcttcaaccgacctgggtgccggagagacagtcgtgggcaaagtcctggagattaccgagctgcctgatggtatcacacgcatggaagcggaaaagctctttggcgaactcttcaaaattggggctaagattagatggctgagggatccacagtctcaaccacgacggcatccactctgttgcggttccggcgacaacacggctaatccagagcgctccaaaccttcagacctcgcctcaacttatacggtcctggcgacatttccttctataagcgccgcacagaatgccctcaagaagcagattaacagcgtcaacaaattcaagttgaggaccagcaaaaagcactatgacttccacatcttggagcgggctagctcccagtag

SEQ ID NO: 102733 - DNA, 4257 bp, Artificial Sequence
  derived and/or modified sequence
cggtgtccgggctggtgatggggttaattccctttcgtaagactcttacttgcacccacccagccccgccgtcgccccgccgcgccgcgctccaaccgcctcctcctcctcagtaacgcgggccacggaaaggtatgatatatttgatccaagacagtccattccagtccgggaatctacagtggtgacaaggacatgggactcctcctgccagattacagatggttcactacagttgacatcctggctgacaactgtgaaaaagaaccttggattattttattttatttttgtgggacaccacaatcccaaatccaaaggacgcatcaggcttcaagctccctgtagaattcgaaaataaccttttctaatgaggatgtctgatactgttactgtaaaagatgaaactgcaacaatgaaggatttggaggcagaagtgaaagatacaaccagagttgaaaatcttatcaaatcagaaaactatgggaagattttggtagagaagaatgaacattgtattgagaacaatatagatttgcaggagaaaattcagatccagttaacacaatcatttgagaaagaagagaagccctcaaaagatgaagcagaaaaagaaaaggccagtgataagttgcccagaaaaatgttatcaagagattccagtcaagaatacactgattcaactggcatagatctacatgaatttttagtaaatacattaaaaaacaatcccagggacagaatgatgctgctgaaattggaacaagaaattttagatttcattggtaataatgagtctccacgtaaaaaattccccccaatgacatcttaccataggatgctattacacagagtagccgcttactttggattagaccacaatgttgatcagagtgggaagtctgtcatagtaaacaaaactagcaatacaagaatacctgatcagaaatttaatgaacatattaaggatgataaaggtgaagactttcagaaacgttatatcctcaagagagataactctagctttgacaaagatgataaccagatgagaatacgtttgaaagatgacagaagaagcaaatctatagaagaaagagaagaagagtaccagagagccagagaccgaatattttcccaagattccctgtgttcccaagagaattacattattgacaaaagactccaagacgaggatgccagtagtacccagcagaggcgccagatatttagagttaataaagatgcttcagggagatctacaaatagccatcaaagcagcactgagaatgagttgaagtactcggaaccacgaccctggagcagcacagattcagacagctctcttcgaaacctgaaacctgctgtaaccaaagccagcagcttcagtggaatctcagtcctgacaagaggtgatagttctggaagcagcaaaagcataggcaggctttcaaaaacaggtcagcccttcataaacccagatgggagtccagttgtgtataatcctcctatgactcaacaaccagttagatcccaagtgcctggacctccacagccacctctgccagccccacctcaacaaccagcagctaatcacattttctcacaggataacctagggtctcagtttagccacatgagtcttgctcgccagccatctgctgatggttctgaccctcatgccgccatgttccagtccactgtggttcttcagtctccacagcagtctggttatatcatgacagcagcccctccaccacatcctcctccaccgccaccaccaccacctcctcctcctcccctaccacctgggcagccagtccctactgctggatatcctgcctctggtcatcctgtcagccagcctgtgctccagcagcagggatatattcagcagccatcaccacagatgccagcctgttattgcgctccaggccactatcactccagccaacctcagtatcgcccagtcccttctgttcattacaattcacatctaaaccaaccactgccacaacctgcgcagcagacaggttatcaagttatacccaaccagcagcaaaactaccaaggaatagttggagttcagcaaccccagagtcagagcctagtcagtggccaacccaacagcattggaaatcagattcaaggagtggtcatcccctatacttcagtgccaacatatcaggtttcactgcctcaaggttctcaaggaattccccatcagacttatcaacagcctgttatgttccctaatcagtctaatcaaggatctatgcccacaacaggaatgcctgtttactatagtgtcattccacctggtcaacaaaacaatttaagctcttcagtaggttacctgcaacatccaggatcagaacaagtacaatttcctcgaaccacttcaccatgcagttcccagcagcttcaaggccaccaatgtacagctggaccaccaccgccacctggtggggggatggtgatgatgcagctcagtgtaccaaacaatccacaatcttgtgcccactcacccccgcagtggaaacaaaacaaatattactgtgatcaccagagaggacagaagtgtgtagaatttagcagtgtagacaatattgtccagcacagccctcaactcagtagccccattatttcaccagctcagtcgccagcaccagctcagctgtccaccctgaaaactgtacgtccctctggaccaccactttccatcatgccccaattttctagaccttttgtccccgggcaaggagattccaggtatccattacttggccagccactgcagtacaatcctcctgctgttctgcacggacacattccaaaccaacagggtcagcctggcagcaggcatggaaaccgaggaaggagacaagctaaaaaagctgcatccacagaccttggagcaggagaaacagttgttgggaaggtcttggaaattactgaactaccagatggaataactcgcatggaagctgaaaagctttttggggaactctttaaaattggcgccaagatccggtggctccgggacccccagtcccaaccacgtcgtcaccccctctgctgtggcagtggggacaacactgccaaccctgaacgctctaaacccagtgacttggcctccacctacaccgtcttagccacattcccctccatttcagctgcacagaatgcactgaagaaacaaattaactcagttaacaagtttaagctgagaacaagcaagaagcactatgactttcacattttggaaagggcaagttctcagtaacagccacctttggacccttcgcctttatggttcccctgccctctcccatctttgattggcttggtatttggagcttctgttaacattatagagactcctaggatgtgtgttcatggcattatagcttttgaagaaaggccagtgatccagcaaagggggaaaaatatgcatttcaccccacatgactaggaatccacatcagaatgatacagagttagcaggtttttctaaggaaatgccattcaaatgcctcctaacttttatagttattttgttttatatttctaaattcttgtatcagatccaaagctctattgtacagcaaattattcttcaaaatgattataaccagttgcaccctgtatttctttttgcagccagcacaatgtgacccaacttaaaatttgggggaaaaagaatgcaggagtgaaataaccaagtcaaaaccatgtactatctccttgggggttagggatgctaagaagagcccacaaatagaggattactcttcccctgaatctctaaactcagaaacaattaccaaaaaatacataactcttccttgtagggccctttccttattcatttaggtagtgtgaacattaagtataaaataaattatgttcttaatgcctcttaaaccacttacattcaaaggggaacagaaatcattctaagcaggaaaatacttccactttttttttttcaagtatctctctaataactaaatgccacttatttgcattctccttgtggattttttgtcacctaaggaaatgcatttgatgagtgctggaaacttcttaagtgctttacagtttgttttcattgtttgcagcggatcactggacatcaaagattcattgcacttatgaacaaggaaccttcttttcaatttctgtgtaatttgcaaggctgtacaatgtgtgctgatgcaagcctttttcagttcaagagaataaatgtttacaaat

SEQ ID NO: 102734 - protein, 635 aa, Artificial Sequence
  derived and/or modified sequence
MESKPSRIPRRISVQPSSSLSARMMSGSRGSSLNDTYHSRDSSFRLDSEYQSTSASASASPFQSAWYSESEITQGARSRSQNQQRDHDSKRPKLSCTNCTTSAGRNVGNGLNTLSDVQDRVPSYSQGARPKENSMSTLQLNTSSTNHQLPSEHQTILSSRDSRNSLRSNFSSRESESSRSNTQPGFSYSSSRDEAPIISNSERVVSSQRPFQESSDNEGRRTTRRLLSRIASSMSSTFFSRRSSQDSLNTRSLNSENSYVSPRILTASQSRSNVPSASEVPDNRASEASQGFRFLRRRWGLSSLSHNHSSESDSENFNQESEGRNTGPWLSSSLRNRCTPLFSRRRREGRDESSRIPTSDTSSRSHIFRRESNEVVHLEAQNDPLGAAANRPQASAASSSATTGGSTSDSAQGGRNTGISGILPGSLFRFAVPPALGSNLTDNVMITVDIIPSGWNSADGKSDKTKSAPSRDPERLQKIKESLLLEDSEEEEGDLCRICQMAAASSSNLLIEPCKCTGSLQYVHQDCMKKWLQAKINSGSSLEAVTTCELCKEKLELNLEDFDIHELHRAHANEQAEYEFISSGLYLVVLLHLCEQSFSDMMGNTNEPSTRVRLQRMIPKKTETITGHLILPNFI

SEQ ID NO: 102735 - DNA, 306 bp, Artificial Sequence
  derived and/or modified sequence
atggagagcaagccatcccgaatcccgcgcaggatttctgtgcagccttcttcttctcttagtgcacgtatgatgagcggatctagaggtagctccctgaatgacacctaccactcgagggacagcagtttccgcctagactctgaatatcagagtactagtgcctcagcctccgcatctcccttccaatccgcctggtacagtgagagcgagatcacccagggcgcccggtctcgtagccagaatcagcagagggatcatgatagcaagcgccccaagctgtcttgcaccaattgtaccacatag

SEQ ID NO: 102736 - DNA, 1908 bp, Artificial Sequence
  derived and/or modified sequence
atggagtccaagccttctcggatccctagacgtatcagtgtacagccaagttcatcactttctgctcggatgatgagcggatccagaggatctagcctcaacgacacctaccactcgcgcgattcaagcttccggctggacagcgagtatcagagcacctctgcgagcgcgagcgcgtccccattccaatcggcttggtattccgagagcgagatcacccagggcgcacgatctagaagtcagaaccaacaacgagaccatgatagcaagcgacccaagctaagctgcaccaactgtacgacatcagctggcagaaacgtgggcaacggattaaataccctgagcgacgtccaagatagagttcccagttactcccaaggcgcaagaccgaaggagaattcgatgagcaccctccaactgaacacgagctcaactaatcaccagttgccatctgagcaccagaccattctgtccagccgtgactccaggaactccctcaggtctaactttagcagtcgcgaatccgagagttcacggagcaacactcagcctgggtttagttacagcagtagcagagatgaggcccccatcattagtaatagcgaacgggttgtgagtagtcagaggcccttccaagagagttcggacaacgaaggcaggcgaactacccgcagactgctcagcaggatagcgtcttccatgagttccacgttcttctcacgccgaagctcacaggacagtttgaacactagatctctcaatagcgaaaactcctacgtgagcccacgaatattgactgcctcccagtcccgttccaacgtgccctccgcctccgaagtacctgataaccgtgcgtcggaagcctcgcagggttttaggtttctccggcgccgatgggggctctcctcgctgagccataatcattcctctgagagtgactctgagaactttaaccaggaatccgaaggtaggaatacagggccctggttaagttcgtcactccggaataggtgtaccccactcttcagtcgcagacggcgcgagggccgtgatgaaagctcacgaataccaacctcagatacaagcagccgctcccacattttccgccgagaatcaaacgaggttgtgcatctcgaagcccagaatgaccctctgggcgcagccgccaacagaccccaggctagcgctgcatcaagcagcgccaccaccggcggcagcacttctgactctgcgcagggtggcagaaacacgggcatcagtggaatcctgcccgggtccttattccgcttcgctgtgccacccgcacttgggagtaacttgaccgacaacgtcatgatcactgtggatattattcccagtggttggaactctgcagatgggaagagcgataaaacaaagtctgctcccagccgggaccccgagagactccagaagataaaagaaagccttttactggaggactctgaagaagaggaaggagatctgtgccggatttgccaaatggcagctgcctcaagctcaaacctccttattgaaccatgcaaatgcaccggcagtctgcaatacgtgcaccaggactgtatgaagaagtggctgcaggcgaagattaattccggctcttctttggaggccgtaacaacatgtgaattgtgtaaagagaagcttgagctcaatctggaagacttcgacatacacgagcttcaccgcgcccacgccaatgaacaggctgagtacgagttcattagcagcggactttacctcgtggtcctactgcacctctgcgagcagtccttctccgacatgatgggcaacacaaacgagccttcgacccgcgtgcgcttgcagcgtatgatcccaaagaagacagagacaataaccggacacctcatcttgcctaactttatatag

SEQ ID NO: 102737 - DNA, 306 bp, Artificial Sequence
  derived and/or modified sequence
atggagagcaagcccagccgcatcccccggcgcatctctgtgcagcccagcagcagcctgagcgccaggatgatgagcggcagccggggcagcagcctgaatgacacctaccacagccgggacagcagcttccggctggacagcgagtaccagagcaccagcgccagcgccagcgccagccccttccagagcgcctggtacagcgagagcgagatcacccagggcgcccggagccgcagccagaaccagcagagggaccatgacagcaagaggcccaagctgagctgcaccaactgcaccacctag

SEQ ID NO: 102738 - DNA, 1908 bp, Artificial Sequence
  derived and/or modified sequence
atggagagcaagcccagccgcatcccccggcgcatctctgtgcagcccagcagcagcctgagcgccaggatgatgagcggcagccggggcagcagcctgaatgacacctaccacagccgggacagcagcttccggctggacagcgagtaccagagcaccagcgccagcgccagcgccagccccttccagagcgcctggtacagcgagagcgagatcacccagggcgcccggagccgcagccagaaccagcagagggaccatgacagcaagaggcccaagctgagctgcaccaactgcaccaccagcgctggaagaaatgtgggcaatggcctgaacaccctgagtgatgtgcaggacagagtgcccagctacagccagggcgcccggcccaaggagaacagcatgagcaccctgcagctgaacaccagcagcaccaaccaccagctgcccagcgagcaccagaccatcctgagcagccgggacagcaggaacagcctgcggagcaacttcagcagccgggagagcgagagcagccgcagcaacacccagcccggcttctcctacagcagcagcagagatgaggcccccatcatcagcaacagcgagcgggtggtgagcagccagaggcccttccaggagagcagtgacaatgaaggccgccgcaccacccggcggctgctgagccgcatcgccagctccatgagcagcaccttcttcagcagaagaagcagccaggacagcctgaacaccaggagcctgaacagcgagaacagctatgtgagcccccgcatcctgacagccagccagagccgcagcaatgtgcccagcgccagcgaggtgcctgacaacagagccagcgaggccagccagggcttccgcttcctgcggcggcgctggggcctgagcagcctgagccacaaccacagcagcgagagtgacagcgagaacttcaaccaggagagcgagggcaggaacacaggcccctggctgagcagcagcctgaggaaccgctgcacccccctcttcagcagaagaagaagagagggcagagatgagagcagccgcatccccaccagtgacaccagcagccgcagccacatcttcagaagagagagcaatgaggtggtgcacctggaggcccagaatgaccccctgggcgccgccgccaaccggccccaggccagcgctgccagcagcagcgccaccactggaggcagcaccagtgacagcgcccagggcggcaggaacacaggcatcagcggcatcctgcccggcagcctcttccgctttgctgtgcccccagccctgggcagcaacctgacagacaacgtgatgatcaccgtggacatcatccccagcggctggaacagcgcagatggcaagagtgacaagaccaagagcgcccccagccgggaccctgagcggctgcagaagatcaaggagagcctgctgctggaggacagcgaggaggaggagggggacctgtgccgcatctgccagatggctgctgccagcagcagcaacctgctgattgagccctgcaagtgcaccggcagcctgcagtatgtgcaccaggactgcatgaagaagtggctgcaggccaagatcaacagcggcagcagcctggaggccgtgaccacctgtgagctgtgcaaggagaagctggagctgaacctggaggactttgacatccacgagctgcaccgggcccacgccaatgagcaggccgagtatgagttcatcagcagcggcctgtacctggtggtgctgctgcacctgtgtgagcagagcttcagtgacatgatgggcaacaccaatgagcccagcaccagggtgcggctgcagaggatgatccccaagaagacagagaccatcaccggccacctgatcctgcccaacttcatctag

SEQ ID NO: 102739 - DNA, 559 bp, Artificial Sequence
  derived and/or modified sequence
gttctgcgccggatccgggagaggggcgggcgccattgtgcttcgctgccgactgcatttcctcagtcacgggcctagaactccaaggagaaaggcggcggtgcgtgttgctgcgagtgggacgcgcactggtcggtgccggctcaggagccgggctttctgccctggcatgaacttacatggtcagagctggtttttcctgccctcaaatatatttctctgactctaccggttagactagaaaaatctttaagaatggagtctaaaccttcaaggattccaagaagaatttctgttcaaccttccagctccttaagtgctaggatgatgtctggaagcagaggaagtagtttaaatgatacctatcactcaagagactcttcatttagattggattctgaatatcagtctacatcagcatcagcatctgcgtcaccatttcaatctgcatggtatagtgaatctgagataactcagggagcacgctcaagatcgcagaaccagcaacgggatcatgattcaaaaagacctaaactttcctgtacaaactgtactacct

SEQ ID NO: 102740 - DNA, 2370 bp, Artificial Sequence
  derived and/or modified sequence
acttaacggtggtggctggttctgcgccggatccgggagaggggcgggcgccattgtgcttcgctgccgactgcatttcctcagtcacgggcctagaactccaaggagaaaggcggcgaaaaatctttaagaatggagtctaaaccttcaaggattccaagaagaatttctgttcaaccttccagctccttaagtgctaggatgatgtctggaagcagaggaagtagtttaaatgatacctatcactcaagagactcttcatttagattggattctgaatatcagtctacatcagcatcagcatctgcgtcaccatttcaatctgcatggtatagtgaatctgagataactcagggagcacgctcaagatcgcagaaccagcaacgggatcatgattcaaaaagacctaaactttcctgtacaaactgtactacctcagctgggagaaatgttggaaatggtttaaacacattatcagatgttcaagacagagttccttcatattcacaaggagcaagaccaaaagaaaactcaatgagcactttacagttgaatacatcatccacaaaccaccaattgccttctgaacatcagaccatactaagttctagggactccagaaattctttaagatcaaatttttcttcaagagaatcagaatcttcccgaagcaatacgcagcctggattttcttacagttcaagtagagatgaagccccaatcataagcaattcagaaagggttgtttcatctcaaagaccatttcaagaatcttctgacaatgaaggtaggcggacaacgaggagattgctgtcacgcatagcttctagcatgtcatctacttttttttcacgaagatctagtcaggattccttgaatacaagatcattgaattctgaaaattcttacgtttctccaagaatcttgacagcttcacagtcccgtagtaatgtaccatcagcttctgaagttcccgataatagggcatctgaagcttctcagggatttcgatttcttaggcgaagatggggtttgtcatctcttagccacaatcatagctctgagtcagattcagaaaattttaaccaagaatctgaaggtagaaatacaggaccatggttatcttcctcacttagaaatagatgcacacctttgttctctagaaggaggcgagagggaagagatgaatcttcaaggatacctacctctgatacatcatctagatctcatatttttagaagagaatcaaatgaagtggttcaccttgaagcacagaatgatcctcttggagctgctgccaacagaccacaagcatctgcagcatcaagcagtgccacaacaggtggctctacatcagattcggctcaaggtggaagaaatacaggaatatcagggattcttcctggttccttattccggtttgcagtccctccagcacttgggagtaatttgaccgacaatgtcatgatcacagtagatattattccttcaggttggaattcagctgatggtaaaagtgataaaactaaaagtgcgccttcaagagatccagaaagattgcagaaaataaaagagagcctccttttagaggactcagaagaagaagaaggtgacttatgtagaatttgtcaaatggcagctgcatcatcatctaatttgctgatagagccatgcaagtgcacaggaagtttgcagtatgtccaccaagactgtatgaaaaagtggttacaggccaaaattaactctggttcttcattagaagctgtaaccacctgtgaactatgtaaagagaagttggagcttaacctggaggattttgatattcatgaactacatagagctcatgcaaatgaacaagctgagtatgagtttatcagctctggtctctacctagtggtgttattgcacttgtgcgaacaaagcttttctgatatgatgggaaatacaaatgaaccaagcacacgtgtccgacttcagaggatgattccgaagaagacggagaccataacaggacatttgatattgcctaacttcatataagacagatggatgatctgtgaacataagtgtttattaaaaatggcaattaaatataaattacttttgtgggggaatgcctaataaatacattgactatatataaaatgaatatatacatacacatgtatgcctgtatatatatattcattctccagtgttgctgaattaaaattctgctggactttttaacatagcaaatccgatgtttataaactggtaatcaaaaaggttttttcttttaggtgagtgggaaagtattacccttgttttaaatatctaagcaatgcctatcaacccttttttgtgttatgattactgtagtcatattta

SEQ ID NO: 102741 - DNA, 306 bp, Artificial Sequence
  derived and/or modified sequence
atggagagcaagcccagccggatcccccggcggatcagcgtgcagccttcatcaagcctcagcgcccgtatgatgtccggatcccgaggttcatctttaaatgacacttatcactctcgagacagctctttcaggctggacagcgagtaccagtctacatccgcctctgccagcgcctcacctttccagtctgcctggtattctgaatccgagatcacccagggcgcacgaagccgatcacagaaccagcagagagatcacgatagcaagaggcccaagttgtcctgtaccaattgcaccacgtag

SEQ ID NO: 102742 - DNA, 1908 bp, Artificial Sequence
  derived and/or modified sequence
atggagagcaagcccagccggatcccccggcggatcagcgtgcagcccagttccagtctgtctgcccgtatgatgtccggatcacgaggttctagtctcaatgacacctaccacagcagagactcttcatttaggttggattccgaatatcagtctaccagcgcctccgcatcggcctcacctttccaaagtgcatggtactccgaatcagaaatcacccaaggcgcccgctctcgctcccagaaccagcagcgcgatcatgactccaaacggccgaagctgtcttgcaccaactgtaccacatcagctgggcggaatgtggggaacgggcttaatactctttccgatgtgcaggaccgtgtgccatcttactcacagggggcccggcctaaggaaaattctatgtccaccctgcagcttaatacttcctccactaaccatcaactgcccagcgagcaccagaccattctgtcctcgagagacagtcgcaattctctcagaagcaatttcagcagccgggagagcgagagctcacgtagcaatacacagcccggcttttcttactcgtccagcagagatgaagcacctattatcagcaattctgaacgcgtggtcagttcccagcggccctttcaagaatcatccgacaacgagggccgccgcacgaccaggcgactgctgtccaggatcgcaagctccatgtcaagcacattcttcagcaggcgcagctctcaggatagcttgaacactcggtctctgaatagcgaaaattcttacgtgtctccaaggattctgacggcctctcagtcaaggtccaacgtgccatccgcatcagaggtccccgataacagagccagtgaagcctcccagggctttagatttttgcgtcgcagatggggcctcagcagcctcagtcacaaccattcctcagaaagcgacagcgagaatttcaatcaggaatctgagggaagaaacacgggtccgtggttgagctcttctttacgaaatcgttgcactccactattcagccgaaggcgaagggagggacgggacgagtcttcaagaatcccgacgtccgatacaagctcaagatcacatattttcagacgcgagagcaacgaagtcgtgcacctcgaagcgcagaatgatccactgggcgccgccgcgaacagaccacaggcatcagctgcatcaagcagcgccaccacaggcggcagtacctccgactcagcccagggggggcgaaatactggtatttccggaatcctcccagggtctctgtttcgtttcgctgtgcctcctgcactgggcagtaatctgacagataatgttatgatcacagtcgacatcatcccttcaggttggaacagtgctgacgggaaaagcgacaaaacgaaatctgctcctagccgggaccccgagcgcctccagaaaatcaaggagtcactgctcctcgaagactccgaggaggaggaaggtgacctttgccggatatgccagatggcagccgcttcgagcagtaatcttctgatagagccgtgcaagtgtactggcagtctgcagtatgtgcaccaggattgtatgaaaaagtggttgcaggctaaaattaactccgggagctcactcgaggctgttaccacatgcgagctctgcaaggaaaaactggaattaaatctggaggattttgacatccacgaattacatcgtgcccatgccaacgagcaggcagagtatgaattcatcagtagcgggctgtacttggtggtgctgctgcacctgtgtgagcagagctttagcgatatgatgggtaacactaatgaaccctccacacgcgtgcgactgcagagaatgatccccaaaaaaaccgaaacgatcaccgggcaccttattttgccaaactttatatag

SEQ ID NO: 102743 - DNA, 306 bp, Artificial Sequence
  derived and/or modified sequence
atggagagcaagccttcaaggattccccgtcggatctcagtgcagccaagtagcagcctgtctgcaagaatgatgtccggctcccggggaagttcattaaatgatacctatcactcacgcgatagttcatttcggctggacagtgaatatcagtctacatctgcctcggcttccgcaagtcccttccaaagtgcctggtattctgagtcagaaattacacaaggggcacggagtcggtcccaaaatcagcagcgcgaccacgactcgaagcggccaaaactctcatgcaccaactgcactacgtag

SEQ ID NO: 102744 - DNA, 1908 bp, Artificial Sequence
  derived and/or modified sequence
atggagagtaagccttctagaataccacgcaggatcagcgtccagccgtcctcaagccttagcgcccgaatgatgagcggctcccgcggttcatccctgaacgatacctaccattctagggatagctcatttcggctagactcagagtatcaatccacaagcgcttccgcatctgccagtccatttcagtctgcctggtactcggaatcagagattacacagggcgctaggtcacggtcccaaaaccaacagcgagatcatgatagtaagagaccaaagctctcttgcacgaattgtactacctctgcaggcaggaatgtggggaatggcctcaatacgctgtctgatgtacaggaccgcgtgccgagctacagtcagggagctcgcccaaaggaaaacagcatgagtactttgcagttgaataccagctccacaaatcatcagctcccttccgagcatcaaaccatactctcaagccgggacagccggaactcactccgcagtaatttttcctcccgtgaaagcgagtccagtagaagcaacactcaacccggatttagttacagtagcagccgagacgaggcccctatcatttctaactctgaacgagtagtgtcctcccagcgcccatttcaagagtccagcgacaacgaagggaggcggactaccagaagactcctgtctcgaatagcttccagtatgtctagcaccttctttagtcgaagatctagccaggatagcttgaataccagatcacttaatagtgagaattcttacgtttctcccaggatcctgactgccagccagagcaggtctaatgttccaagcgcgagcgaggtgcccgacaatcgcgcttccgaagctagccaggggttcagatttctgagacgccgatggggcctatcctcactttcacacaaccactctagtgagtccgattcagagaattttaaccaggaatccgaaggcagaaacactggaccctggctgtcctctagtctacgcaatagatgtacaccactctttagccgccgaagacgcgagggtagggacgagtcctcgagaatccccacctctgacacctcaagtcgatctcacatttttcgcagagaatcgaacgaagtcgtgcatctggaagctcagaatgatcctctgggggctgcggctaacagaccccaggcatccgcagcctcctcgtcggctaccacagggggaagcacatccgacagtgcacagggcggacgaaacaccgggatttcaggcatcctgcctggtagcctgtttagattcgccgttcctccagcactaggaagtaacctaaccgacaatgtgatgataaccgtagacattattccttctggctggaacagtgccgatggcaagagcgacaaaactaagagtgccccatcccgcgaccccgaacgattacagaaaataaaagagtcgctgttgcttgaggactctgaagaagaagagggcgacttgtgcagaatctgccagatggccgcagccagttccagcaaccttcttattgagccttgcaagtgcacagggagcctccagtatgttcatcaggattgtatgaaaaagtggctgcaggcaaagataaacagtgggagctctctagaggctgtcaccacatgcgaactgtgtaaggaaaaactcgaattaaacctcgaagactttgacatccatgaattgcacagggcccatgcaaacgaacaagccgagtacgagttcatctcctctggcctgtacctcgtcgtactgctccacctatgcgagcagtcctttagcgatatgatgggtaataccaatgagccctcgaccagggtgagactacagcggatgattcccaagaaaaccgagaccatcacagggcaccttattctgcccaacttcatctag

SEQ ID NO: 102745 - DNA, 306 bp, Artificial Sequence
  derived and/or modified sequence
atggagagcaagcccagcagaatccccagaagaatcagcgtgcagcccagcagcagcctgagcgccagaatgatgagcggcagcagaggcagcagcctgaacgacacctaccacagcagagacagcagcttcagactggacagcgagtaccagagcaccagcgccagcgccagcgccagccccttccagagcgcctggtacagcgagagcgagatcacccagggcgccagaagcagaagccagaaccagcagagagaccacgacagcaagagacccaagctgagctgcaccaactgcaccacctag

SEQ ID NO: 102746 - DNA, 1908 bp, Artificial Sequence
  derived and/or modified sequence
atggagagcaagcccagcagaatccccagaagaatcagcgtgcagcccagcagcagcctgagcgccagaatgatgagcggcagcagaggcagcagcctgaacgacacctaccacagcagagacagcagcttcagactggacagcgagtaccagagcaccagcgccagcgccagcgccagccccttccagagcgcctggtacagcgagagcgagatcacccagggcgccagaagcagaagccagaaccagcagagagaccacgacagcaagagacccaagctgagctgcaccaactgcaccaccagcgccggcagaaacgtgggcaacggcctgaacaccctgagcgacgtgcaggacagagtgcccagctacagccagggcgccagacccaaggagaacagcatgagcaccctgcagctgaacaccagcagcaccaaccaccagctgcccagcgagcaccagaccatcctgagcagcagagacagcagaaacagcctgagaagcaacttcagcagcagagagagcgagagcagcagaagcaacacccagcccggcttcagctacagcagcagcagagacgaggcccccatcatcagcaacagcgagagagtggtgagcagccagagacccttccaggagagcagcgacaacgagggcagaagaaccaccagaagactgctgagcagaatcgccagcagcatgagcagcaccttcttcagcagaagaagcagccaggacagcctgaacaccagaagcctgaacagcgagaacagctacgtgagccccagaatcctgaccgccagccagagcagaagcaacgtgcccagcgccagcgaggtgcccgacaacagagccagcgaggccagccagggcttcagattcctgagaagaagatggggcctgagcagcctgagccacaaccacagcagcgagagcgacagcgagaacttcaaccaggagagcgagggcagaaacaccggcccctggctgagcagcagcctgagaaacagatgcacccccctgttcagcagaagaagaagagagggcagagacgagagcagcagaatccccaccagcgacaccagcagcagaagccacatcttcagaagagagagcaacgaggtggtgcacctggaggcccagaacgaccccctgggcgccgccgccaacagaccccaggccagcgccgccagcagcagcgccaccaccggcggcagcaccagcgacagcgcccagggcggcagaaacaccggcatcagcggcatcctgcccggcagcctgttcagattcgccgtgccccccgccctgggcagcaacctgaccgacaacgtgatgatcaccgtggacatcatccccagcggctggaacagcgccgacggcaagagcgacaagaccaagagcgcccccagcagagaccccgagagactgcagaagatcaaggagagcctgctgctggaggacagcgaggaggaggagggcgacctgtgcagaatctgccagatggccgccgccagcagcagcaacctgctgatcgagccctgcaagtgcaccggcagcctgcagtacgtgcaccaggactgcatgaagaagtggctgcaggccaagatcaacagcggcagcagcctggaggccgtgaccacctgcgagctgtgcaaggagaagctggagctgaacctggaggacttcgacatccacgagctgcacagagcccacgccaacgagcaggccgagtacgagttcatcagcagcggcctgtacctggtggtgctgctgcacctgtgcgagcagagcttcagcgacatgatgggcaacaccaacgagcccagcaccagagtgagactgcagagaatgatccccaagaagaccgagaccatcaccggccacctgatcctgcccaacttcatctag

SEQ ID NO: 102747 - DNA, 1776 bp, Artificial Sequence
  derived and/or modified sequence
atgggtagcgacagctggggtagcaagattgcgccggtcctgcacctggaagaggtggcagaaggcgccgtgacaattctccccaagcgaatgtccgtgcgcggctttgaccgctacttctcgagcaggacactggataataatcgccgcaatatatggttcgccgaattttgggaagataattttcactgcaagctctctcggcatgccctgaagaaaggcagccacgtaaaaaagtgtactaaccgagaaagaatcggccaggactcggcctatgaacaggaaggaaaggtacagtttgtcattgatgccgtttatgcgatgggccacgctcttcacgcaatgcaccgagacttatgcccaggaagagtgggactctgcccaaggatggatcccgtcgacggtacgcagctgctaaaatatattcggaacgtgaatttctcaggtattgccggaaaccccgttacatttaacgagaacggcgatgcgcctggacgctacgatatttaccagtaccaacttcgcaatgatagtgctgaatataaggtcatcggaagttggaccgatcaccttcacctgcgaatagagcgcatgcactggccaggatccggtcaacagctacccaggagcatttgcagtctaccgtgtcagccaggggaaaggaagaagactgtgaaaggtatgccatgttgctggcactgtgaaccttgtacagggtatcaatatcaggttgaccggtacacctgcaaaacctgcccctatgacatgcgacctaccgaaaaccggacagggtgcaggcccatcccaatcatcaagctggaatgggggagcccttgggctgtcttgcccctgttcctggctgtcgttgggatagcggccaccctgttcgtggtaatcacgtttgttcgatacaatgatacaccaattgtgaaggcaagtggtcgggaactctcatacgtgctactggccgggattttcttatgctacgccaccaccttcctaatgattgctgagcctgacttgggcacttgctccctgaggagaattttcctcgggctcggaatgtccatttcatacgccgccttactcaccaaaacgaatcgcatctatcgaatatttgagcagggcaaaaggtccgtttctgctccccgctttatctctccagcaagccagctcgcaatcacctttagtcttatatccctgcagctgctgggcatctgcgtgtggttcgttgtggaccccagtcactccgttgtggattttcaggatcagcgcacattggaccctaggttcgctcggggggtgctgaagtgtgatatctccgatttgagcctgatatgtctgctcggatacagtatgcttctgatggtgacctgcactgtttacgccattaagacaaggggcgtgcccgaaacattcaacgaggccaagcccatcgggttcacaatgtatacgacctgtattgtctggcttgcatttattcctattttctttggaacgagtcagtccgcagataagttgtatatccagactactactctgaccgttagtgtttcgctcagcgctagtgtttcactcggtatgctttacatgccaaaggtttatattattctgttccacccagagcagaatgtacctaaaagaaagcgctccctcaaggcagtggtcaccgccgccaccatgtccaataagttcacccagaaaggcaattttagacccaatggcgaagccaaaagcgagttatgcgagaatcttgaagcacctgggagctcatag

SEQ ID NO: 102748 - DNA, 1776 bp, Artificial Sequence
  derived and/or modified sequence
atgggcagtgacagctggggcagcaagatcgcccctgtgctgcacctggaggaggtggccgagggcgctgtgaccatcctgcccaagaggatgtctgtgcggggctttgaccgctacttcagcagcaggaccctggacaacaacagaagaaacatctggtttgctgagttctgggaggacaacttccactgcaagctgagcagacatgccctgaagaagggcagccacgtgaagaagtgcaccaaccgggagcgcatcggccaggacagcgcctatgagcaggagggcaaggtgcagtttgtgattgatgctgtgtatgccatgggccacgccctgcacgccatgcaccgggacctgtgccccggccgggtgggcctgtgccccaggatggaccctgtggatggcacccagctgctgaagtacatcagaaatgtgaacttcagcggcattgctggcaaccctgtgaccttcaatgaaaatggagatgcccctggccgctatgacatctaccagtaccagctgagaaatgacagcgctgagtacaaggtgattggctcctggacagaccacctgcacctgagaattgaaagaatgcactggccaggcagcggccagcagctgcccaggagcatctgcagcctgccctgccagcccggggagaggaagaagacagtgaagggcatgccctgctgctggcactgtgagccctgcaccggctaccagtaccaggtggaccgctacacctgcaagacctgcccctatgacatgaggcccacagagaacagaacaggctgccggcccatccccatcatcaagctggagtggggcagcccctgggccgtgctgcccctcttcctggccgtggtgggcattgctgccaccctgtttgtggtgatcacctttgtgcgctacaatgacacccccatcgtgaaggccagcggccgggagctgtcctatgtgctgctggccggcatcttcctgtgctacgccaccaccttcctgatgattgctgagccagacctgggcacctgcagcctgcggcgcatcttcctgggcctgggcatgagcatctcctatgctgccctgctgaccaagaccaaccgcatctaccgcatctttgagcagggcaagaggtctgtgtctgccccccgcttcatcagccctgccagccagctggccatcaccttcagcctcatcagcctgcagctgctgggcatctgtgtgtggtttgtggtggaccccagccacagcgtggtggacttccaggaccagaggaccctggaccccaggtttgcccggggcgtgctgaagtgtgacatcagtgacctgagcctcatctgcctgctgggctacagcatgctgctgatggtgacctgcaccgtgtatgccatcaagacccggggcgtgcctgagaccttcaatgaggccaagcccatcggcttcaccatgtacaccacctgcatcgtgtggctggccttcatccccatcttcttcggcaccagccagagcgctgacaagctgtacatccagaccaccaccctgactgtgtctgtgtccctgagcgcctctgtgtccctgggcatgctgtacatgcccaaggtgtacatcatcctcttccaccctgagcagaatgtgcccaagaggaagaggagcctgaaggctgtggtgacagctgccaccatgagcaacaagttcacccagaagggcaacttccggcccaacggggaggccaagtctgagctgtgtgagaacctggaggcccctggcagcagctag

SEQ ID NO: 102749 - DNA, 1776 bp, Artificial Sequence
  derived and/or modified sequence
atgggcagcgacagctggggcagcaagatcgcccccgtgctgcacctggaggaggtcgccgagggcgccgtgaccatcctgcctaaaagaatgagcgtgaggggctttgacaggtatttcagcagccgaactctcgataacaaccgcagaaacatctggttcgcagagttttgggaagataacttccactgtaaactgagtcgccatgcccttaaaaaagggagccacgtcaaaaaatgcaccaacagggaaaggatagggcaggactccgcctatgagcaagaagggaaagtgcagttcgtgatagacgcggtgtacgccatgggacatgctctgcacgccatgcatcgagacttgtgccccggtcgggtcggcctgtgccctcgcatggaccctgtggacggcacgcagctgctcaaatacatccgtaatgttaacttctcaggtattgcaggtaatcccgtcactttcaacgagaatggagacgcgcccgggagatatgacatctaccagtaccagttgaggaacgacagcgctgagtataaggtcatcggcagttggactgatcatctgcatttgcggatcgagagaatgcactggccaggttcgggccagcaactacccagatccatttgtagcttgccatgtcaacccggcgagcgcaagaagaccgttaagggcatgccatgctgctggcactgtgagccatgtactggctatcagtatcaagtcgatagatacacgtgtaagacatgtccttacgatatgcgccccacggaaaacagaactggctgccggcccatcccgatcatcaaactcgaatggggctccccttgggcagttctcccactttttctggctgttgtgggcattgcagctaccctctttgtagtgatcacctttgtaaggtataacgacacacctatagttaaggcgtccggcagagagctgtcatatgtgctacttgccgggatattcctttgttatgccacaacattcctgatgatcgccgaacctgacctgggcacctgttcattgcggcgaatctttctgggcctaggtatgtccatctcttatgcagcattgctcacaaagacaaatcgcatataccggatcttcgaacagggcaaaaggtctgtctctgctcccaggttcatctcacccgcctctcagttggcgattaccttctctctgatatccctgcaactcttgggaatctgtgtctggtttgtcgtggacccttcccactctgtagtcgatttccaggaccagcgaaccctggaccctcgatttgcacgcggagtcctgaagtgcgacatcagcgacctgtctctgatctgtctgcttggatactccatgctcctgatggtgacatgtacggtctacgcaatcaagactaggggagttccagagaccttcaatgaggccaagcctatcggctttactatgtatactacatgcattgtttggctggcatttatccccatattctttggcactagccagagcgccgataaactctatatacaaacaactacgctgacagtgtctgtctcattgagcgcctctgtttccctgggcatgctgtacatgcctaaggtatatataatcctgtttcaccctgagcagaatgtgccaaagaggaagaggagtctgaaggccgtggtaaccgccgccaccatgtccaacaaattcacacaaaagggcaatttccggccgaacggtgaggccaagtctgaattgtgcgagaaccttgaggcccctggcagcagctag

SEQ ID NO: 102750 - DNA, 1776 bp, Artificial Sequence
  derived and/or modified sequence
atgggatctgacagctggggatcgaagattgctcccgtgctgcatctggaggaggtggctgagggagctgtgaccatcctccccaagcgcatgtccgttcggggattcgatcgctatttctctagccggacccttgataataaccggaggaacatctggtttgccgaattctgggaagacaatttccactgtaaactgagtcgacacgccctgaaaaaaggtagtcacgtgaaaaagtgtactaatagggaacgcataggccaggactcagcgtacgaacaggagggtaaagtgcagttcgtcattgatgccgtctatgccatgggacatgctctgcacgctatgcatcgggatctttgccccggtcgtgttggactatgccccagaatggatcctgtagatggtactcagcttctcaagtatattagaaacgtaaacttcagcgggattgcaggtaaccccgtgacctttaatgaaaatggcgatgctcccggtagatatgacatctaccagtaccagctgagaaacgactcagccgagtataaggtgattggcagctggaccgaccatttgcacttgcggattgaacgcatgcattggcccggatctggacagcagcttcctagatcaatttgctcgcttccctgccagcctggggaaaggaagaaaaccgtgaagggcatgccttgctgctggcactgtgagccatgtacggggtaccagtaccaggtcgatcgctatacgtgcaaaacatgcccttatgatatgagacctactgagaaccggacagggtgtcgaccaatccctattataaagttggaatggggctcgccttgggctgtgttaccattgttcctggcagtcgtcggcattgctgcaaccctgttcgtggtgatcacatttgtccgctacaatgacactccaatagtcaaggccagcggccgtgaattgtcgtacgtgctcttggctgggatcttcctgtgttatgcaactacttttctcatgattgcagagccagatctaggcacatgctcactgaggcgcatcttcctcggcctggggatgagtatctcttatgccgcattgttaaccaaaaccaataggatctaccggattttcgaacagggcaagcgtagcgtgtctgcaccccgattcatctcaccagccagccaacttgctatcacgttcagcctaatctccctccagctcttaggcatatgtgtgtggtttgttgtagacccctcccattcagttgttgactttcaggatcagcggacactggaccccaggttcgccagaggagtgcttaaatgtgacatctctgacctgagcttaatttgccttttgggctactccatgcttctgatggtgacgtgcactgtgtatgctatcaaaacccggggagtccctgagacatttaatgaggctaaaccaatcggattcaccatgtatactacgtgcatcgtgtggctggccttcatcccaatattcttcggcactagtcagtcagctgacaaactgtacatccagactactacactgactgtgagtgtcagcctcagtgccagtgtgagtttaggcatgttgtatatgcctaaggtgtacatcatcttgtttcatcctgagcaaaatgtgcccaagaggaagcggagcctgaaggcggtcgtgacagccgctactatgtcaaacaaatttacccagaaaggaaatttccgccctaacggcgaggccaagtcggagctttgcgagaaccttgaagccccaggttcctcctag

SEQ ID NO: 102751 - DNA, 1776 bp, Artificial Sequence
  derived and/or modified sequence
atgggcagcgacagctggggcagcaagatcgcccccgtgctgcacctggaggaggtggccgagggcgccgtgaccatcctgcccaagagaatgagcgtgagaggcttcgacagatacttcagcagcagaaccctggacaacaacagaagaaacatctggttcgccgagttctgggaggacaacttccactgcaagctgagcagacacgccctgaagaagggcagccacgtgaagaagtgcaccaacagagagagaatcggccaggacagcgcctacgagcaggagggcaaggtgcagttcgtgatcgacgccgtgtacgccatgggccacgccctgcacgccatgcacagagacctgtgccccggcagagtgggcctgtgccccagaatggaccccgtggacggcacccagctgctgaagtacatcagaaacgtgaacttcagcggcatcgccggcaaccccgtgaccttcaacgagaacggcgacgcccccggcagatacgacatctaccagtaccagctgagaaacgacagcgccgagtacaaggtgatcggcagctggaccgaccacctgcacctgagaatcgagagaatgcactggcccggcagcggccagcagctgcccagaagcatctgcagcctgccctgccagcccggcgagagaaagaagaccgtgaagggcatgccctgctgctggcactgcgagccctgcaccggctaccagtaccaggtggacagatacacctgcaagacctgcccctacgacatgagacccaccgagaacagaaccggctgcagacccatccccatcatcaagctggagtggggcagcccctgggccgtgctgcccctgttcctggccgtggtgggcatcgccgccaccctgttcgtggtgatcaccttcgtgagatacaacgacacccccatcgtgaaggccagcggcagagagctgagctacgtgctgctggccggcatcttcctgtgctacgccaccaccttcctgatgatcgccgagcccgacctgggcacctgcagcctgagaagaatcttcctgggcctgggcatgagcatcagctacgccgccctgctgaccaagaccaacagaatctacagaatcttcgagcagggcaagagaagcgtgagcgcccccagattcatcagccccgccagccagctggccatcaccttcagcctgatcagcctgcagctgctgggcatctgcgtgtggttcgtggtggaccccagccacagcgtggtggacttccaggaccagagaaccctggaccccagattcgccagaggcgtgctgaagtgcgacatcagcgacctgagcctgatctgcctgctgggctacagcatgctgctgatggtgacctgcaccgtgtacgccatcaagaccagaggcgtgcccgagaccttcaacgaggccaagcccatcggcttcaccatgtacaccacctgcatcgtgtggctggccttcatccccatcttcttcggcaccagccagagcgccgacaagctgtacatccagaccaccaccctgaccgtgagcgtgagcctgagcgccagcgtgagcctgggcatgctgtacatgcccaaggtgtacatcatcctgttccaccccgagcagaacgtgcccaagagaaagagaagcctgaaggccgtggtgaccgccgccaccatgagcaacaagttcacccagaagggcaacttcagacccaacggcgaggccaagagcgagctgtgcgagaacctggaggcccccggcagcagctag

SEQ ID NO: 102752 - protein, 316 aa, Artificial Sequence
  derived and/or modified sequence
MGNTTSCCVSSSPKLRRNAHSRLESYRPDTDLSREDTGCNLQHISDRENIDVREKRKSLFINHHPPGQIARKYSSCSTIFLDDSTVSQPNLKYTIKCVALAIYYHIKNRDPDGRMLLDIFDENLHPLSKSEVPPDYDKHNPEQKQIYRFVRTLFSAAQLTAECAIVTLVYLERLLTYAEIDICPANWKRIVLGAILLASKVWDDQAVWNVDYCQILKDITVEDMNELERQFLELLQFNINVPSSVYAKYYFDLRSLAEANNLSFPLEPLSRERAHKLEAISRLCEDKYKDLRRSARKRSASADNLTLPRWSPAIIS

SEQ ID NO: 102753 - DNA, 951 bp, Artificial Sequence
  derived and/or modified sequence
atgggtaatacaacctcttgttgtgtgtcttctagtccaaagctgcgtcggaacgctcattccagactcgaatcctataggcccgacaccgatctgtctcgggaggatacaggttgcaatttgcagcacatctccgatcgcgagaacattgatgtaagggaaaaacggaagtcattgtttatcaaccatcacccacctggccagatagcaaggaaatattcgagttgtagcaccattttcctggacgatagcacagtctcacaaccaaatttgaaatacaccattaaatgtgttgcgttagcaatttactaccacattaagaatcgcgatccagatggacgtatgctgcttgatatctttgacgaaaatctgcaccccctgtcaaaatctgaagtcccgcccgactacgataagcataaccctgaacagaagcagatttaccggttcgtgcggaccctcttctccgctgcccagctgaccgcagaatgtgcaattgtcaccttagtgtacctagaacggctcctgacctacgccgaaattgacatatgccccgccaattggaaaagaatcgtattgggagccatcctcctggcctccaaggtgtgggatgaccaggcggtatggaacgtggattattgtcagatcctgaaagatataactgtggaggacatgaatgagttggaaagacagttcctcgagctgttgcagttcaatatcaacgtgccgtcttctgtgtacgcaaaatactacttcgacttgcgatcactggccgaggccaacaatctgtcattccccctggaacccttgagcagggaacgggctcataagttggaagcgatttcccggctatgtgaggacaaatataaggaccttagaagaagtgccagaaagaggagcgccagtgctgacaatctgaccttaccccgctggtccccagcaatcatctcgtag

SEQ ID NO: 102754 - DNA, 951 bp, Artificial Sequence
  derived and/or modified sequence
atgggcaacaccaccagctgctgcgtgagcagcagccccaagctgcggagaaatgcccacagccggctggagagctacagaccagacacagacctgagccgggaggacaccggctgcaacctgcagcacatcagtgaccgggagaacattgatgtgcgggagaagaggaagagcctcttcatcaaccaccaccccccaggccagatcgccaggaagtacagcagctgcagcaccatcttcctggatgacagcacagtgtcccagcccaacctgaagtacaccatcaagtgtgtggccctggccatctactaccacatcaagaacagagatcctgatggccgcatgctgctggacatctttgatgagaacctgcaccccctgagcaagtctgaggtgcccccagactatgacaagcacaaccctgagcagaagcagatctacagatttgtgaggaccctcttctctgctgcccagctgacagcagaatgtgccatcgtgaccctggtgtacctggagcggctgctgacctacgccgagattgacatctgcccagccaactggaagagaattgtgctgggcgccatcctgctggccagcaaggtgtgggatgaccaggccgtgtggaatgtggactactgccagatcctgaaggacatcaccgtggaggacatgaatgagctggagcggcagttcctggagctgctgcagttcaacatcaacgtgcccagctctgtgtatgccaagtactactttgacctgcggagcctggccgaggccaacaacctgtccttccccctggagcccctgagccgggagcgggcccacaagctggaggccatcagccggctgtgtgaggacaagtacaaggacctgcggcgcagcgccaggaagaggtctgccagcgctgacaacctgaccctgccccgctggagccctgccatcatctcctag

SEQ ID NO: 102755 - DNA, 951 bp, Artificial Sequence
  derived and/or modified sequence
atgggcaacaccaccagctgctgcgtgagcagcagccccaagctgagacgcaacgcacacagcagactggagtcctatagacccgacacggatctgtctcgggaggatactggatgcaacctccagcacatttctgacagagaaaacattgatgtgcgtgaaaaacggaagtccctgtttataaaccaccatccacctggccagatcgcacggaagtactcctcttgttccacgattttcctcgatgattccactgtgtcacagcctaaccttaaatataccattaagtgcgtggccctcgctatctactatcatattaagaatagggaccctgacgggcgcatgctgctggacatcttcgatgagaacctgcaccccctgtctaagtccgaagttcctccagactatgacaaacacaacccagagcagaaacagatctataggttcgtgcgaacacttttcagcgcagcccaactgactgcagagtgtgcaattgtgacactagtgtacctggaaaggttactcacctatgcagagatcgatatatgcccggcaaactggaaacgtatagtgctgggcgccattctcctcgccagcaaggtgtgggatgatcaggcagtatggaatgtggactattgtcagattttgaaggatataactgttgaggacatgaatgagctagagagacaatttctggagctgctgcagttcaatattaatgttcccagcagcgtgtatgctaagtattatttcgacctgcgctccttggccgaggccaataatctctctttcccactggaaccgctgtcccgtgaacgcgcccataagctggaagccatctctcggctgtgcgaggacaagtataaggatcttaggcgcagtgcacgtaagcggtccgcatcagccgacaacctgacattaccaagatggagccccgcgattatttcctag

SEQ ID NO: 102756 - DNA, 951 bp, Artificial Sequence
  derived and/or modified sequence
atggggaataccacatcttgctgcgtaagctcctcaccaaaattgaggaggaacgcccatagtcgtctggagtcatataggcccgacaccgacctgagcagagaggacactgggtgtaacctccagcatatcagcgaccgcgaaaacatcgacgtacgggaaaaaagaaagagcctgtttatcaaccaccatccacccggacaaatcgcgagaaaatattcatcctgttccactatatttcttgacgattcaactgtttcgcagcctaatctgaagtacaccatcaaatgcgttgctctcgcaatctactaccacatcaaaaatcgcgacccagacggcaggatgcttttggatattttcgatgagaatttgcaccctttgtccaagtctgaggtccccccagactatgataaacacaaccccgagcagaagcaaatctaccgatttgttagaacgctgttcagcgcagctcagttgaccgcagaatgcgctatagtgacattggtgtatctcgagcgcttactaacctatgccgagatagatatttgtcccgcaaactggaaaaggattgttctcggcgctatccttttagcatccaaggtgtgggatgatcaggccgtgtggaacgtcgactattgtcagattcttaaggatattacagttgaagatatgaatgagctcgagcgacaatttttagaattgttgcaatttaacattaacgttccgtcatccgtttatgcaaaatattacttcgatctgagaagtctggccgaggcaaataatttatctttcccccttgaaccattaagccgagaacgggcacataagttagaggccatctcacgcctgtgcgaagacaagtacaaggacctgaggcgctccgctaggaagcgtagtgcctcagcagataacctcacccttcccagatggagccctgccattatctcttag

SEQ ID NO: 102757 - DNA, 3873 bp, Artificial Sequence
  derived and/or modified sequence
aggccccgccgccgccgccgctgctgacccggcggccggccgccgttccgccccctcccgtggcggcgagcgggcgggcctccccacacgcccccgccgcccgcgccccgcgtccacccgcgccccgctcccggggactgggagaacaggatagcagcaggagtcggggggccgccgaagatggggaacactacctcgtgctgcgtgtcgtccagtcccaagctccggaggaatgcccactcccggctggagtcctaccggccagacacggacctgagccgcgaggacacgggctgcaacctgcagcacatcagcgaccgggagaacatagacgtgagagaaaaacgcaagagtctcttcattaaccatcatcctccaggacaaatagcaaggaaatacagttcctgctccaccattttcctagatgatagcacagtcagtcaaccaaacctcaagtatacaattaaatgtgtcgctcttgcaatatattatcacatcaaaaacagggacccagatggaaggatgctcttagatatttttgatgaaaatcttcaccctctttcgaaatccgaagtgccaccagattatgacaaacacaacccagagcagaagcagatttaccggttcgttcggacactgttcagtgctgctcagctgacggctgaatgtgccatcgtcaccctggtgtaccttgaaagacttttaacatacgcagagatagatatctgtccggccaactggaagcggattgttttaggggcgatcctgctggcctccaaggtgtgggatgaccaggctgtatggaatgtggattactgccagatcctgaaagacatcacggtggaggacatgaacgagctagagcgacagtttcttgaattgctgcagttcaacatcaatgttccttccagtgtctatgccaagtattattttgatcttcgttctctggcagaagcgaacaacctgagctttcccttggagcccctgagcagggagagggctcacaagcttgaggccatctctcgcctctgcgaggacaagtacaaggacctaagaagatccgcgaggaagcgctcagccagtgcagacaacctgactctgccccggtggtccccagccatcatctcttaactacggaggcccgccggaggccacaccatcccttagtttctcctttagtttgagaaaagacagacttggggtgggtttgtttttgttttttctttccttttctttttttacgcatagctccgtcaagctgcctggatgagcgcccatgcagcaaggcttggaggaagcgtcagtgccctggagatcccagctcgctctccccactgtcagcaacagcacttccttcgtggaggaagtggactcgaatcctggaggaggaaataaagggaaagggaagtcgtggagaggcagggaaaatggttaagcagcccggccctctggagtccccatgggggcggtagctgaagttggcgagcgcagcggtggatgcagagctggctgcacccagggctgggccagtgtgtcctgtaagacttcttgcattccttctgctgcttttttgggatgggggtatttttgttcatttgtttttgccctgttttgattttggtcccacagagcaggggatgtagtttgtacccaccatggcgcagacttccaaataaatagtactggtcatttctctctgcactatttctgcgcgctgtcttctgagctttcttcctcaccagtgggctgtgcttgttccatttctgtacacccttattttataccgtttttcttcaacaatggcgaaattgactgtagtgctgaaccaaaagtatccctttccctccttattcctcaccccaagaacattctagatcacatgggtgcttgtgccttccgattttcttgcatttgtttttttcctgacctgaagttgttgttacaaaatcagtcagactttgtgggctgaaggacacggtgcagcagagggtgtccctgtgagagttctgcagagtgctgggcatgtgcctggaactaccgagtaggagccatttctttgtacccctgcctaatccattcctctccttccaagtccattgttgcaagcaatattcttctcaatttttatatgtttactttaaatcaaagttagtctatttgtataaaatttttaaaaaatctaaaagaaaaagaaaaaaaacaagggtgggttgggtattccagtgggaagatcattgaagggaaaaatgttactatttactgaggtatttttcacagaatgattgaattaaaaaaaactcaacttgcattttcattgtgggtgcttagagaagttctacaaaattcaaactgtgaaggtttatgcttcattaattatgaccatactttttcattttctgacgatccctgatttccttatggactcaataagaatcttttatatcaagtaaaatgaaagttgatgatagaatatcaaatagtgaatttgatatgaaatctaagagtgtgagtcacttgcatatgtaatgctttgggtttttgcatattttcttaggtcacagtgacaggtttctgagttgtttcccttttcaagtctctgggaggccagtggcagcagcaggtctgtgtttcaccttcttcccatgtgagcttggaaaactttggcatcttaattagtcttgaatcatacacctgatccccaaacattgcctgctctcaatgaaacatgctttggaaatggaagggactcagaaagtcgaaatcccaagaactccaagccaaaagtgttaggttttagtgaaatttgtgtcaggtataagcatacctgtttgggccagaattattatcacagcctttctgacccaaactttcaaaagcaaataaacagcatataaaacgttaattatctttccattgtaattgtgatgatctactctgtatgggtaccaaaatcaccttctctcttcaagtcaaagttgaatttagaactttgaatacaggtcaaaaaatgtagaaaatatcattttatattccctaatctatatagctgaaaaagggttgtattttcttagctgaatatgaatacctcttaaacataaattagttcctctccagtgaagtatcttattttaccaatccatttcaggaaagaggttctgctgccgtaaaggcagaaattttatttttatcccttttatttgaatgagagatttgaaaatcgaattatgtaaatatttcaatgcatctgctattattttgtggagtttattaaactactttaaaaaaattgtatagtctatttattgtatgtatgtacatacagtctgatacctaaaatttaaagtggattccataaaaccagactcaagtcttgtttagactactgaatactgttttagcctgtgccctggattctacctctgtataggaaaattttccatattcattaattagtgttgatctgtattaattggttatgtttcttgcactaaggatgtttaaaactccgctgtaagtgtagattttagttttactggcaggatgaatcacttgacacataggtagatacttgaggttcattttcttttctttttctacatgatgatgaatagttatgttttcttctctgatttgttcaaagtttgccaaaagaaaacacaaaaccagtacagtacttactgataaatcgtagtgactgtaatttgtttgtaaggcgaattaatgctctacaattaaagctggattactattgaggaacacattgtcttagtgtagtttttgaatggaaagtttttgtcattaaggatgaaggaaacgacacaatttgttactttaattttatatttgatttaaacaacaaataaagtcattggg

SEQ ID NO: 102758 - DNA, 951 bp, Artificial Sequence
  derived and/or modified sequence
atgggcaacaccaccagctgctgcgtgagcagcagccccaagctgagaagaaacgcccacagcagactggagagctacagacccgacaccgacctgagcagagaggacaccggctgcaacctgcagcacatcagcgacagagagaacatcgacgtgagagagaagagaaagagcctgttcatcaaccaccacccccccggccagatcgccagaaagtacagcagctgcagcaccatcttcctggacgacagcaccgtgagccagcccaacctgaagtacaccatcaagtgcgtggccctggccatctactaccacatcaagaacagagaccccgacggcagaatgctgctggacatcttcgacgagaacctgcaccccctgagcaagagcgaggtgccccccgactacgacaagcacaaccccgagcagaagcagatctacagattcgtgagaaccctgttcagcgccgcccagctgaccgccgagtgcgccatcgtgaccctggtgtacctggagagactgctgacctacgccgagatcgacatctgccccgccaactggaagagaatcgtgctgggcgccatcctgctggccagcaaggtgtgggacgaccaggccgtgtggaacgtggactactgccagatcctgaaggacatcaccgtggaggacatgaacgagctggagagacagttcctggagctgctgcagttcaacatcaacgtgcccagcagcgtgtacgccaagtactacttcgacctgagaagcctggccgaggccaacaacctgagcttccccctggagcccctgagcagagagagagcccacaagctggaggccatcagcagactgtgcgaggacaagtacaaggacctgagaagaagcgccagaaagagaagcgccagcgccgacaacctgaccctgcccagatggagccccgccatcatcagctag

SEQ ID NO: 102759 - DNA, 627 bp, Artificial Sequence
  derived and/or modified sequence
atggatccggatggaaggatgctgcttgatatctttgacgagaatctacacccactttctaaatccgaagtgccgccggactatgacaaacacaatcccgagcagaaacagatttaccgctttgttcgcacgctgttctctgccgcccagttgaccgccgagtgtgcaattgttaccttggtctatctggagaggctgctcacctatgccgaaattgacatctgcccagccaactggaagcgaatcgtgctgggcgcgatcctgttagccagtaaggtttgggacgaccaggctgtgtggaacgttgattactgtcagattcttaaggatatcactgtcgaagacatgaatgaactcgagaggcagtttcttgagctgttgcaattcaatattaacgtaccctcaagtgtgtatgccaaatattattttgacctgagatcactggcagaagcaaataaccttagctttcccctggagcctctctctcgagagagggctcataagctggaggcaatcagccgactctgcgaggataagtacaaggatctcagacggagtgccaggaaacgcagcgcctccgcagataaccttaccctgcctaggtggagccccgccattattagctag

SEQ ID NO: 102760 - DNA, 627 bp, Artificial Sequence
  derived and/or modified sequence
atggaccctgatggccgcatgctgctggacatctttgatgagaacctgcaccccctgagcaagtctgaggtgcccccagactatgacaagcacaaccctgagcagaagcagatctacagatttgtgaggaccctcttctctgctgcccagctgacagcagaatgtgccatcgtgaccctggtgtacctggagcggctgctgacctacgccgagattgacatctgcccagccaactggaagagaattgtgctgggcgccatcctgctggccagcaaggtgtgggatgaccaggccgtgtggaatgtggactactgccagatcctgaaggacatcaccgtggaggacatgaatgagctggagcggcagttcctggagctgctgcagttcaacatcaacgtgcccagctctgtgtatgccaagtactactttgacctgcggagcctggccgaggccaacaacctgtccttccccctggagcccctgagccgggagcgggcccacaagctggaggccatcagccggctgtgtgaggacaagtacaaggacctgcggcgcagcgccaggaagaggtctgccagcgctgacaacctgaccctgccccgctggagccctgccatcatctcctag

SEQ ID NO: 102761 - DNA, 627 bp, Artificial Sequence
  derived and/or modified sequence
atggaccccgacggccggatgctgctggacatcttcgacgagaacctccacccactcagcaagagtgaagtgccccctgattacgacaaacacaaccccgaacaaaagcagatttatagattcgttaggacattgttcagtgctgcccagctgacagctgagtgcgccatcgtgacccttgtttaccttgaaagattgcttacatatgccgaaattgacatctgcccagcaaactggaaacgcattgtcctcggcgccatcctcctcgcgtccaaagtgtgggatgaccaagccgtatggaacgtcgactactgccagatactcaaagatatcactgtggaggatatgaacgagttagagagacagtttctggagctcctgcagtttaacatcaatgtacctagtagtgtgtacgccaaatattacttcgacctcaggtcgctggcagaagctaataatctcagttttccactggaaccattatccagagaacgagctcataagcttgaggctatctctcgactctgcgaagacaaatataaggacctgcgacggagcgcccgtaagcgaagtgcctcggcagataacctcaccctgcccaggtggtctccagcaattatttcatag

SEQ ID NO: 102762 - DNA, 627 bp, Artificial Sequence
  derived and/or modified sequence
atggaccctgacggtaggatgctgctggacatattcgatgagaatttgcacccgctgtctaagagtgaggtaccccctgattatgacaagcacaacccagagcagaaacagatctaccgctttgtcaggacattatttagcgcggctcagctcaccgccgagtgtgccatcgtcaccttagtttacttagaaagactccttacatacgctgagatcgacatctgcccggcaaactggaagagaatagttctgggagccatcttactggcatcaaaggtctgggacgatcaggcagtctggaatgtggattattgccaaatactaaaggacataacggtcgaggacatgaacgagctggagagacagttcctggaactgctacaattcaatatcaatgttccctcgagcgtttatgccaagtactacttcgacctaaggagtctggcagaagccaataacctgtcgttccccctcgaacctctatctagagaaagagcccacaaacttgaggccatatccaggttatgcgaggacaaatacaaggatctgcggaggagcgctagaaaacggagcgcctccgctgacaatctgactctcccacgctggagtcccgctattattagttag

SEQ ID NO: 102763 - DNA, 1380 bp, Artificial Sequence
  derived and/or modified sequence
caggatagcagcaggagtcggggggccgccgaagatggggaacactacctcgtgctgcgtgtcgtccagtcccaagctccggaggaatgcccactcccggctggagtcctaccggccagacacggacctgagccgcgaggacacgggctgcaacctgcagcacatcagcgaccgggagaacatagacgatttgaacatggaattcaatccttcagatcatcctcgggccagcacaatattcctcagtaaatctcagacggacgtgagagaaaaacgcaagagtctcttcattaaccatggacccagatggaaggatgctcttagatatttttgatgaaaatcttcaccctctttcgaaatccgaagtgccaccagattatgacaaacacaacccagagcagaagcagatttaccggttcgttcggacactgttcagtgctgctcagctgacggctgaatgtgccatcgtcaccctggtgtaccttgaaagacttttaacatacgcagagatagatatctgtccggccaactggaagcggattgttttaggggcgatcctgctggcctccaaggtgtgggatgaccaggctgtatggaatgtggattactgccagatcctgaaagacatcacggtggaggacatgaacgagctagagcgacagtttcttgaattgctgcagttcaacatcaatgttccttccagtgtctatgccaagtattattttgatcttcgttctctggcagaagcgaacaacctgagctttcccttggagcccctgagcagggagagggctcacaagcttgaggccatctctcgcctctgcgaggacaagtacaaggacctaagaagatccgcgaggaagcgctcagccagtgcagacaacctgactctgccccggtggtccccagccatcatctcttaactacggaggcccgccggaggccacaccatcccttagtttctcctttagtttgagaaaagacagacttggggtgggtttgtttttgttttttctttccttttctttttttacgcatagctccgtcaagctgcctggatgagcgcccatgcagcaaggcttggaggaagcgtcagtgccctggagatcccagctcgctctccccactgtcagcaacagcacttccttcgtggaggaagtggactcgaatcctggaggaggaaataaagggaaagggaagtcgtggagaggcagggaaaatggttaagcagcccggccctctggagtccccatgggggcggtagctgaagttggcgagcgcagcggtggatgcagagctggctgcacccagggctgggccagtgtgtcctgtaagacttcttgcattccttctgctgcttttttgggatgggggtatttt

SEQ ID NO: 102764 - DNA, 627 bp, Artificial Sequence
  derived and/or modified sequence
atggaccccgacggcagaatgctgctggacatcttcgacgagaacctgcaccccctgagcaagagcgaggtgccccccgactacgacaagcacaaccccgagcagaagcagatctacagattcgtgagaaccctgttcagcgccgcccagctgaccgccgagtgcgccatcgtgaccctggtgtacctggagagactgctgacctacgccgagatcgacatctgccccgccaactggaagagaatcgtgctgggcgccatcctgctggccagcaaggtgtgggacgaccaggccgtgtggaacgtggactactgccagatcctgaaggacatcaccgtggaggacatgaacgagctggagagacagttcctggagctgctgcagttcaacatcaacgtgcccagcagcgtgtacgccaagtactacttcgacctgagaagcctggccgaggccaacaacctgagcttccccctggagcccctgagcagagagagagcccacaagctggaggccatcagcagactgtgcgaggacaagtacaaggacctgagaagaagcgccagaaagagaagcgccagcgccgacaacctgaccctgcccagatggagccccgccatcatcagctag

SEQ ID NO: 102765 - protein, 1694 aa, Artificial Sequence
  derived and/or modified sequence
MGVPKFYRWISERYPCLSEVVKEHQIPEFDNLYLDMNGIIHQCSHPNDDDVHFRISDDKIFTDIFHYLEVLFRIIKPRKVFFMAVDGVAPRAKMNQQRGRRFRSAKEAEDKIKKAIEKGETLPTEARFDSNCITPGTEFMARLHEHLKYFVNMKISTDKSWQGVTIYFSGHETPGEGEHKIMEFIRSEKAKPDHDPNTRHCLYGLDADLIMLGLTSHEAHFSLLREEVRFGGKKTQRVCAPEETTFHLLHLSLMREYIDYEFSVLKEKITFKYDIERIIDDWILMGFLVGNDFIPHLPHLHINHDALPLLYGTYVTILPELGGYINESGHLNLPRFEKYLVKLSDFDREHFSEVFVDLKWFESKVGNKYLNEAAGVAAEEARNYKEKKKLKGQENSLCWTALDKNEGEMITSKDNLEDETEDDDLFETEFRQYKRTYYMTKMGVDVVSDDFLADQAACYVQAIQWILHYYYHGVQSWSWYYPYHYAPFLSDIHNISTLKIHFELGKPFKPFEQLLAVLPAASKNLLPACYQHLMTNEDSPIIEYYPPDFKTDLNGKQQEWEAVVLIPFIDEKRLLEAMETCNHSLKKEERKRNQHSECLMCWYDRDTEFIYPSPWPEKFPAIERCCTRYKIISLDAWRVDINKNKITRIDQKALYFCGFPTLKHIRHKFFLKKSGVQVFQQSSRGENMMLEILVDAESDELTVENVASSVLGKSVFVNWPHLEEARVVAVSDGETKFYLEEPPGTQKLYSGRTAPPSKVVHLGDKEQSNWAKEVQGISEHYLRRKGIIINETSAVVYAQLLTGRKYQINQNGEVRLEKQWSKQVVPFVYQTIVKDIRAFDSRFSNIKTLDDLFPLRSMVFMLGTPYYGCTGEVQDSGDVITEGRIRVIFSIPCEPNLDALIQNQHKYSIKYNPGYVLASRLGVSGYLVSRFTGSIFIGRGSRRNPHGDHKANVGLNLKFNKKNEEVPGYTKKVGSEWMYSSAAEQLLAEYLERAPELFSYIAKNSQEDVFYEDDIWPGENENGAEKVQEIITWLKGHPVSTLSRSSCDLQILDAAIVEKIEEEVEKCKQRKNNKKVRVTVKPHLLYRPLEQQHGVIPDRDAEFCLFDRVVNVRENFSVPVGLRGTIIGIKGANREADVLFEVLFDEEFPGGLTIRCSPGRGYRLPTSALVNLSHGSRSETGNQKLTAIVKPQPAVHQHSSSSSVSSGHLGALNHSPQSLFVPTQVPTKDDDEFCNIWQSLQGSGKMQYFQPTIQEKGAVLPQEISQVNQHHKSGFNDNSVKYQQRKHDPHRKFKEECKSPKAECWSQKMSNKQPNSGIENFLASLNISKENEVQSSHHGEPPSEEHLSPQSFAMKGTRMLKEILKIDGSNTVDHKNEIKQIANEIPVSSNRRDEYGLPSQPKQNKKLASYMNKPHSANEYHNVQSMDNMCWPAPSQIPPVSTPVTELSRICSLVGMPQPDFSFLRMPQTMTVCQVKLSNGLLVHGPQCHSENEAKEKAALFALQQLGSLGMNFPLPSQVFANYPSAVPPGTIPPAFPPPTANIMPSSSHLFGSMPWGPSVPVPGKPFHHTLYSGTMPMAGGIPGGVHNQFIPLQVTKKRVANKKNFENKEAQSSQATPVQTSQPDSSNIVKVSPRESSSASLKSSPIAQPASSFQVETASQGHSISHHKSTPISSSRRKSRKLAVNFGVSKPSE

SEQ ID NO: 102766 - protein, 1160 aa, Artificial Sequence
  derived and/or modified sequence
  misc_feature (1)..(1): Xaa can be any naturally occurring amino acid
XTNEDSPIIEYYPPDFKTDLNGKQQEWEAVVLIPFIDERLLEAMETCNHSLKKEERKRNQHSECLMCWYDRDTEFIYPSPWPEKFPAIERCCTRYKIISLDAWRVDINKNKITRIDQKALYFCGFPTLKHIRHKFFLKKSGVQVFQQSSRGENMMLEILVDAESDELTVENVASSVLGKSVFVNWPHLEEARVVAVSDGETKFYLEEPPGTQKLYSGRTAPPSKVVHLGDKEQSNWAKEVQGISEHYLRRKGIIINETSAVVYAQLLTGRKYQINQNGEVRLEKQWSKQVVPFVYQTIVKDIRAFDSRFSNIKTLDDLFPLRSMVFMLGTPYYGCTGEVQDSGDVITEGRIRVIFSIPCEPNLDALIQNQHKYSIKYNPGYVLASRLGVSGYLVSRFTGSIFIGRGSRRNPHGDHKANVGLNLKFNKKNEEVPGYTKKVGSEWMYSSAAEQLLAEYLERAPELFSYIAKNSQEDVFYEDDIWPGENENGAEKVQEIITWLKGHPVSTLSRSSCDLQILDAAIVEKIEEEVEKCKQRKNNKKVRVTVKPHLLYRPLEQQHGVIPDRDAEFCLFDRVVNVRENFSVPVGLRGTIIGIKGANREADVLFEVLFDEEFPGGLTIRCSPGRGYRLPTSALVNLSHGSRSETGNQKLTAIVKPQPAVHQHSSSSSVSSGHLGALNHSPQSLFVPTQVPTKDDDEFCNIWQSLQGSGKMQYFQPTIQEKGAVLPQEISQVNQHHKSGFNDNSVKYQQRKHDPHRKFKEECKSPKAECWSQKMSNKQPNSGIENFLASLNISKENEVQSSHHGEPPSEEHLSPQSFAMKGTRMLKEILKIDGSNTVDHKNEIKQIANEIPVSSNRRDEYGLPSQPKQNKKLASYMNKPHSANEYHNVQSMDNMCWPAPSQIPPVSTPVTELSRICSLVGMPQPDFSFLRMPQTMTVCQVKLSNGLLVHGPQCHSENEAKEKAALFALQQLGSLGMNFPLPSQVFANYPSAVPPGTIPPAFPPPTANIMPSSSHLFGSMPWGPSVPVPGKPFHHTLYSGTMPMAGGIPGGVHNQFIPLQVTKKRVANKKNFENKEAQSSQATPVQTSQPDSSNIVKVSPRESSSASLKSSPIAQPASSFQVETASQGHSISHHKSTPISSSRRKSRKLAVNFGVSKPSE

SEQ ID NO: 102767 - DNA, 5085 bp, Artificial Sequence
  derived and/or modified sequence
atgggcgtccctaagttttatcgatggatctccgaaagatatccatgtctcagtgaggtggtgaaggagcatcagattcccgagttcgataacctgtatttagatatgaacgggataatacaccagtgttcccacccaaacgatgatgatgtccactttcggattagtgatgacaaaatcttcacagacatttttcattatctcgaagtgctctttcggattatcaaaccaagaaaagtgttctttatggccgttgatggagtagccccccgagccaagatgaatcagcagcgcggaagacgctttagatccgctaaagaagctgaagataaaataaaaaaggccatcgagaaaggtgagacgctgcccaccgaggccaggtttgacagcaactgtattacgccgggcaccgaattcatggccaggctgcacgaacacctcaagtacttcgtaaacatgaaaatctctacagacaagtcgtggcagggcgtgaccatctatttctcgggacatgagactcccggagaaggtgaacataagattatggaatttataagatccgaaaaagccaagcctgatcatgatcctaacacaaggcactgtctgtacggccttgatgctgacttgatcatgctgggcttgacaagtcatgaagcccacttctctcttcttcgtgaagaggtgagattcggaggcaagaaaacacagcgggtgtgcgcccccgaggaaacgacattccacctgctccacctgagcctcatgagagagtacatcgattacgagttttctgtgcttaaagaaaagattacatttaagtacgatattgaaaggatcatcgacgactggattctgatgggcttccttgtgggcaacgacttcatcccccatcttcctcatttgcatattaaccatgacgccttgccgctgctatacggaacgtacgttacaatcctgcctgaattaggcgggtatatcaacgaaagcggccaccttaatctgccccggttcgagaaatatttggtcaagctgtctgacttcgaccgcgaacacttctcggaagtcttcgttgatctaaaatggttcgagtccaaagtgggcaataagtacctcaacgaggccgcgggggtggccgcagaggaagcaaggaactataaggagaagaagaagctgaaaggccaggaaaactctctttgttggacagcattggacaaaaacgagggggaaatgattacctctaaggacaacttggaggacgagaccgaagacgacgacctgttcgagacggaattccgccagtacaagcgcacctattacatgactaagatgggggtagatgttgtgtcggatgacttcctggcggatcaagcagcctgttatgtccaagccatacagtggatcctccattactattatcatggagtacagtcttggtcctggtattatccataccactacgccccgtttctgtccgatattcacaacattagtacactgaagatccacttcgagctgggcaagccatttaaaccatttgaacagcttctggctgtattacctgcggctagcaagaacctcctgccagcctgctaccagcacctgatgacaaatgaggactctcctattattgagtattacccgccagattttaagacagacttaaatggtaagcaacaggagtgggaggctgtagttctcattccgttcatcgacgagaaacggcttcttgaggcaatggagacctgcaatcattccctgaagaaagaagagcgtaaacgcaatcagcattctgagtgcttgatgtgctggtatgaccgggacactgaatttatctaccccagtccctggcctgagaagttccctgcaattgagcgatgctgcacacgatataagatcatcagcttggacgcatggcgcgtggacatcaacaagaataagattacacggatcgatcagaaagcgctgtacttttgcggctttcccacacttaaacacattagacataaattttttcttaaaaagagcggggtgcaggtattccagcagtcttcacgtggcgaaaacatgatgcttgagattctagttgacgccgagtcagatgagctgaccgttgagaacgtagccagtagcgtcctagggaagagcgtgttcgtgaattggccgcacctggaggaggcccgcgtggtagcagtgtccgacggagaaactaagttctatctggaggagccacctgggacacagaaactctattcaggacggacagcaccgcccagcaaagtagtgcaccttggcgataaagagcagtcgaactgggccaaggaagtccagggtatttctgaacactacctacgtagaaaaggaattatcatcaatgaaaccagtgctgtcgtgtatgcccagttgcttacgggccgcaaatatcagatcaaccagaacggcgaagttcgcttagagaaacagtggagcaagcaggtggtgccattcgtctaccagaccatcgtgaaggatatccgcgccttcgacagccgcttcagcaatattaaaactctggatgacctttttccgttgagatcgatggtgtttatgttaggcacaccttactacggctgtactggcgaggttcaggactctggcgatgtcatcactgaggggagaattcgagtgatatttagcatcccgtgcgaacctaaccttgacgccctcatccaaaatcaacataagtatagcattaaatataacccaggctatgtactagcctcaagattaggggtgtccggctacctggtatcccggttcacaggatctatcttcataggcaggggtagtcggaggaatcctcacggggaccacaaagccaatgtgggcctgaaccttaaattcaataagaaaaacgaagaggtgcccggttacacaaagaaggtgggcagcgaatggatgtactcaagtgccgccgaacaattgctggccgagtaccttgaacgagcccccgagctcttcagttatattgcgaagaattctcaggaagatgtgttttatgaagatgatatttggcctggagagaacgagaatggcgccgagaaggttcaggagatcattacatggcttaaaggacaccccgtctccacactgtcgagatcatcctgtgacctccagatcctggatgctgcgattgtagaaaaaatagaagaagaagtcgagaagtgtaagcagcgcaaaaataacaaaaaagtcagagttaccgttaagccccacttattgtatcgacctctggagcaacagcatggtgtgatcccggatagagacgccgagttctgtcttttcgatcgagtcgtgaacgtgcgggaaaacttctccgtgcccgtaggcctacggggaaccatcataggaatcaaaggagccaaccgcgaggccgacgtcctgtttgaggtgttatttgacgaggagtttccgggaggtctgacgatacgctgctcacccgggaggggttacagactgccaacatcagccctggtgaaccttagccatggcagtcggagtgagactgggaaccagaagctgacagccattgttaaacctcaacctgctgttcaccagcacagtagttcttcatctgttagttctggtcatctgggcgctttgaaccactccccccaaagtctcttcgtgcctacccaggtgcctacaaaggatgatgacgaattctgcaatatttggcagtcattgcagggatcagggaaaatgcagtacttccagccaacaatccaagagaagggtgccgttctcccacaggagatttcgcaggtcaatcaacaccacaaatcaggcttcaacgataattctgtcaaatatcagcagagaaagcacgatccacaccgcaagtttaaggaagagtgcaagagccctaaggccgagtgttggagccaaaagatgagcaacaagcaacctaattctgggatcgaaaatttcctcgcctccttgaatatatcaaaggagaacgaagtgcagtcatcccatcacggagagccccccagtgaggaacatcttagcccgcagagcttcgctatgaagggtactcgcatgctgaaggagattctgaaaattgatggatccaatactgttgatcacaagaatgagattaagcagattgcgaatgagattccagtcagttcgaatagacgggacgaatatggtctgccttctcagcctaagcaaaataagaagctggcgtcttatatgaataagcctcactctgccaacgaatatcataacgtgcagagcatggataatatgtgctggcccgcccccagccaaatccctcccgtatccacacccgtcacagagctcagcagaatatgtagcctcgtggggatgccccagccggatttttcattcctgcgcatgccacagaccatgaccgtgtgccaggttaaactgtcgaatggcctgttggtgcatggaccccagtgtcactccgaaaatgaggccaaagaaaaagccgcgctttttgccctgcaacaattgggatcattaggaatgaattttccacttccctctcaggtgttcgccaactatccttccgctgtgcctcccggcactatccctcctgcgttccctccgcccacagccaatatcatgccatcttcttcacatctctttggctctatgccctggggcccatctgtacctgtgcctgggaagccattccaccacacactgtattcaggtactatgcctatggctggtggcattcctggtggagtgcacaaccagttcatcccattgcaggtcacaaagaaacgggtggcaaataaaaagaacttcgaaaataaagaggcccagagcagtcaagccactcctgtgcagacatcacaaccagacagtagcaacatcgtcaaagtgtcaccccgcgagtcctctagtgcaagcctgaagtcctccccaattgctcagccggctagctcatttcaagttgaaaccgcgtctcagggacattcaatctcccatcacaagtctactccgatttcaagcagtcggcggaagagtaggaagctggcagtgaacttcggcgtgtcaaagcctagtgaatag

SEQ ID NO: 102768 - DNA, 3483 bp, Artificial Sequence
  derived and/or modified sequence
tagacaaatgaggactcccccataattgagtactacccccccgacttcaagacagacctcaacggcaagcagcaggagtgggaagccgtcgtgctgattcctttcatcgacgaaaggttactggaggctatggagacctgtaatcactcactaaagaaagaagagagaaaaaggaaccagcatagtgaatgcttgatgtgttggtacgacagggacaccgagtttatataccctagtccatggccagaaaagtttccagcgatcgagagatgctgcactaggtataagatcatctccctggacgcctggcgggtcgatattaataagaacaaaatcaccagaattgaccagaaagcactctatttctgcggattcccaacactgaaacatatcagacacaaatttttcttgaagaaatctggcgtgcaagttttccagcagtcctcccgcggagagaatatgatgctggaaatcctggtcgacgcagagtcagatgagctcacggtcgaaaatgtggcatctagtgtgctcgggaaaagtgtctttgtgaactggccgcatcttgaggaggcaagagtagtcgccgtcagcgatggggagaccaaattttatctggaggagcctcccgggactcagaaactttattccggtcggactgcacccccttctaaggtggtgcacctgggcgataaagagcaatcaaactgggccaaagaggtgcaaggaatctctgagcattacctgcgccggaaggggatcattatcaatgagacctcagccgtcgtctacgctcagttgctgacgggtcgaaagtaccaaatcaatcagaacggggaagtccgactggagaaacaatggtcaaaacaagtggtccccttcgtatatcagacaattgtgaaggatatccgtgcttttgactcccgcttctctaatattaagaccctggacgacttattcccccttagatccatggtgttcatgctcggcaccccgtattacggctgcaccggagaagtccaggattcaggcgacgtgatcaccgaggggaggatccgtgtgatcttcagcatcccatgcgaacctaacctggatgctctaattcagaatcaacacaaatactcgattaaatacaaccctggatacgtgttagcatcacgcttgggtgtgtcagggtatttagtgtcgagattcactggctccatctttatcggccgtggatccaggaggaatccccatggcgaccataaagcaaacgttggtctgaatcttaagtttaataagaaaaatgaagaagtcccaggttatacaaagaaggttggttctgaatggatgtactcatccgccgctgagcagctgttagcggaatacttggagagagctccggaactgttttcatacatagcaaagaattctcaggaagacgtgttttacgaggatgatatctggcctggagagaacgagaatggggctgaaaaggtgcaagagatcattacctggctaaaggggcatcccgttagcacgctgtctagaagcagctgcgacctccagatactggatgccgcgatcgtggagaaaattgaggaagaagtcgagaagtgtaagcaaaggaaaaacaataagaaggtcagggtgaccgtcaagccccatctgttgtatcgtcccctggagcagcagcacggtgttattcccgaccgggacgctgagttttgccttttcgatagagtcgtgaatgtgcgcgaaaatttttcagttcccgtggggctacgtggaacaattatcggcattaagggggctaaccgagaagccgacgtcctttttgaagtgctattcgacgaagagttccccggaggcctcaccattcggtgttcccccggcaggggttaccggctcccaacctctgctctggttaacctctctcacggatctaggtctgagaccgggaatcaaaagctgaccgcgattgtgaaacctcaaccggctgtacaccagcactcttcaagtagctcggtgtcatctggccatttgggtgccctgaaccatagcccccagagtctgttcgtaccaactcaagtgcctactaaagacgacgacgagttctgtaatatctggcaatccctgcagggctcgggaaagatgcagtatttccagccaaccattcaagaaaaaggagcggttttgcctcaagaaatatcccaggtcaaccaacatcacaagtctggatttaatgataatagcgttaaatatcagcagcggaagcacgacccacataggaaatttaaggaggagtgcaagtccccaaaagctgagtgctggtcccagaagatgtccaacaaacagcctaatagcgggatcgagaactttcttgcctctctcaatatctctaaggaaaatgaagttcaatcgtcacatcatggcgagcccccctccgaagagcacctgagccctcagtcctttgccatgaagggtactagaatgctcaaggagattctgaagattgatgggagcaacacagtcgaccataaaaacgaaataaaacagatagctaatgagattccggtgagcagcaaccggagagatgaatatggtctgccatcccagccaaagcagaataaaaaattggcctcgtacatgaacaaaccccattctgccaacgaatatcataacgtgcaatccatggacaacatgtgttggcctgcgccttcccagatcccccccgtaagtaccccagttacggagcttagcagaatctgctccctcgtgggcatgccccaaccagacttctcgttcctcagaatgccacagaccatgaccgtgtgtcaagtcaagttgagtaacgggttgctcgttcatggtccccagtgccattcagaaaacgaagcaaaggaaaaggcagctctttttgccttgcaacagctcgggtcgcttggtatgaacttccctcttccatcccaagttttcgcaaactatcctagtgccgtcccaccagggacaattccccccgcctttcccccccccaccgccaatatcatgccctcttctagccatctctttgggagcatgccctggggcccctcagtgcccgtgcccggtaagccattccaccacactctgtattcaggcaccatgccaatggccgggggcatccctggaggagttcacaatcaattcatcccactgcaggtaactaaaaagagggtggcaaacaagaaaaactttgagaacaaggaagcgcagtcctcccaagcgaccccagtgcaaactagtcagcctgacagttctaatatcgtgaaagtaagtccgcgggaaagttcctcggcaagcctgaagagctcccctatcgcccagccagcctcatcttttcaggtggagacggcctcccagggtcacagtatatcccaccacaagtctactcccattagtagctcgaggcgcaaaagtagaaaactggcggtcaacttcggtgtttccaaaccatctgaatag

SEQ ID NO: 102769 - DNA, 5383 bp, Artificial Sequence
  derived and/or modified sequence
cgtttggtttcggtttggccctgactgggattagtgttgacgatcgaaatgggagtccccaagttttacagatggatctcagagcggtatccctgtctcagcgaagtggtgaaagagcatcagattcctgaatttgacaacttgtacctggatatgaatggaattatacatcagtgctcccatcctaatgatgatgatgttcactttagaatttcagatgataaaatctttactgatatttttcactacctggaggtgttgtttcgcattattaaacccaggaaagtgttctttatggctgtagatggtgtggctcctcgagcaaaaatgaaccagcagcgtgggaggcgttttaggtcagcaaaggaggcagaagacaaaattaaaaaggcaatagagaagggagaaactcttcctacagaggccagatttgattccaactgtatcacaccaggaactgaatttatggccaggttacatgaacatctgaagtattttgtaaatatgaaaatttccacagacaagtcatggcaaggagttaccatctacttctcaggccatgagactcctggagaaggagagcataaaatcatggaatttatcagatccgagaaagcaaagccagatcatgatccaaacaccagacactgtctttatggtttagatgctgacttgattatgcttggattaacaagtcatgaggcacatttttctctcttaagagaagaagttcgatttggtggcaaaaaaacacaacgggtatgtgctccagaagaaactacatttcaccttctacacttgtctttaatgagagagtatattgactatgagttttcagtattaaaagaaaagatcacatttaaatatgatattgaaaggataatagatgattggattttgatggggtttcttgttggtaatgattttatccctcatctacctcatttacatattaatcatgatgcactgcctcttctttatggaacatatgttaccatcctgccagaacttgggggttatattaatgaaagtgggcacctcaacttacctcgatttgagaaataccttgtgaaactatcagattttgatcgggagcacttcagtgaagtttttgtggacctaaaatggtttgaaagcaaagttggtaacaagtacctcaatgaagcagcaggtgtcgcagcagaagaagccaggaactacaaggaaaagaaaaagttaaagggccaggaaaattctctgtgttggactgctttagacaaaaatgaaggcgaaatgataacttctaaggataatttagaagatgagactgaagatgatgacctatttgaaactgagtttagacaatataaaagaacatattacatgacgaagatgggggttgacgtagtatctgatgactttctggctgatcaagctgcatgttatgttcaggcaatacagtggattttgcactattactatcatggagttcagtcctggagctggtattatccttatcattatgcacctttcctgtctgatatacacaacatcagtacactcaaaatccattttgaactaggaaaaccttttaagccatttgaacagcttcttgctgtacttccagcagccagcaaaaatttacttcctgcatgctaccagcatttgatgaccaatgaagactcaccaattatagaatattacccacctgattttaaaactgacctaaatgggaaacaacaggaatgggaagctgtggtgttaatcccttttattgatgagaagcgattattggaagccatggagacatgtaaccactccctcaaaaaggaagagaggaaaagaaaccaacatagtgagtgcctaatgtgctggtatgatagagacacagagtttatctatccttctccatggccagaaaagttccctgccatagaacgatgttgtacaaggtataaaataatatccttagatgcttggcgtgtagacataaacaaaaacaaaataaccagaattgaccagaaagcattatatttctgtggatttcctactctgaaacacatcagacacaaattttttttgaagaaaagtggtgttcaagtattccagcaaagcagtcgtggagaaaacatgatgttggaaatcttagtggatgcagaatcagatgaacttaccgtagaaaatgtagcttcatcagtgcttggaaaatctgtctttgttaattggcctcaccttgaggaagctagagtcgtggctgtatcagatggagaaactaagttttacttggaagaacctccaggaacacagaagctttattcaggaagaactgccccaccatctaaagtggttcatcttggagataaagaacaatctaactgggcaaaagaagtacaaggaatttcagaacactacctgagaagaaaaggaataataataaatgaaacatctgcagttgtgtatgctcagttactcacaggtcgtaaatatcaaataaatcaaaatggtgaagttcgtctagagaaacagtggtcaaaacaagttgttccttttgtttatcaaactattgtcaaggacatccgagctttcgactcccgtttctccaatatcaaaacattggatgatttgtttcctctgagaagtatggtctttatgctgggaactccctattatggctgcactggagaagttcaggattcaggtgatgtgattacagaaggtaggattcgtgtgattttcagcattccatgtgaacccaatcttgatgctttaatacagaaccagcataaatattctataaagtacaacccaggatatgtgttggccagtcgccttggagtgagtggataccttgtttcaaggtttacaggaagtatttttattggaagaggatctaggagaaaccctcatggagaccataaagcaaatgtgggtttaaatctcaaattcaacaagaaaaatgaggaggtacctggatatactaagaaagttggaagtgaatggatgtattcatctgcagcagaacaacttctggcagagtacttagagagagctccagaactatttagttatatagccaaaaatagccaagaggatgtgttctatgaagatgacatttggcctggagaaaatgagaatggtgctgaaaaagttcaagaaattattacttggctaaaaggacatcctgtcagtactttatctcgttcttcttgtgatttacaaattctggatgcagctattgttgagaaaattgaggaagaagtcgaaaagtgcaagcaaagaaagaataataagaaggtgcgagtaacagtgaaaccccatttgctatacagacctttagaacagcaacatggagtcattcctgatcgggatgcagaattttgtctttttgaccgtgttgtaaatgtgagagaaaacttctcagttccagttggccttcgaggcaccatcataggaataaaaggagctaatagagaagccgatgtactatttgaagtattatttgatgaagaatttcctggagggttaacaataagatgctcacctggtagaggttatcgactgccaacaagtgccttggtgaacctttctcatgggagtcgctctgaaactggaaatcagaagttgacagccatcgtaaaaccacaaccagctgtacatcaacatagctcaagttcatcagtttcctctgggcatttgggagccctcaaccattcccctcaatcactttttgttcctactcaagtacctactaaagatgatgatgaattctgcaacatttggcagtccttacagggatctggaaagatgcaatactttcagccaactatacaagagaagggtgcagttctacctcaagaaataagccaagtaaatcaacatcataaatctggctttaatgacaacagtgttaaatatcagcaaagaaaacatgaccctcacagaaaatttaaagaagagtgtaagagtcctaaagctgagtgttggtcccaaaaaatgtccaataagcagcctaactctggaattgagaactttttagcatctttgaatatctccaaagaaaatgaagtacagtcatctcatcatggggagcctccaagtgaagagcatttgtcaccacagtcatttgccatgaagggaacacggatgcttaaagaaattctaaaaattgatggctctaacactgtggaccataagaatgaaatcaaacagattgctaatgaaatccctgtttcctctaacagaagagatgaatatggattaccctctcagcctaaacaaaataagaaattagcatcttatatgaacaagcctcacagtgctaatgagtaccataatgttcagtctatggacaatatgtgttggcctgcccccagccagatccctcctgtatccacaccagtaactgaactttctcgaatttgttcccttgttggaatgccacaacctgatttctcctttcttaggatgccacagacaatgaccgtttgccaagtaaaattatctaatggcttactggtacatgggccacagtgccactctgaaaatgaagccaaagagaaagctgcactttttgctttacaacagttgggctccttaggcatgaatttccctttgccttcacaagtatttgcaaattatccttcagctgtaccacctggaaccattcctccagcctttcccccacctactgctaatataatgccttcgtcgtctcatctctttggctcaatgccatggggaccatcggtgccagttcctgggaagcccttccatcatactttatattctgggaccatgcccatggctgggggaataccagggggtgtgcacaatcagtttatacctctgcaggttactaaaaaaagggttgcaaacaaaaagaactttgagaataaggaagcccagagttctcaagccactccagttcagactagccagccagattcttccaacattgtcaaagtaagtccacgggagagctcatcagcttctttgaagtcctctccgattgctcaacctgcatcttcttttcaagttgaaactgcctctcaaggccatagtatatctcaccataagtcaacaccaatctcttcttcaagaagaaaatcaagaaaactggctgttaattttggtgtttctaaaccttctgagtaaatttggctcttagaattaagttaatttcttctctttccatctacctttttataaatacatatctatgtctcataaaaattagaatgtactattttaaaataatatgtgtaaattgaaatttttttcatttttaagttatcaggcacttttcatgctgtttaaaagactgtgtatcaaattgtgcactttaagtatgtgcagtttgttgtatgtcaattatacctcaataaatctgtaataaaaaactaaa

SEQ ID NO: 102770 - DNA, 5600 bp, Artificial Sequence
  derived and/or modified sequence
gaccaatgaagactcaccaattatagaatattacccacctgattttaaaactgacctaaatgggaaacaacaggaatgggaagctgtggtgttaatcccttttattgatgagcgattattggaagccatggagacatgtaaccactccctcaaaaaggaagagaggaaaagaaaccaacatagtgagtgcctaatgtgctggtatgatagagacacagagtttatctatccttctccatggccagaaaagttccctgccatagaacgatgttgtacaaggtataaaataatatccttagatgcttggcgtgtagacataaacaaaaacaaaataaccagaattgaccagaaagcattatatttctgtggatttcctactctgaaacacatcagacacaaattttttttgaagaaaagtggtgttcaagtattccagcaaagcagtcgtggagaaaacatgatgttggaaatcttagtggatgcagaatcagatgaacttaccgtagaaaatgtagcttcatcagtgcttggaaaatctgtctttgttaattggcctcaccttgaggaagctagagtcgtggctgtatcagatggagaaactaagttttacttggaagaacctccaggaacacagaagctttattcaggaagaactgccccaccatctaaagtggttcatcttggagataaagaacaatctaactgggcaaaagaagtacaaggaatttcagaacactacctgagaagaaaaggaataataataaatgaaacatctgcagttgtgtatgctcagttactcacaggtcgtaaatatcaaataaatcaaaatggtgaagttcgtctagagaaacagtggtcaaaacaagttgttccttttgtttatcaaactattgtcaaggacatccgagctttcgactcccgtttctccaatatcaaaacattggatgatttgtttcctctgagaagtatggtctttatgctgggaactccctattatggctgcactggagaagttcaggattcaggtgatgtgattacagaaggtaggattcgtgtgattttcagcattccatgtgaacccaatcttgatgctttaatacagaaccagcataaatattctataaagtacaacccaggatatgtgttggccagtcgccttggagtgagtggataccttgtttcaaggtttacaggaagtatttttattggaagaggatctaggagaaaccctcatggagaccataaagcaaatgtgggtttaaatctcaaattcaacaagaaaaatgaggaggtacctggatatactaagaaagttggaagtgaatggatgtattcatctgcagcagaacaacttctggcagagtacttagagagagctccagaactatttagttatatagccaaaaatagccaagaggatgtgttctatgaagatgacatttggcctggagaaaatgagaatggtgctgaaaaagttcaagaaattattacttggctaaaaggacatcctgtcagtactttatctcgttcttcttgtgatttacaaattctggatgcagctattgttgagaaaattgaggaagaagtcgaaaagtgcaagcaaagaaagaataataagaaggtgcgagtaacagtgaaaccccatttgctatacagacctttagaacagcaacatggagtcattcctgatcgggatgcagaattttgtctttttgaccgtgttgtaaatgtgagagaaaacttctcagttccagttggccttcgaggcaccatcataggaataaaaggagctaatagagaagccgatgtactatttgaagtattatttgatgaagaatttcctggagggttaacaataagatgctcacctggtagaggttatcgactgccaacaagtgccttggtgaacctttctcatgggagtcgctctgaaactggaaatcagaagttgacagccatcgtaaaaccacaaccagctgtacatcaacatagctcaagttcatcagtttcctctgggcatttgggagccctcaaccattcccctcaatcactttttgttcctactcaagtacctactaaagatgatgatgaattctgcaacatttggcagtccttacagggatctggaaagatgcaatactttcagccaactatacaagagaagggtgcagttctacctcaagaaataagccaagtaaatcaacatcataaatctggctttaatgacaacagtgttaaatatcagcaaagaaaacatgaccctcacagaaaatttaaagaagagtgtaagagtcctaaagctgagtgttggtcccaaaaaatgtccaataagcagcctaactctggaattgagaactttttagcatctttgaatatctccaaagaaaatgaagtacagtcatctcatcatggggagcctccaagtgaagagcatttgtcaccacagtcatttgccatgaagggaacacggatgcttaaagaaattctaaaaattgatggctctaacactgtggaccataagaatgaaatcaaacagattgctaatgaaatccctgtttcctctaacagaagagatgaatatggattaccctctcagcctaaacaaaataagaaattagcatcttatatgaacaagcctcacagtgctaatgagtaccataatgttcagtctatggacaatatgtgttggcctgcccccagccagatccctcctgtatccacaccagtaactgaactttctcgaatttgttcccttgttggaatgccacaacctgatttctcctttcttaggatgccacagacaatgaccgtttgccaagtaaaattatctaatggcttactggtacatgggccacagtgccactctgaaaatgaagccaaagagaaagctgcactttttgctttacaacagttgggctccttaggcatgaatttccctttgccttcacaagtatttgcaaattatccttcagctgtaccacctggaaccattcctccagcctttcccccacctactgctaatataatgccttcgtcgtctcatctctttggctcaatgccatggggaccatcggtgccagttcctgggaagcccttccatcatactttatattctgggaccatgcccatggctgggggaataccagggggtgtgcacaatcagtttatacctctgcaggttactaaaaaaagggttgcaaacaaaaagaactttgagaataaggaagcccagagttctcaagccactccagttcagactagccagccagattcttccaacattgtcaaagtaagtccacgggagagctcatcagcttctttgaagtcctctccgattgctcaacctgcatcttcttttcaagttgaaactgcctctcaaggccatagtatatctcaccataagtcaacaccaatctcttcttcaagaagaaaatcaagaaaactggctgttaattttggtgtttctaaaccttctgagtaaatttggctcttagaattaagttaatttcttctctttccatctacctttttataaatacatatctatgtctcataaaaattagaatgtactattttaaaataatatgtgtaaattgaaatttttttcatttttaagttatcaggcacttttcatgctgtttaaaagactgtgtatcaaattgtgcactttaagtatgtgcagtttgttgtatgtcaattatacctcaataaatctgtaataaaaaactaaattaaaccttgcattaaaataatatcacagtatcagtggactaaacattaaaatgtaccactctaatcattggcctcatgattgaagcatcctgaactatgaattagacatcagttagcaataataagcattttttacactatcattgaggaataattacatggagcatgaaatttgggcctccagtataacttactgaatgtggattttatttctctttttaatgatgtaagaaaattgtcaggagaatggctcttatttatgtgtgttttaacttatgctttgttgcctctgagggtctttagacctgctgtgaaaggatcacatttgttgtggtgctgccagttttgctttattctaaattttgtaccaaagcaactttagaataatcagaatatttcatctaactgcttagaactataaatagcattctaaatttgagtaaatacaattttttaggttactcaagaaccagcattagtaatttctagtaaaattgtttcaaaatctacagggtacaatgattacaaattaatcttctaacaaaataaaatatgaaatattagtcatgttaattaataaactgtattattttgtatagctttttatttgcttacctgacattttatgagagcttcatagttggtcggtatgtagtgcttcttgggactgaagaaattctaattgttgtttaagttccaaggtgtgctacaatataggaggcacagtcatcagtttgtgacatacattatttactgcctatttcattctgattctatatttttagctttatgctgaactgttcaatgatgctgggattctctctttgcatgtcatatgtgaatgtgtggttcaagctgtaactgttgaaattattttagaatttatgacgatttctcagcagggcctatgtttatatatatatatatatttattctttagtttttgtgatatgcttatatttttaaggaagtaagttatagcatacttttttaaaagtaggaaccacaatctttatatggagcagcttgttatatctgattttcatgtaactcattggaaactctgccatgactcttaaagtagtcttacttgttttttaaaatgctggtattaaactaaatggactcctttcactaactgctgatttcagagtttaaatgttagcaggatatttgtgtattagcagtgccttcagtataagagagaaatattcattatctgtcatttatcatagtcgtataagtttccatgattttattttctgttattttcataagttcagatgtttatcagttcccaacattgtttctttatctgtagtgggatcttgagtaatgaggctcaagtaaatcctcaatgtgtataattattgcctcataaactctctctttgtttttaaaggaaacatctattatggtaatacaaagaaaagttaaattgtgacagtaatgttatattaacctcttcctactttaaagtgtgaaatgtttcacctcagctgtacaaactccagcattgagaatttgcctcactcattactcctgtgtgacagttatataaatagcatgcagctcacatctgttttagagcatagaagaagcggcacctgccatcttctgaaaactccaaagggaaatttcagtagacatagtgcactaaacccataaggatacttgaccaatatttgagcacagcaagctgacagttctatacagataggcagtgaaagagttttattttccagccaggcgcagtggctcaaatcccagcacttcgggaggctaaggcaggcggatcacttgaggtccggagttccagacaagcctggccaacatgatgaagccctgtctctactaaaaatacaaaa

SEQ ID NO: 102771 - DNA, 5085 bp, Artificial Sequence
  derived and/or modified sequence
atgggcgtgcccaagttctaccgctggatcagcgagcgctacccctgcctgtctgaggtggtgaaggagcaccagatccctgagtttgacaacctgtacctggacatgaatggcatcatccaccagtgcagccaccccaatgatgatgatgtgcacttccgcatcagtgatgacaagatcttcacagacatcttccactacctggaggtgctcttccgcatcatcaagcccaggaaggtgttcttcatggctgtggatggagtggccccccgggccaagatgaaccagcagaggggccgccgcttccgcagcgccaaggaggccgaggacaagatcaagaaggccatcgagaagggggagaccctgcccacagaggccaggtttgacagcaactgcatcaccccaggcacagagttcatggcccggctgcacgagcacctgaagtactttgtgaacatgaagatcagcacagacaagtcctggcagggcgtgaccatctacttcagcggccacgagaccccaggagagggggagcacaagatcatggagttcatccgctctgagaaggccaagccagaccatgaccccaacaccaggcactgcctgtatggcctggatgctgacctgatcatgctgggcctgaccagccatgaggcccacttcagcctgctgcgggaggaggtgcgctttggaggcaagaagacccagagggtgtgtgcccctgaggagaccaccttccacctgctgcacctgagcctgatgagggagtacatcgactatgagttctctgtgctgaaggagaagatcaccttcaagtatgacatcgagcgcatcattgatgactggatcctgatgggcttcctggtgggcaatgacttcatcccccacctgccccacctgcacatcaaccatgatgccctgcccctgctgtatggcacctacgtgaccatcctgcctgagctgggcggctacatcaatgaaagtggccacctgaacctgcccaggtttgagaagtacctggtgaagctgagtgactttgaccgggagcacttcagcgaggtgtttgtggacctgaagtggtttgagagcaaggtgggcaacaagtacctgaatgaagctgctggggtggccgctgaggaggccaggaactacaaggagaagaagaagctgaagggccaggagaacagcctgtgctggacagccctggacaagaatgaaggagagatgatcaccagcaaggacaacctggaggatgaaacagaagatgatgacctgtttgaaacagagttccggcagtacaagaggacctactacatgaccaagatgggcgtggatgtggtgtctgatgacttcctggccgaccaggccgcctgctacgtgcaggccatccagtggatcctgcactactactaccacggcgtgcagagctggagctggtactacccctaccactacgcccccttcctgagtgacatccacaacatcagcaccctgaagatccactttgagctgggcaagcccttcaagccctttgagcagctgctggccgtgctgcctgctgccagcaagaacctgctgcctgcctgctaccagcacctgatgaccaatgaagacagccccatcatcgagtactaccccccagacttcaagacagacctgaatggcaagcagcaggagtgggaggccgtggtgctgatccccttcattgatgagaagaggctgctggaggccatggagacctgcaaccacagcctgaagaaggaggagaggaagaggaaccagcacagtgaatgtctgatgtgctggtatgaccgggacacagagttcatctaccccagcccctggccagagaagtttcctgccatcgagcgctgctgcacccgctacaagatcatcagcctggatgcctggagggtggacatcaacaagaacaagatcaccagaattgaccagaaggccctgtacttctgtggcttccccaccctgaagcacatccgccacaagttcttcctgaagaagagcggcgtgcaggtgttccagcagagcagcagaggagagaacatgatgctggagatcctggtggatgctgagagtgatgagctgactgtggagaatgtggccagctctgtgctgggcaagtctgtgtttgtgaactggccccacctggaggaggcccgggtggtggccgtgtctgatggagagaccaagttctacctggaggagcccccaggcacccagaagctgtacagcggccgcacagccccacccagcaaggtggtgcacctgggggacaaggagcagagcaactgggccaaggaggtgcagggcatcagcgagcactacctgcggaggaagggcatcatcatcaatgagaccagcgctgtggtgtatgcccagctgctgaccggcaggaagtaccagatcaaccagaatggagaggtgcggctggagaagcagtggagcaagcaggtggtgccctttgtgtaccagaccatcgtgaaggacatccgggcctttgacagccgcttcagcaacatcaagaccctggatgacctcttccccctgcgctccatggtgttcatgctgggcaccccctactacggctgcaccggggaggtgcaggacagcggagatgtgatcacagagggccgcatccgggtcatcttcagcatcccctgtgagcccaacctggatgccctgatccagaaccagcacaagtacagcatcaagtacaaccctggctacgtgctggccagccggctgggcgtgtctggctacctggtgagccgcttcaccggcagcatcttcatcggccggggcagcagaagaaacccccacggggaccacaaggccaacgtgggcctgaacctgaagttcaacaagaagaatgaggaggtgcccggctacaccaagaaggtgggcagcgagtggatgtacagcagcgctgctgagcagctgctggccgagtacctggagcgggcccctgagctgttctcctacatcgccaagaacagccaggaggatgtgttctatgaagatgacatctggccaggagaaaatgaaaatggagctgagaaggtgcaggagatcatcacctggctgaagggccaccctgtgtccaccctgagccgcagcagctgtgacctgcagatcctggatgctgccatcgtggagaagattgaggaggaggtggagaagtgcaagcagaggaagaacaacaagaaggtgcgggtgacagtgaagccccacctgctgtaccggcccctggagcagcagcacggcgtcatcccagacagagatgctgagttctgcctgtttgacagagtggtgaatgtgcgggagaacttctctgtgcctgtgggcctgcggggcaccatcatcggcatcaagggggccaaccgggaggctgatgtgctgtttgaggtgctgtttgatgaggagttccctgggggcctgaccatccgctgcagccctggccggggctaccgcctgcccaccagcgccctggtgaacctgagccacggcagccgctctgagaccggcaaccagaagctgacagccatcgtgaagccccagcctgctgtgcaccagcacagcagcagcagctctgtgagcagcggccacctgggcgccctgaaccacagcccccagagcctgtttgtgcccacccaggtgcccaccaaggatgatgatgagttctgcaacatctggcagagcctgcagggcagcggcaagatgcagtacttccagcccaccatccaggagaagggagctgtgctgccccaggagatcagccaggtgaaccagcaccacaagagcggcttcaatgacaacagcgtgaagtaccagcagaggaagcatgacccccacaggaagttcaaggaggagtgcaagagccccaaggccgagtgctggagccagaagatgagcaacaagcagcccaacagcggcatcgagaacttcctggccagcctgaacatcagcaaagaaaatgaggtgcagagcagccaccacggggagcccccatctgaggagcacctgagcccccagagctttgccatgaagggcaccaggatgctgaaggagatcctgaagattgatggcagcaacacagtggaccacaagaatgagatcaagcagatcgccaatgagatccctgtgagcagcaacagaagagatgaatatggcctgcccagccagcccaagcagaacaagaagctggccagctacatgaacaagccccacagcgccaatgagtaccacaacgtgcagagcatggacaacatgtgctggccagcccccagccagatcccccctgtgtccacccctgtgacagagctgagccgcatctgcagcctggtgggcatgccccagcctgacttctccttcctgaggatgccccagaccatgacagtgtgccaggtgaagctgagcaatggcctgctggtgcacggcccccagtgccacagtgaaaatgaggccaaggagaaggccgccctgtttgccctgcagcagctgggcagcctgggcatgaacttccccctgcccagccaggtgtttgccaactaccccagcgctgtgcccccaggcaccatccccccagccttccccccacccacagccaacatcatgcccagcagcagccacctgtttggctccatgccctggggccccagcgtgcctgtgcctgggaagcccttccaccacaccctgtacagcggcaccatgcccatggccggcggcatccctggaggagtgcacaaccagttcatccccctgcaggtgaccaagaagagggtggccaacaagaagaactttgagaacaaggaggcccagagcagccaggccacccctgtgcagaccagccagcctgacagcagcaacatcgtgaaggtgagcccccgggagagcagcagcgccagcctgaagagcagccccatcgcccagcctgccagcagcttccaggtggagacagccagccagggccacagcatcagccaccacaagagcacccccatcagcagcagcaggaggaagagcaggaagctggccgtgaactttggagtgtccaagcccagcgagtag

SEQ ID NO: 102772 - DNA, 3483 bp, Artificial Sequence
  derived and/or modified sequence
tgaacaaatgaagacagccccatcatcgagtactaccccccagacttcaagacagacctgaatggcaagcagcaggagtgggaggccgtggtgctgatccccttcattgatgagcggctgctggaggccatggagacctgcaaccacagcctgaagaaggaggagaggaagaggaaccagcacagtgaatgtctgatgtgctggtatgaccgggacacagagttcatctaccccagcccctggccagagaagtttcctgccatcgagcgctgctgcacccgctacaagatcatcagcctggatgcctggagggtggacatcaacaagaacaagatcaccagaattgaccagaaggccctgtacttctgtggcttccccaccctgaagcacatccgccacaagttcttcctgaagaagagcggcgtgcaggtgttccagcagagcagcagaggagagaacatgatgctggagatcctggtggatgctgagagtgatgagctgactgtggagaatgtggccagctctgtgctgggcaagtctgtgtttgtgaactggccccacctggaggaggcccgggtggtggccgtgtctgatggagagaccaagttctacctggaggagcccccaggcacccagaagctgtacagcggccgcacagccccacccagcaaggtggtgcacctgggggacaaggagcagagcaactgggccaaggaggtgcagggcatcagcgagcactacctgcggaggaagggcatcatcatcaatgagaccagcgctgtggtgtatgcccagctgctgaccggcaggaagtaccagatcaaccagaatggagaggtgcggctggagaagcagtggagcaagcaggtggtgccctttgtgtaccagaccatcgtgaaggacatccgggcctttgacagccgcttcagcaacatcaagaccctggatgacctcttccccctgcgctccatggtgttcatgctgggcaccccctactacggctgcaccggggaggtgcaggacagcggagatgtgatcacagagggccgcatccgggtcatcttcagcatcccctgtgagcccaacctggatgccctgatccagaaccagcacaagtacagcatcaagtacaaccctggctacgtgctggccagccggctgggcgtgtctggctacctggtgagccgcttcaccggcagcatcttcatcggccggggcagcagaagaaacccccacggggaccacaaggccaacgtgggcctgaacctgaagttcaacaagaagaatgaggaggtgcccggctacaccaagaaggtgggcagcgagtggatgtacagcagcgctgctgagcagctgctggccgagtacctggagcgggcccctgagctgttctcctacatcgccaagaacagccaggaggatgtgttctatgaagatgacatctggccaggagaaaatgaaaatggagctgagaaggtgcaggagatcatcacctggctgaagggccaccctgtgtccaccctgagccgcagcagctgtgacctgcagatcctggatgctgccatcgtggagaagattgaggaggaggtggagaagtgcaagcagaggaagaacaacaagaaggtgcgggtgacagtgaagccccacctgctgtaccggcccctggagcagcagcacggcgtcatcccagacagagatgctgagttctgcctgtttgacagagtggtgaatgtgcgggagaacttctctgtgcctgtgggcctgcggggcaccatcatcggcatcaagggggccaaccgggaggctgatgtgctgtttgaggtgctgtttgatgaggagttccctgggggcctgaccatccgctgcagccctggccggggctaccgcctgcccaccagcgccctggtgaacctgagccacggcagccgctctgagaccggcaaccagaagctgacagccatcgtgaagccccagcctgctgtgcaccagcacagcagcagcagctctgtgagcagcggccacctgggcgccctgaaccacagcccccagagcctgtttgtgcccacccaggtgcccaccaaggatgatgatgagttctgcaacatctggcagagcctgcagggcagcggcaagatgcagtacttccagcccaccatccaggagaagggagctgtgctgccccaggagatcagccaggtgaaccagcaccacaagagcggcttcaatgacaacagcgtgaagtaccagcagaggaagcatgacccccacaggaagttcaaggaggagtgcaagagccccaaggccgagtgctggagccagaagatgagcaacaagcagcccaacagcggcatcgagaacttcctggccagcctgaacatcagcaaagaaaatgaggtgcagagcagccaccacggggagcccccatctgaggagcacctgagcccccagagctttgccatgaagggcaccaggatgctgaaggagatcctgaagattgatggcagcaacacagtggaccacaagaatgagatcaagcagatcgccaatgagatccctgtgagcagcaacagaagagatgaatatggcctgcccagccagcccaagcagaacaagaagctggccagctacatgaacaagccccacagcgccaatgagtaccacaacgtgcagagcatggacaacatgtgctggccagcccccagccagatcccccctgtgtccacccctgtgacagagctgagccgcatctgcagcctggtgggcatgccccagcctgacttctccttcctgaggatgccccagaccatgacagtgtgccaggtgaagctgagcaatggcctgctggtgcacggcccccagtgccacagtgaaaatgaggccaaggagaaggccgccctgtttgccctgcagcagctgggcagcctgggcatgaacttccccctgcccagccaggtgtttgccaactaccccagcgctgtgcccccaggcaccatccccccagccttccccccacccacagccaacatcatgcccagcagcagccacctgtttggctccatgccctggggccccagcgtgcctgtgcctgggaagcccttccaccacaccctgtacagcggcaccatgcccatggccggcggcatccctggaggagtgcacaaccagttcatccccctgcaggtgaccaagaagagggtggccaacaagaagaactttgagaacaaggaggcccagagcagccaggccacccctgtgcagaccagccagcctgacagcagcaacatcgtgaaggtgagcccccgggagagcagcagcgccagcctgaagagcagccccatcgcccagcctgccagcagcttccaggtggagacagccagccagggccacagcatcagccaccacaagagcacccccatcagcagcagcaggaggaagagcaggaagctggccgtgaactttggagtgtccaagcccagcgagtag

SEQ ID NO: 102773 - DNA, 5085 bp, Artificial Sequence
  derived and/or modified sequence
atgggcgtgcccaagttctaccggtggatcagcgagcggtacccctgcttgagcgaggttgttaaggagcatcagatccccgagtttgacaacctgtacttggacatgaatgggattatccaccagtgcagccaccccaacgacgacgacgtgcattttcgaatcagcgacgataagattttcactgatatcttccactatctggaagttttgtttcgcatcataaagccgagaaaagtcttctttatggccgtggatggcgtggcacctagagctaagatgaatcaacaacgtggtcggcgctttagatctgcaaaggaagctgaagacaaaatcaaaaaggccattgagaaaggtgaaacattgcccacggaggctaggtttgatagcaattgtataacccccgggaccgagttcatggcgcgcttacacgagcacctgaagtacttcgtgaacatgaagataagtactgacaaaagctggcaaggcgtgaccatttatttttctggtcatgagacacctggagagggcgagcacaaaatcatggagtttatccggtcagagaaagcaaaacccgaccatgaccctaataccagacattgcttgtacggtctggatgcagacctcatcatgctaggcttaacatcccacgaggcccatttcagccttctgagagaagaagtgagatttggcggaaagaaaacccaaagagtctgcgccccagaagaaaccactttccacttactacacctaagccttatgcgggaatacattgactacgaattttccgtgttgaaggagaagatcaccttcaagtacgatatagaacgcatcatcgatgattggattctcatgggctttctggtcgggaatgatttcattccgcacctgccccatttgcatatcaatcacgatgctttaccactcctctacggcacttatgtgaccattctgcctgagctgggaggctacatcaatgaaagtggacacctgaatctcccacgtttcgagaagtaccttgtgaagctgagtgacttcgacagagaacatttctctgaggtgttcgtggatttaaagtggtttgaaagtaaagtcggtaataaatacctgaatgaggcggctggagtagcggctgaggaggccagaaactacaaggagaaaaagaaattgaaagggcaggagaactccttgtgctggaccgcgctggacaaaaatgagggcgagatgattacctctaaagataaccttgaggatgagaccgaggacgatgacctttttgaaaccgagtttcggcagtataagagaacgtactacatgaccaaaatgggggtagacgtggtaagcgacgactttttagctgatcaggccgcctgctacgtgcaggcaatccagtggatcttgcactattattatcacggtgtccaatcatggagttggtattacccttatcactacgcacctttcctgtctgatatccacaacatcagcactctcaagatccacttcgagctcggtaagcccttcaaaccttttgagcagctactggccgtgctacctgccgccagcaaaaatttgctcccagcctgctaccagcatctgatgaccaatgaggacagccccatcatcgaatactatccccccgactttaaaacagacctgaatggaaaacagcaggagtgggaggccgtagtgctcattccgttcatcgacgagaagcgcctgctagaggctatggaaacgtgtaatcattccctaaaaaaggaagaaagaaaaaggaatcagcatagcgagtgtctaatgtgttggtatgatcgcgacacagaatttatctaccccagcccttggccggagaagtttccagccatcgaacgctgttgcaccaggtataagatcatctcactagacgcgtggagagtggatattaacaagaataaaatcaccagaatcgaccagaaagcgctgtacttttgcggtttccctacccttaagcacattcgccataaatttttcttaaagaagtccggcgtgcaggtgtttcagcagtcatctaggggtgagaacatgatgctggagattctcgtcgatgctgagtctgacgaactgacagtggagaatgtagccagtagcgtgttgggaaagtccgtatttgtgaattggccccacctcgaggaagctcgagtcgtcgccgtgtccgatggagaaactaagttttatctcgaggagcctccgggcacacagaagctgtactccggaagaactgccccaccctcaaaggtggtgcacctcggagataaagagcagtccaactgggcaaaggaggtccagggaatttctgagcactacctgcgccgaaaaggtatcatcattaatgagactagtgcagtcgtgtacgcccagctgctgaccggcagaaaataccaaatcaaccaaaacggcgaagttcggctcgaaaagcagtggagcaaacaggtggtcccgttcgtctaccagacgattgttaaagatatccgggcgtttgattcgcgattcagtaacatcaagacacttgacgatctgttcccactgcgcagcatggtatttatgctgggcactccttattacgggtgtacaggcgaagtgcaagacagtggggacgtgattaccgagggacgtataagagtgatcttcagcattccttgcgagcccaacctggacgccctcatccagaaccagcacaaatattccatcaagtataatcctggatacgtgcttgcaagccgcctgggggtgtccgggtaccttgtttccagattcactggaagcatttttattgggaggggtagtcgacgaaatcctcacggagatcataaagccaatgtagggctgaaccttaaattcaataagaagaatgaggaagtgccgggatatactaagaaggtgggcagcgaatggatgtattcctcagccgctgagcagctgctggctgaatacctcgaacgtgctcctgagctttttagctatattgcaaagaacagccaggaggatgtgttttacgaagacgacatttggcccggcgagaacgagaatggggccgagaaagtgcaagagattatcacctggctgaaagggcatccagtctctaccttgagtcggtcaagttgtgatctgcaaattcttgacgccgcgattgtggaaaaaatcgaggaggaggttgagaagtgcaagcagagaaagaacaacaagaaagtgagggtgaccgtgaaaccacacttgctgtatcgtcccttagaacagcagcatggggttatccctgacagagatgcggaattctgcctctttgatagggtcgtcaatgtgcgggaaaacttcagtgtcccagttggcctgcggggaacgataatcgggataaagggagcaaaccgagaggccgacgtgctgttcgaggtgttatttgatgaggagtttcctggtggactaaccatccgctgctcccccggaaggggatatcggttacccacctccgcgttagtgaatttgtcccacgggtccaggtcagaaactggcaaccaaaagctgaccgccatcgttaaaccgcaacctgctgtgcaccaacatagttcctcttctagtgtgtccagtggacacctgggagcactgaatcactcccctcagtctctctttgttcccacacaggtacccactaaagatgatgacgaattctgcaatatctggcagtcactgcaggggtctgggaaaatgcagtacttccaaccaacaatacaagagaaaggtgccgtgctgccacaagagatttcgcaagtcaatcagcaccacaaatccgggtttaacgataatagcgtgaagtatcagcaacggaaacatgaccctcatcgcaaatttaaggaggaatgcaagagtcccaaggccgagtgctggtcccagaagatgtccaataaacagcccaacagcggaattgagaactttctcgccagtctgaatatttcgaaggagaacgaggttcaatcaagtcaccatggcgagccgccctcagaagagcacctgagtccccaatcatttgccatgaaagggacaaggatgctgaaagaaattctaaaaattgatggaagtaataccgtggatcacaaaaatgaaataaagcagattgccaatgagattcccgtctcatcaaatagacgggacgagtacggtctcccgtcacagcctaagcagaataaaaagttggcttcctacatgaacaagccacactcggctaacgagtaccataatgtacagtctatggataacatgtgctggcctgccccctcccaaatcccccctgtgtccacacctgttacagagctgagtagaatatgcagccttgtcggtatgccccagcctgacttctcattcctccgtatgccccagacaatgacggtctgccaggtgaagctatccaacggcctgcttgtccacggtccacagtgtcactccgaaaacgaggccaaagaaaaagctgccctttttgcccttcagcagcttggaagtttgggaatgaatttccccctgccatcccaggtgttcgcgaactacccatccgctgttccccctggcaccatcccacctgcttttcctccccccaccgctaacatcatgccatcctctagccacctattcgggtccatgccctggggcccgtcagtaccagtgcctgggaaaccttttcaccacaccttatattccggaaccatgcccatggccgggggtattcccgggggggtccacaatcagtttatccccttacaggtgaccaagaagcgggtcgccaacaaaaagaactttgaaaacaaggaggctcagagttcacaggcgacaccggtgcagacgagccaacccgactccagtaatatcgtaaaggtatccccccgagagtcgtcctcagcctctctgaagtcttcacctattgcacagcctgctagcagcttccaagtggaaaccgcctcacagggacattcaatcagtcaccacaagtccacacccatatcttctagcaggcggaaatcacgtaagctggccgtgaactttggcgtgtcaaagccatcagagtag

SEQ ID NO: 102774 - DNA, 3483 bp, Artificial Sequence
  derived and/or modified sequence
tgaaccaacgaggacagccccatcatcgagtactacccccccgactttaaaacagacctaaacggtaaacagcaagaatgggaggcagtggtgctgattcccttcattgacgagcgcctgctagaagctatggaaacctgcaaccacagcctgaagaaagaagaaagaaagcgaaatcagcatagtgagtgcctcatgtgttggtacgaccgtgatacagaatttatttatccttcaccctggccagagaaatttcctgccatagagagatgttgtacgaggtataagattataagcctggatgcatggcgtgtagacattaacaagaacaagattacaaggatagaccagaaggctttgtatttctgcggattccctacgctgaaacatatccggcataaattctttctaaaaaagtctggggtccaggtcttccagcagtcaagtcgcggcgaaaatatgatgctggagattttagttgatgcagagtctgacgagttaactgtagaaaatgtggcttccagcgtactcggtaagtcagtatttgtgaactggccccatctggaagaggccagagtggtggcggtgtctgatggtgaaactaagttctacctggaagaacctccaggcacccagaaactctattctggccgcaccgctccgccaagcaaggtagttcacttgggcgacaaagagcaaagtaattgggcaaaagaagtgcagggcataagcgaacactacctgagaagaaaaggaattataattaacgagacttctgccgtcgtctacgcccagcttcttacaggaagaaagtaccagataaatcagaacggggaagtccgacttgaaaagcaatggtctaaacaggtggttccttttgtataccaaactattgtaaaagatatccgcgcattcgacagccggttctccaacattaaaactctggacgatctgttcccactgcggtctatggtcttcatgctcgggactccctactacggatgcactggagaagtacaagattccggagacgtaatcacagagggccgaatccgagtcattttttctatcccctgcgagcctaatctggacgccttaattcaaaaccagcacaagtatagtatcaagtataatccggggtatgtgctggcatcaagactgggtgtgtctggatacttggtctcccggttcactggctctattttcattggccgaggctctcggaggaacccgcatggagaccacaaggcgaacgttggactgaatctgaagtttaacaagaagaatgaagaagtacccggttataccaagaaagtgggcagcgagtggatgtattcctcagccgccgagcagttgttagctgagtacctggaacgcgcgcccgaacttttctcttacatcgctaaaaattctcaggaagatgtcttctacgaagatgacatttggcccggcgagaacgaaaatggtgcagaaaaggtgcaggagatcatcacctggctgaagggacaccccgtctcgactctcagtcggtcttcatgtgatcttcaaattctggacgcagccattgtcgaaaagatagaggaagaggtggagaagtgtaagcagagaaaaaataacaagaaggtccgggtcaccgtaaaaccacatcttctgtacagaccccttgaacaacaacatggcgtcataccggatagagacgctgagttctgtttgttcgatagagttgtaaacgtccgggagaatttttcggttcccgttggactgaggggaacgatcatcggcatcaaaggcgcgaatcgcgaggctgacgtcctgtttgaagtgctcttcgacgaagagttcccgggcgggctgaccatccgttgcagcccgggccgaggttatcgacttccgaccagcgcactcgtcaatctgtcccacgggtctagaagtgaaacagggaaccagaaactcacagccattgtcaaacctcagccggcagtacaccagcatagttcaagttcatctgtgtccagcggtcacctgggtgccttgaatcacagcccacaaagtttgttcgtgcccacccaagtacctactaaggacgatgacgagttctgcaatatatggcagtctctgcaagggtccggcaagatgcaatatttccagccaacaatccaggagaaaggagctgtgctgccacaggaaatatcacaagtcaatcaacaccacaagagtgggtttaatgataacagtgtgaagtatcaacaacggaaacacgacccacacaggaaatttaaggaagaatgcaagtccccaaaagcagaatgttggtcacagaagatgagcaataagcagcctaattccggaatcgagaacttccttgccagcttaaacatcagcaaggaaaatgaagtgcaatcgtctcaccacggggagcctccttcagaggaacacctgagcccccaatccttcgcaatgaaaggaactcgcatgctgaaggaaatcctcaaaatcgacggctcaaatacagtggaccacaagaacgaaatcaaacagatcgccaatgagatccctgtgtccagtaacagacgcgatgagtatggactgcctagccaaccaaagcagaacaaaaaactggcctcttatatgaacaaaccccactcggctaacgagtatcacaatgtacaatctatggacaatatgtgctggcccgctccgagccagatccctccagtttctacacctgtgactgaactaagtagaatctgctctctggttggtatgcctcagccagacttttcctttttgcggatgccccagaccatgactgtctgtcaagtgaagcttagcaacgggcttctcgtccacgggcctcagtgccacagtgagaatgaagcaaaagagaaggcggccctatttgctctgcagcaattaggttccttgggcatgaattttccgctcccttcacaggtcttcgccaactacccctctgccgtgccgccaggaactataccaccagcctttcctcccccaaccgctaatatcatgccaagttcctcccacttgtttgggtcaatgccatggggaccctccgtccctgtgccaggtaaacccttccaccacacactttatagtgggactatgcccatggccggtgggatcccaggaggcgtacataaccaatttattccgctgcaggtcactaagaagagggtggccaacaagaaaaattttgagaacaaggaggcacaaagcagccaggcaacacccgttcagaccagccagccagacagcagtaacattgtgaaagtgtctccgcgtgaatctagctccgcaagccttaaaagctctcccattgcccaacctgcatcaagctttcaggtggaaactgcctcccaggggcacagcatcagccatcataaatccaccccaatcagctcctctagacgcaaatctcgtaagctggccgtcaacttcggagtatccaagccatccgaatag

SEQ ID NO: 102775 - DNA, 5085 bp, Artificial Sequence
  derived and/or modified sequence
atgggggtccctaaattctacaggtggatctccgagcgctacccttgtctcagtgaagtcgtgaaggaacaccagattcctgagtttgacaacctctacctggacatgaacgggattattcaccagtgctcccaccccaatgatgacgacgtgcacttccgaatctcagacgataagatcttcacagacatcttccactacctagaggtgctgtttcggatcatcaagcccaggaaagttttctttatggctgttgacggggtggctcctcgggctaagatgaaccagcaaagaggcagacggttcagatccgccaaagaagcagaggataaaatcaaaaaggccatcgagaaaggagagacactgcccacggaggcgaggttcgactcaaactgtatcacacctgggaccgagttcatggcacgcctgcacgagcatctgaaatattttgtgaacatgaagatctctaccgataagtcatggcaaggggtaaccatctacttttccggtcacgagacccccggagagggcgagcacaagatcatggagttcataaggtccgaaaaagcaaagcctgaccacgaccccaacacaagacactgcctttatgggctggacgctgacttgatcatgctgggcctgacatcacacgaagcccacttttcccttttacgagaggaagttcgcttcgggggaaaaaaaacacagagggtgtgcgccccagaggaaaccacctttcatctgctgcacctctcactcatgcgagaatatatcgactatgagttcagcgtactgaaggaaaagataacatttaaatatgatattgaacgcatcattgatgattggatcctaatgggattccttgtcggtaatgattttatcccccaccttccacacctacacatcaaccatgatgccctccccctactgtacggaacctatgtaacaatcttgccagaattgggaggttacatcaacgaatcaggacacctgaatctccctcgcttcgagaagtatctcgttaaattaagtgactttgatagggagcacttcagtgaagtgttcgtggacctcaagtggttcgaatcgaaggtgggcaataaatacctgaatgaagcggcaggcgtagctgctgaggaggctcggaactataaggagaaaaaaaagcttaagggacaggagaattccctgtgctggactgcgctcgataagaacgagggggagatgatcaccagcaaagacaatctggaagacgaaacagaggacgacgacctgtttgagaccgaattcagacaatacaaacggacttattacatgacgaaaatgggcgtggacgtagtgtctgatgatttccttgcggaccaggccgcttgttacgtgcaggctattcaatggattttgcactattactatcatggtgtacagtcctggtcctggtactatccttaccactatgcacctttcttgtccgatattcataatatttcaacactgaaaatccattttgagttgggtaagccttttaaaccattcgagcagctgctcgccgtgcttcccgctgcatcgaaaaacctcctgccagcctgctatcagcatcttatgacaaacgaggattcacccataatcgagtattacccccctgatttcaaaaccgatcttaatgggaagcagcaggaatgggaggcagtggtgctgataccatttattgacgagaaacggcttctggaggctatggaaacctgtaatcactcactgaagaaagaggaacgcaaacgtaatcagcacagcgaatgtttaatgtgctggtatgaccgcgataccgaatttatttatccctcaccgtggcccgaaaagttcccagcaatcgaacgctgctgcacccgatacaaaataatttcactggatgcatggagggtggacatcaataaaaataaaatcactcgcattgatcagaaagccctgtacttttgcggattccccaccctgaagcatatccggcataaattctttctcaagaagagcggcgttcaggtgttccagcagagctcgcggggagaaaacatgatgctagaaattctagttgatgcggaaagcgatgagttgacagtagagaacgttgcctcttccgtgctgggaaaaagcgtattcgttaactggccacatcttgaggaggctcgcgtggtcgcagtgtctgacggcgaaaccaaattttatcttgaagaaccaccaggtacccaaaagctttattcgggacgaaccgccccaccatcaaaagtggttcatctgggcgacaaagagcagtcaaattgggctaaagaagtccagggaatcagcgagcactacctgcgaagaaagggtatcattattaacgaaacgtccgccgttgtctacgcccaacttcttactggaaggaagtaccagatcaatcagaacggtgaagtgagactggagaagcaatggtctaagcaagtggtgcccttcgtgtaccagactatcgtgaaggatattcgagctttcgacagtcgattttccaatatcaaaaccctggacgatctgttcccattaagatccatggtgtttatgctcggcactccttactacggctgtacgggcgaagtgcaagatagcggtgatgtgatcaccgaggggaggatcagggttatcttctcgattccttgcgagcctaacctggacgcgttaattcagaatcagcacaaatactctattaagtacaatccagggtacgtccttgctagtcgcctcggggtgtcaggctacctggtctcaaggttcactggctctattttcatcggtagagggagtcggaggaatccacatggggaccataaggccaacgtgggattaaatctcaagttcaacaagaaaaatgaggaagttcccggttacacgaagaaagtcggcagtgaatggatgtattcctctgccgctgagcaactactggcagaatacttagagcgggcacccgagcttttctcatacattgcaaagaatagtcaagaagatgtgttctatgaggacgatatttggccaggtgaaaacgagaatggcgctgagaaggtccaagagataatcacatggctgaaggggcaccccgtctctaccctaagtcgcagttcgtgcgatttgcagattttagacgcagccattgttgagaagattgaagaagaagtggaaaagtgcaaacaaagaaaaaataacaaaaaggttcgagttaccgtgaaacctcacctgctgtatcgcccactggagcagcagcacggcgttatacccgatagagatgccgaattttgtctgtttgatcgggtagttaacgttcgcgagaatttttcagtgcccgtggggttacgcggaacgattattggaattaaaggcgctaatagagaggctgacgtgttgttcgaggtgctgtttgacgaggaatttcctggcggtctaacaattagatgttcccctggcaggggttaccgcttgcctacatccgcacttgtgaatttatcacacggatctcggtccgaaaccggaaatcagaaactcacggcgattgtgaagcctcagcccgctgtacaccaacattcttcctcttcaagcgtgtcatctggccacctgggcgcactgaaccacagccctcagagcctttttgtgcccacccaagtccctacaaaagatgatgatgaattttgcaacatttggcagtctctccaagggtcagggaaaatgcaatacttccaaccaaccattcaggaaaagggcgcagtgctgcctcaggagatttcccaggtgaatcaacaccataaatccggttttaatgacaacagcgttaaataccagcaaagaaaacatgatccccaccggaaattcaaagaggagtgcaagtctccaaaggctgagtgctggtcccagaagatgagcaataagcagccaaacagtggcatagagaattttctggcatcgctgaatataagcaaagaaaacgaagttcagtcgtcacaccatggcgaaccgccaagcgaagagcatctgagcccgcagagtttcgccatgaaaggtactagaatgctgaaagaaattttgaaaatcgacgggtccaataccgttgaccataagaatgaaatcaagcagattgctaacgagatacctgtgagttccaataggagagacgaatacgggctgccttcccagccaaaacagaataaaaagctcgcgtcatatatgaataaaccccactctgccaacgagtaccataacgtccagtctatggataatatgtgttggcctgccccatcacaaatcccgccagtgtctactcccgttacggagctatcaaggatttgcagcttggtgggaatgccacagcccgattttagctttctgaggatgccccaaactatgacagtttgtcaagtgaagttgtcaaatgggttacttgtgcacggccctcagtgtcacagtgagaacgaggccaaggagaaggccgcactgttcgcgctccaacaactggggtccctgggaatgaatttcccgctaccatctcaggtatttgccaattacccttcagccgtgccccctggcactatcccgccagcctttccgccacctaccgccaatataatgccctcgtcctcacacctgtttgggagcatgccctggggaccaagcgtcccagttcccggtaaaccgtttcaccatacattgtacagcggcaccatgccaatggcagggggaatacccggtggtgtccacaatcagttcatccctttgcaagtgacgaaaaagagagtagccaacaaaaaaaacttcgagaataaggaggcccagtcttctcaagctacacctgtgcagaccagtcaacctgattcctccaacattgtcaaagtgtctcccagggagtcaagctctgcgtccctgaagtcctcgcctatcgcccagcctgccagttcattccaggtcgagacagcctctcagggacattctatctcccaccacaagagtactcctatctcttcctcccgccgtaagtcccgcaagctggccgtgaatttcggggtttcgaagccctctgaatag

SEQ ID NO: 102776 - DNA, 3483 bp, Artificial Sequence
  derived and/or modified sequence
taaaccaatgaagacagtcccattatagagtattaccctcccgactttaagaccgaccttaacgggaagcagcaggagtgggaagcagtggtgctcatcccctttatagacgagcggctgctggaggccatggagacctgcaaccacagtttgaaaaaagaagagagaaaaagaaaccaacactccgagtgtttaatgtgctggtatgatagagatacggaattcatttatccaagtccatggcctgagaagttccctgccatcgaacgctgttgcactcgctataaaatcatttctcttgacgcctggagagtggacattaacaagaacaaaatcactcggattgaccaaaaggcattatacttttgcggttttcctaccctgaagcacatcaggcacaagttcttcttgaaaaaaagtggggtccaagtctttcagcagtcctcaaggggcgaaaatatgatgctggaaattctggtggacgcggagtctgatgaactgaccgttgaaaatgttgccagctcagttttagggaaatccgtctttgtgaattggcctcacctcgaggaggctagagtcgtggcagtctccgacggtgagacaaagttttaccttgaagaaccgccaggcactcagaaactctattccggccgaaccgcccctccatccaaagttgttcacctgggcgacaaggagcagtctaactgggccaaagaagttcaagggattagcgaacactacttgcgcaggaaaggaattataatcaatgaaacatccgcagtggtgtacgcccagctgctgacggggcgtaaataccaaattaaccagaatggcgaggtacgactagagaaacaatggagtaagcaagttgtgcccttcgtgtaccagaccatagtcaaggatattagagcattcgatagtcgcttcagcaacatcaaaactctagacgatcttttccctctgagatctatggtgttcatgctgggcacaccttattatggttgcactggtgaggtccaggattctggggatgtgatcaccgaagggagaattcgcgtaatcttctcaatcccgtgtgagcctaatctggacgccctgatccagaaccaacacaagtacagtatcaaatacaaccctggatacgtactcgcctctcggctaggagtgtcagggtacctggtctctcggttcactggaagcatcttcattggcagggggtctcggagaaatcctcacggcgaccacaaggccaatgtgggcctaaatctcaagtttaacaaaaaaaacgaggaagtcccgggttataccaaaaaggtcggctccgagtggatgtactccagcgctgccgaacagctgctagctgaatacctcgagagagcacccgagctcttttcctacattgccaagaattcacaagaagacgtgttttatgaagacgacatttggccaggcgagaatgagaacggagctgagaaggtgcaggaaatcataacttggctcaagggccaccctgtctcaaccctctctcggtcaagctgtgacctccaaattctcgatgccgctattgtggaaaaaatagaagaagaagtggagaaatgtaagcaaagaaaaaacaacaaaaaagtgcgtgtcaccgtcaaacctcatctactctacaggcccctcgagcagcagcatggtgtgatcccagacagagacgccgagttttgtctgtttgatcgggtggtcaatgtgagggaaaatttcagcgtgcccgtcggcctacgaggaaccatcatcggaatcaagggagctaatagggaggccgatgttctgtttgaagtcctgtttgatgaagaatttcccggagggctgacaattaggtgcagcccaggaagaggttatcgcctcccaacttctgccctggtgaacctgtcgcatggctcgcggtcagaaactggaaaccaaaagttgaccgctatcgtgaagccccagcccgcagtgcatcagcatagctcctcctcttcagtttcatctggtcacctgggagccttgaatcactccccccagagcctgtttgtacccacacaagttcctaccaaagatgatgacgagttttgcaatatctggcagtccctgcagggttctgggaagatgcagtattttcaaccaacgatccaggagaagggtgcagtgctgcctcaggagatcagccaagtaaatcagcaccacaaaagcgggtttaacgataatagtgtcaagtaccagcagcggaagcacgatcctcatcggaagttcaaggaggaatgtaagagcccaaaagcagaatgttggtctcagaaaatgagtaataagcagccaaattccggtattgagaatttcctggcatccctgaatatttcaaaggagaacgaggtgcagagctctcaccatggggagcccccatcagaagagcacctgtccccccagtctttcgccatgaaggggacaaggatgctaaaggagatactgaaaattgacggctccaacaccgtcgaccataagaatgaaatcaaacagattgctaatgagatccctgtgagctcaaataggcgggacgagtatggtctgccatcgcagcctaagcagaacaagaagctggcctcttatatgaacaaaccacattctgccaatgaatatcacaatgtgcagagcatggacaatatgtgttggccagcaccatcacagattccacccgtctcgaccccagtgactgagctctcacgcatttgctccttggtgggaatgccacagcccgatttttccttcctgaggatgccccagaccatgactgtgtgccaggtgaagctgagtaacggcctgctcgtccatggaccacagtgccattccgaaaatgaggccaaggaaaaggctgccttatttgccttgcagcaattaggcagtctcgggatgaacttccccctgcccagccaggtgtttgcgaactatccctctgcggtgcccccaggaaccatccctccagcattccctcctcccacagccaatatcatgccctcgtcctcccacttattcgggtcgatgccatggggacccagcgtgcctgtcccaggcaaaccgttccaccacaccttgtattcgggtacaatgccgatggctgggggtatccccggtggtgtacacaatcagttcattcccctgcaggtcacaaaaaagagagtggccaacaaaaagaactttgagaacaaagaggcacagtcctcgcaggcaactcctgttcagacaagccagcccgactcttctaacatcgtcaaagtgagtcccagagagtcttcttctgcctctctgaaaagctcccccatcgcgcagcccgcttcaagttttcaagtcgaaaccgcttcccaggggcactccatttcccatcataagagcacacctatttctagctcacggagaaagagccgcaagctggctgtgaacttcggcgtgtctaaaccgtccgagtag

SEQ ID NO: 102777 - DNA, 5085 bp, Artificial Sequence
  derived and/or modified sequence
atgggcgtgcccaagttctacagatggatcagcgagagatacccctgcctgagcgaggtggtgaaggagcaccagatccccgagttcgacaacctgtacctggacatgaacggcatcatccaccagtgcagccaccccaacgacgacgacgtgcacttcagaatcagcgacgacaagatcttcaccgacatcttccactacctggaggtgctgttcagaatcatcaagcccagaaaggtgttcttcatggccgtggacggcgtggcccccagagccaagatgaaccagcagagaggcagaagattcagaagcgccaaggaggccgaggacaagatcaagaaggccatcgagaagggcgagaccctgcccaccgaggccagattcgacagcaactgcatcacccccggcaccgagttcatggccagactgcacgagcacctgaagtacttcgtgaacatgaagatcagcaccgacaagagctggcagggcgtgaccatctacttcagcggccacgagacccccggcgagggcgagcacaagatcatggagttcatcagaagcgagaaggccaagcccgaccacgaccccaacaccagacactgcctgtacggcctggacgccgacctgatcatgctgggcctgaccagccacgaggcccacttcagcctgctgagagaggaggtgagattcggcggcaagaagacccagagagtgtgcgcccccgaggagaccaccttccacctgctgcacctgagcctgatgagagagtacatcgactacgagttcagcgtgctgaaggagaagatcaccttcaagtacgacatcgagagaatcatcgacgactggatcctgatgggcttcctggtgggcaacgacttcatcccccacctgccccacctgcacatcaaccacgacgccctgcccctgctgtacggcacctacgtgaccatcctgcccgagctgggcggctacatcaacgagagcggccacctgaacctgcccagattcgagaagtacctggtgaagctgagcgacttcgacagagagcacttcagcgaggtgttcgtggacctgaagtggttcgagagcaaggtgggcaacaagtacctgaacgaggccgccggcgtggccgccgaggaggccagaaactacaaggagaagaagaagctgaagggccaggagaacagcctgtgctggaccgccctggacaagaacgagggcgagatgatcaccagcaaggacaacctggaggacgagaccgaggacgacgacctgttcgagaccgagttcagacagtacaagagaacctactacatgaccaagatgggcgtggacgtggtgagcgacgacttcctggccgaccaggccgcctgctacgtgcaggccatccagtggatcctgcactactactaccacggcgtgcagagctggagctggtactacccctaccactacgcccccttcctgagcgacatccacaacatcagcaccctgaagatccacttcgagctgggcaagcccttcaagcccttcgagcagctgctggccgtgctgcccgccgccagcaagaacctgctgcccgcctgctaccagcacctgatgaccaacgaggacagccccatcatcgagtactacccccccgacttcaagaccgacctgaacggcaagcagcaggagtgggaggccgtggtgctgatccccttcatcgacgagaagagactgctggaggccatggagacctgcaaccacagcctgaagaaggaggagagaaagagaaaccagcacagcgagtgcctgatgtgctggtacgacagagacaccgagttcatctaccccagcccctggcccgagaagttccccgccatcgagagatgctgcaccagatacaagatcatcagcctggacgcctggagagtggacatcaacaagaacaagatcaccagaatcgaccagaaggccctgtacttctgcggcttccccaccctgaagcacatcagacacaagttcttcctgaagaagagcggcgtgcaggtgttccagcagagcagcagaggcgagaacatgatgctggagatcctggtggacgccgagagcgacgagctgaccgtggagaacgtggccagcagcgtgctgggcaagagcgtgttcgtgaactggccccacctggaggaggccagagtggtggccgtgagcgacggcgagaccaagttctacctggaggagccccccggcacccagaagctgtacagcggcagaaccgccccccccagcaaggtggtgcacctgggcgacaaggagcagagcaactgggccaaggaggtgcagggcatcagcgagcactacctgagaagaaagggcatcatcatcaacgagaccagcgccgtggtgtacgcccagctgctgaccggcagaaagtaccagatcaaccagaacggcgaggtgagactggagaagcagtggagcaagcaggtggtgcccttcgtgtaccagaccatcgtgaaggacatcagagccttcgacagcagattcagcaacatcaagaccctggacgacctgttccccctgagaagcatggtgttcatgctgggcaccccctactacggctgcaccggcgaggtgcaggacagcggcgacgtgatcaccgagggcagaatcagagtgatcttcagcatcccctgcgagcccaacctggacgccctgatccagaaccagcacaagtacagcatcaagtacaaccccggctacgtgctggccagcagactgggcgtgagcggctacctggtgagcagattcaccggcagcatcttcatcggcagaggcagcagaagaaacccccacggcgaccacaaggccaacgtgggcctgaacctgaagttcaacaagaagaacgaggaggtgcccggctacaccaagaaggtgggcagcgagtggatgtacagcagcgccgccgagcagctgctggccgagtacctggagagagcccccgagctgttcagctacatcgccaagaacagccaggaggacgtgttctacgaggacgacatctggcccggcgagaacgagaacggcgccgagaaggtgcaggagatcatcacctggctgaagggccaccccgtgagcaccctgagcagaagcagctgcgacctgcagatcctggacgccgccatcgtggagaagatcgaggaggaggtggagaagtgcaagcagagaaagaacaacaagaaggtgagagtgaccgtgaagccccacctgctgtacagacccctggagcagcagcacggcgtgatccccgacagagacgccgagttctgcctgttcgacagagtggtgaacgtgagagagaacttcagcgtgcccgtgggcctgagaggcaccatcatcggcatcaagggcgccaacagagaggccgacgtgctgttcgaggtgctgttcgacgaggagttccccggcggcctgaccatcagatgcagccccggcagaggctacagactgcccaccagcgccctggtgaacctgagccacggcagcagaagcgagaccggcaaccagaagctgaccgccatcgtgaagccccagcccgccgtgcaccagcacagcagcagcagcagcgtgagcagcggccacctgggcgccctgaaccacagcccccagagcctgttcgtgcccacccaggtgcccaccaaggacgacgacgagttctgcaacatctggcagagcctgcagggcagcggcaagatgcagtacttccagcccaccatccaggagaagggcgccgtgctgccccaggagatcagccaggtgaaccagcaccacaagagcggcttcaacgacaacagcgtgaagtaccagcagagaaagcacgacccccacagaaagttcaaggaggagtgcaagagccccaaggccgagtgctggagccagaagatgagcaacaagcagcccaacagcggcatcgagaacttcctggccagcctgaacatcagcaaggagaacgaggtgcagagcagccaccacggcgagccccccagcgaggagcacctgagcccccagagcttcgccatgaagggcaccagaatgctgaaggagatcctgaagatcgacggcagcaacaccgtggaccacaagaacgagatcaagcagatcgccaacgagatccccgtgagcagcaacagaagagacgagtacggcctgcccagccagcccaagcagaacaagaagctggccagctacatgaacaagccccacagcgccaacgagtaccacaacgtgcagagcatggacaacatgtgctggcccgcccccagccagatcccccccgtgagcacccccgtgaccgagctgagcagaatctgcagcctggtgggcatgccccagcccgacttcagcttcctgagaatgccccagaccatgaccgtgtgccaggtgaagctgagcaacggcctgctggtgcacggcccccagtgccacagcgagaacgaggccaaggagaaggccgccctgttcgccctgcagcagctgggcagcctgggcatgaacttccccctgcccagccaggtgttcgccaactaccccagcgccgtgccccccggcaccatcccccccgccttccccccccccaccgccaacatcatgcccagcagcagccacctgttcggcagcatgccctggggccccagcgtgcccgtgcccggcaagcccttccaccacaccctgtacagcggcaccatgcccatggccggcggcatccccggcggcgtgcacaaccagttcatccccctgcaggtgaccaagaagagagtggccaacaagaagaacttcgagaacaaggaggcccagagcagccaggccacccccgtgcagaccagccagcccgacagcagcaacatcgtgaaggtgagccccagagagagcagcagcgccagcctgaagagcagccccatcgcccagcccgccagcagcttccaggtggagaccgccagccagggccacagcatcagccaccacaagagcacccccatcagcagcagcagaagaaagagcagaaagctggccgtgaacttcggcgtgagcaagcccagcgagtag

SEQ ID NO: 102778 - DNA, 3483 bp, Artificial Sequence
  derived and/or modified sequence
tgaaccaacgaggacagccccatcatcgagtactacccccccgacttcaagaccgacctgaacggcaagcagcaggagtgggaggccgtggtgctgatccccttcatcgacgagagactgctggaggccatggagacctgcaaccacagcctgaagaaggaggagagaaagagaaaccagcacagcgagtgcctgatgtgctggtacgacagagacaccgagttcatctaccccagcccctggcccgagaagttccccgccatcgagagatgctgcaccagatacaagatcatcagcctggacgcctggagagtggacatcaacaagaacaagatcaccagaatcgaccagaaggccctgtacttctgcggcttccccaccctgaagcacatcagacacaagttcttcctgaagaagagcggcgtgcaggtgttccagcagagcagcagaggcgagaacatgatgctggagatcctggtggacgccgagagcgacgagctgaccgtggagaacgtggccagcagcgtgctgggcaagagcgtgttcgtgaactggccccacctggaggaggccagagtggtggccgtgagcgacggcgagaccaagttctacctggaggagccccccggcacccagaagctgtacagcggcagaaccgccccccccagcaaggtggtgcacctgggcgacaaggagcagagcaactgggccaaggaggtgcagggcatcagcgagcactacctgagaagaaagggcatcatcatcaacgagaccagcgccgtggtgtacgcccagctgctgaccggcagaaagtaccagatcaaccagaacggcgaggtgagactggagaagcagtggagcaagcaggtggtgcccttcgtgtaccagaccatcgtgaaggacatcagagccttcgacagcagattcagcaacatcaagaccctggacgacctgttccccctgagaagcatggtgttcatgctgggcaccccctactacggctgcaccggcgaggtgcaggacagcggcgacgtgatcaccgagggcagaatcagagtgatcttcagcatcccctgcgagcccaacctggacgccctgatccagaaccagcacaagtacagcatcaagtacaaccccggctacgtgctggccagcagactgggcgtgagcggctacctggtgagcagattcaccggcagcatcttcatcggcagaggcagcagaagaaacccccacggcgaccacaaggccaacgtgggcctgaacctgaagttcaacaagaagaacgaggaggtgcccggctacaccaagaaggtgggcagcgagtggatgtacagcagcgccgccgagcagctgctggccgagtacctggagagagcccccgagctgttcagctacatcgccaagaacagccaggaggacgtgttctacgaggacgacatctggcccggcgagaacgagaacggcgccgagaaggtgcaggagatcatcacctggctgaagggccaccccgtgagcaccctgagcagaagcagctgcgacctgcagatcctggacgccgccatcgtggagaagatcgaggaggaggtggagaagtgcaagcagagaaagaacaacaagaaggtgagagtgaccgtgaagccccacctgctgtacagacccctggagcagcagcacggcgtgatccccgacagagacgccgagttctgcctgttcgacagagtggtgaacgtgagagagaacttcagcgtgcccgtgggcctgagaggcaccatcatcggcatcaagggcgccaacagagaggccgacgtgctgttcgaggtgctgttcgacgaggagttccccggcggcctgaccatcagatgcagccccggcagaggctacagactgcccaccagcgccctggtgaacctgagccacggcagcagaagcgagaccggcaaccagaagctgaccgccatcgtgaagccccagcccgccgtgcaccagcacagcagcagcagcagcgtgagcagcggccacctgggcgccctgaaccacagcccccagagcctgttcgtgcccacccaggtgcccaccaaggacgacgacgagttctgcaacatctggcagagcctgcagggcagcggcaagatgcagtacttccagcccaccatccaggagaagggcgccgtgctgccccaggagatcagccaggtgaaccagcaccacaagagcggcttcaacgacaacagcgtgaagtaccagcagagaaagcacgacccccacagaaagttcaaggaggagtgcaagagccccaaggccgagtgctggagccagaagatgagcaacaagcagcccaacagcggcatcgagaacttcctggccagcctgaacatcagcaaggagaacgaggtgcagagcagccaccacggcgagccccccagcgaggagcacctgagcccccagagcttcgccatgaagggcaccagaatgctgaaggagatcctgaagatcgacggcagcaacaccgtggaccacaagaacgagatcaagcagatcgccaacgagatccccgtgagcagcaacagaagagacgagtacggcctgcccagccagcccaagcagaacaagaagctggccagctacatgaacaagccccacagcgccaacgagtaccacaacgtgcagagcatggacaacatgtgctggcccgcccccagccagatcccccccgtgagcacccccgtgaccgagctgagcagaatctgcagcctggtgggcatgccccagcccgacttcagcttcctgagaatgccccagaccatgaccgtgtgccaggtgaagctgagcaacggcctgctggtgcacggcccccagtgccacagcgagaacgaggccaaggagaaggccgccctgttcgccctgcagcagctgggcagcctgggcatgaacttccccctgcccagccaggtgttcgccaactaccccagcgccgtgccccccggcaccatcccccccgccttccccccccccaccgccaacatcatgcccagcagcagccacctgttcggcagcatgccctggggccccagcgtgcccgtgcccggcaagcccttccaccacaccctgtacagcggcaccatgcccatggccggcggcatccccggcggcgtgcacaaccagttcatccccctgcaggtgaccaagaagagagtggccaacaagaagaacttcgagaacaaggaggcccagagcagccaggccacccccgtgcagaccagccagcccgacagcagcaacatcgtgaaggtgagccccagagagagcagcagcgccagcctgaagagcagccccatcgcccagcccgccagcagcttccaggtggagaccgccagccagggccacagcatcagccaccacaagagcacccccatcagcagcagcagaagaaagagcagaaagctggccgtgaacttcggcgtgagcaagcccagcgagtag

SEQ ID NO: 102779 - protein, 2240 aa, Artificial Sequence
  derived and/or modified sequence
MLPCKKRRTTVTESLQHKGNQEENNVDLESAVKPESDQVKDLSSVSLSWDPSHGRVAGFEVQSLQDAGNQLGMEDTSLSSGMLTQNTNVPILEGVDVAISQGITLPSLESFHPLNIHIGKGKLHATGSKRGKKMTLRPGPVTQEDRCDHLTLKEPFSGEPSEEVKEEGGKPQMNSEGEIPSLPSGSQSAKPVSQPRKSTQPDVCASPQEKPLRTLFHQPEEEIEDGGLFIPMEEQDNEESEKRRKKKKGTKRKRDGRGQEGTLAYDLKLDDMLDRTLEDGAKQHNLTAVNVRNILHEVITNEHVVAMMKAAISETEDMPMFEPKMTRSKLKEVVEKGVVIPTWNISPIKKANEIKPPQFVDIHLEEDDSSDEEYQPDDEEEDETAEESLLESDVESTASSPRGAKKSRLRQSSEMTETDEESGILSEAEKVTTPAIRHISAEVVPMGPPPPPKPKQTRDSTFMEKLHAVDEELASSPVCMDSFQPMDDSLIAFRTRSKMPLKDVPLGQLEAELQAPDITPDMYDPNTADDEDWKMWLGGLMNDDVGNEDEADDDDDPEYNFLEDLDEPDTEDFRTDRAVRITKKEVNELMEELFETFQDEMGFSNMEDDGPEEEECVAEPRPNFNTPQALRFEEPLANLLNEQHRTVKELFEQLKMKKSSAKQLQEVEKVKPQSEKVHQTLILDPAQRKRLQQQMQQHVQLLTQIHLLATCNPNLNPEATTTRIFLKELGTFAQSSIALHHQYNPKFQTLFQPCNLMGAMQLIEDFSTHVSIDCSPHKTVKKTANEFPCLPKQVAWILATSKVFMYPELLPVCSLKAKNPQDKIVFTKAEDNLLALGLKHFEGTEFPNPLISKYLLTCKTAHQLTVRIKNLNMNRAPDNIIKFYKKTKQLPVLGKCCEEIQPHQWKPPIEREEHRLPFWLKASLPSIQEELRHMADGAREVGNMTGTTEINSDRSLEKDNLELGSESRYPLLLPKGVVLKLKPVATRFPRKAWRQKRSSVLKPLLIQPSPSLQPSFNPGKTPARSTHSEAPPSKMVLRIPHPIQPATVLQTVPGVPPLGVSGGESFESPAALPAVPPEARTSFPLSESQTLLSSAPVPKVMLPSLAPSKFRKPYVRRRPSKRRGVKASPCMKPAPVIHHPASVIFTVPATTVKIVSLGGGCNMIQPVNAAVAQSPQTIPITTLLVNPTSFPCPLNQSLVASSVSPLIVSGNSVNLPIPSTPEDKAHVNVDIACAVADGENAFQGLEPKLEPQELSPLSATVFPKVEHSPGPPLADAECQEGLSENSACRWTVVKTEEGRQALEPLPQGIQESLNNPTPGDLEEIVKMEPEEAREEISGSPERDICDDIKVEHAVELDTGAPSEELSSAGEVTKQTVLQKEEERSQPTKTPSSSQEPPDEGTSGTDVNKGSSKNALSSMDPEVRLSSPPGKPEDSSSVDGQSVGTPVGPETGGEKNGPEEEEEEDFDDLTQDEEDEMSSASEESVLSVPELQETMEKLTWLASERRMSQEGESEEENSQEENSEPEEEEEEEAEGMESLQKEDEMTDEAVGDSAEKPPTFASPETAPEVETSRTPPGESIKAAGKGRNNHRARNKRGSRARASKDTSKLLLLYDEDILERDPLREQKDLAFAQAYLTRVREALQHIPGKYEDFLQVIYEFESSTQRRTAVDLYKSLQILLQDWPQLLKDFAAFLLPEQALACGLFEEQQAFEKSRKFLRQLEICFAENPSHHQKIIKVLQGCADCLPQEITELKTQMWQLLKGHDHLQDEFSIFFDHLRPAASRMGDFEEINWTEEKEYEFDGFEEVALPDVEEEEEPPKIPTASKNKRKKEIGVQNHDKETEWPDGAKDCACSCHEGGPDSKLKKSKRRSCSHCSSKVCDSKSYKSKEPHELVGSSPHREASPMPGAKEAGQGKDMMEEEAPEERESTEATQSRTVRTTRKGEMPVSGLAVGSTLPSPREVTVTERLLLDGPPPHSPETPQFPPTTGAVLYTVKRNQVGPEVRSCPKASPRLQKEREGQKAVSESEALMLVWDASETEKLPGTVEPPASFLSPVSSKTRDAGRRHVSGKPDTQERWLPSSRARVKTRDRTCPVHESPSGIDTSETSPKAPRGGLAKDSGTQAKGPEGEQQPKAAEATVCANNSKVSSTGEKVVLWTREADRVILTMCQEQGAQPQTFNIISQQLGNKTPAEVSHRFRELMQLFHTACEASSEDEDDATSTSNADQLSDHGDLLSEEELDE

SEQ ID NO: 102780 - DNA, 6723 bp, Artificial Sequence
  derived and/or modified sequence
atgctgccctgtaaaaaacgacggactaccgttacagagagcctccagcacaagggtaaccaggaggagaataatgttgacctggaatccgcggtgaagccagagagcgatcaagtgaaggacttaagctccgtcagcttatcatgggatcccagccatggccgtgtggctgggtttgaggtccagagcctccaggatgctggtaaccagctcgggatggaggatacaagcctgagctccggtatgctcacacagaacacaaacgtccccatattggaaggggtcgatgtggccatctcccagggtatcacactcccgagccttgagagttttcatccgctgaacatccatataggcaagggaaagctgcacgccaccggttccaagaggggtaagaagatgacccttaggcctggtcccgtaacccaggaggaccgctgtgatcatcttaccttgaaagagccattctctggtgagcctagcgaggaggttaaggaagagggaggtaagccacagatgaatagcgaaggagagattcccagcctaccttctggctcacagtccgcaaaaccggttagccagcctcggaaaagcactcaacctgacgtgtgcgcgagtcctcaggagaagcctcttcgcaccttattccatcagcctgaggaggagatagaggatggtggcttgttcatccctatggaggaacaggataacgaagagtcagagaaacgccgtaaaaagaaaaaaggcaccaaacggaagagggacggccgtgggcaggaaggcacgttggcctatgatttgaaactcgatgatatgctggaccgaacactggaagatggagctaaacagcacaatttaacagccgtgaatgtgaggaatatactccatgaggtgattacaaacgaacatgtggtggctatgatgaaggcagccatttccgagactgaagatatgcccatgttcgaacccaagatgactagaagcaaactgaaggaggtggtggagaaaggagtcgtcattcctacttggaatatctctcctattaagaaggcaaatgaaatcaagcccccccagttcgtggatatacacctggaagaagatgacagtagcgacgaggagtaccagccagatgacgaggaagaggacgaaacagccgaagaaagcctgcttgagtcggacgtggagtcgaccgctagttccccgagaggcgctaagaagagcaggttaagacagagtagtgagatgaccgagaccgacgaggaaagcggtatccttagcgaagcagaaaaggtgacaactcctgccattcggcatatcagcgcggaggtagtgccaatgggaccgcctccaccccctaaaccaaaacagaccagggactctacctttatggagaaactgcatgccgtggacgaggagctggcatcgagtcctgtatgtatggattctttccagccaatggacgacagtctcattgctttccggacccgatccaagatgcctttgaaggacgtccctctgggccagctcgaggccgagttacaagcgcccgatatcacccccgatatgtatgatcctaacacggcggatgatgaggactggaaaatgtggctgggaggtcttatgaatgatgacgttggcaatgaggacgaagcagatgatgatgatgaccctgaatataacttcctggaggatctagacgaacctgataccgaggacttcaggaccgacagagcagtcaggatcacaaaaaaagaagtcaacgagctcatggaagagctcttcgagacgttccaggacgaaatgggattcagcaatatggaagatgacggccccgaggaagaggagtgcgtcgctgagccacggcccaacttcaatacaccacaggccctgcgatttgaggagcctctggccaatctgttaaatgaacaacatagaactgtgaaggaactgtttgagcagctcaaaatgaaaaagtcctcagctaagcagcttcaagaggtagaaaaagttaagccccagtcagaaaaagtgcaccagactctgatactcgatcccgcacaacgcaaacgtttgcaacaacaaatgcaacagcacgtgcaactgttgacacaaatccatctgctggccacctgtaatcccaaccttaatccagaagcaaccaccacaagaatctttctcaaggaactggggacttttgcccagtccagtatagctcttcaccaccagtacaacccaaagtttcagaccctattccagccatgtaacctgatgggcgcaatgcagctgattgaagacttcagcacccacgtgagcattgactgcagcccccataagacagtgaaaaagaccgcaaacgagttcccttgcttacctaaacaggtggcttggattctggccacctctaaggtattcatgtaccctgagctgctccctgtatgcagtctgaaggccaagaacccccaagacaaaattgttttcacaaaagcggaagacaatctgctggctctggggctaaaacactttgaggggaccgagttcccaaatcccctcatctcaaaataccttctcacttgcaagacagcccatcagctcacagtccgtattaaaaatcttaatatgaatagagcccccgacaatattattaagttctacaagaaaaccaaacagcttccagtgttaggaaaatgctgcgaagagatccaaccacaccagtggaagcctccaattgaaagagaagagcaccgtcttccattctggctgaaagccagtctacccagcattcaagaagagctcaggcatatggcagacggcgccagagaggtgggaaacatgaccggaacaacagaaatcaactccgatcggagtctggagaaggataatctcgaactaggatcagaatctcgatatcccctgcttctcccgaagggagttgtcctgaaactgaagccagtagccactagattcccaaggaaagcctggcggcaaaaacgatccagtgttcttaagcccctcttgattcagccgtctccctctctgcagccaagtttcaacccagggaaaacaccagcacggagcacacactccgaggcccctccgtccaagatggtcctccgtatcccccaccccatccagcctgccacagttctgcagaccgtgcctggagtccccccattgggcgtatccgggggggaatccttcgagtcaccggccgcattgccggctgtacctccagaagcccgtacgtcttttccactgtctgagtcgcagacactgctgagctctgcacccgttccaaaggtgatgctgccatcgcttgctccttcaaagtttcgcaaaccttacgtccgcagaagaccttccaagaggcggggagttaaagcaagcccctgtatgaagcccgctcctgtcatccatcatcctgcttctgtcatctttactgtgcctgcaactacggtcaaaatagtgagtctgggtggaggctgcaacatgatccaacccgtcaatgccgctgtggcccagtcgccccaaaccatcccgattactactttgctggtgaatcccaccagctttccctgtcccctgaatcagtccctggtcgccagcagtgtgagtccactcattgtgtcaggcaactccgtgaatctgcctatccccagcacgcccgaagacaaggcccacgtgaacgtggatattgcttgtgcagtggccgatggggaaaacgcatttcagggcttggaaccaaagcttgagccacaagaactcagtcctctaagtgctacagtatttcctaaagttgagcattctccaggaccccctctggctgatgcagagtgccaggaaggcctgagcgagaattccgcctgtagatggaccgtggtaaaaacggaagagggccgccaagccctggaaccactccctcaaggtatacaggaatccctgaacaacccaacgcccggcgacttagaggaaatcgtaaaaatggagccagaggaggcaagagaggaaatcagcgggtcacctgagcgtgatatctgtgacgatatcaaagttgagcacgctgtcgagctggatacaggcgccccttccgaagagcttagtagtgctggcgaggttacaaaacagaccgtgctccagaaggaggaggaacggtcgcagcccaccaaaactccaagttcctctcaggaacctcccgacgagggcaccagcggcactgatgtgaataaagggtcttcaaaaaacgcactgagcagcatggaccccgaggtccgcttgtcgtcccccccaggcaaaccggaggacagttcatctgtcgacgggcagagtgtgggcacaccagtcggccctgagacagggggcgagaagaacgggcctgaagaagaagaggaggaggatttcgacgacctgacccaggacgaggaggatgaaatgtcaagcgctagcgaggaatctgtgctgtcagtccctgaactacaggaaactatggaaaagcttacctggctcgcctcagaacggcggatgtcccaagagggagagtctgaggaagagaactctcaggaggagaattccgagccagaagaggaagaagaggaagaggctgagggtatggaatccttgcagaaagaagacgaaatgacagatgaagccgtgggcgacagcgcagaaaaacccccaactttcgccagtcccgaaacggccccagaggtagaaacatccaggactccgcccggagagtccattaaggctgccggtaagggacgtaacaatcatagagcgagaaacaagaggggttcacgggcccgtgccagtaaagatacaagtaaacttttgcttctctatgatgaggatatcctggaacgcgaccccctaagagaacagaaagacctggcgttcgcacaggcctacctgacccgcgtgagggaagctctgcagcacatccccggtaaatacgaagacttcttacaggtaatatatgagtttgagtcaagtactcaacgtcgcaccgcggtggacctgtacaagagtctgcagattttattacaagactggccccagctattgaaagatttcgccgccttcctgctgcctgagcaagcccttgcctgcgggctgtttgaagaacagcaggccttcgagaaaagtcgcaaattcctgcggcaactcgaaatttgcttcgccgagaatccaagccaccaccagaagataattaaggtcctgcagggctgcgctgactgtctgcctcaggagattacagaactgaaaacacaaatgtggcaactcctgaagggtcatgaccacctacaggacgaattctccatattttttgatcaccttcgaccagccgcctcccgcatgggagatttcgaagaaataaattggactgaggagaaagaatacgaattcgatggctttgaggaggtggccctgccagacgtcgaagaagaggaggagcctcctaagataccaacagcttccaaaaataaaagaaagaaggagatcggagtacagaatcatgacaaggagactgagtggcctgatggggccaaggactgcgcatgctcctgccacgaagggggccctgattcaaagctgaaaaagtcaaagagaagaagttgctctcattgcagctcgaaggtgtgtgactctaaatcctacaagtcaaaagaacctcacgaactggtcgggagctccccacaccgcgaggcaagcccaatgccgggcgctaaggaggccgggcagggaaaggatatgatggaggaggaagcacccgaagaaagagaatccacagaagcaacccaatcgagaacagtgagaaccacccggaagggggaaatgccagtgtcaggtctggccgtaggaagcacgttaccatccccccgcgaagtgaccgtgactgaacgcttgcttcttgatggcccccctccccatagtcccgaaactccgcagttccctccgaccacaggcgcagttctctacaccgtcaagcgcaaccaggtggggcctgaagttaggagctgtcccaaggcaagccctagactgcaaaaagagcgcgagggtcaaaaagcagttagtgaatcagaggccctgatgctggtgtgggatgccagtgaaactgagaaattaccaggtacagttgagccgcctgcctcattcctttcgcccgtgtcatcgaaaacacgggacgcaggccgcagacatgtatccgggaaaccagatacccaggaaaggtggcttccttccagtcgcgcacgggtgaagaccagagatcgcacctgtcctgtccacgagtccccctccggtattgacacctccgaaaccagtcctaaagctcctcgaggcggcctcgccaaggatagcggcactcaagccaagggacccgagggggagcagcaacccaaggccgcggaggcaactgtttgcgccaacaactcgaaagtcagctcaacaggcgagaaggtcgttttgtggacaagggaagccgatagagtcatccttacaatgtgtcaggaacaaggtgcacagccacagacattcaacatcatcagccagcaactcggaaacaagaccccagccgaagtgagccacaggtttagggagctgatgcagctgtttcatacagcctgcgaagcgtctagtgaggatgaggacgacgcaacaagcacatcaaatgcagaccaactgtccgaccacggtgacctcctgagcgaagaggagctcgatgaatag

SEQ ID NO: 102781 - DNA, 6723 bp, Artificial Sequence
  derived and/or modified sequence
atgctgccttgcaagaaacgtcggacaactgttacagagtcccttcagcataaaggtaatcaggaagagaataatgtggacttagaatctgcagtgaagccagagagtgaccaggtgaaagaccttagttcagtttctctgtcatgggatccttctcacgggagagttgccggtttcgaagtgcagtctctgcaggacgcaggtaatcagttaggcatggaagataccagtctgtccagcggtatgctgactcagaataccaacgtacccattctggaaggagtggacgtggctatcagtcaggggattacactccctagtctggaatcattccaccctcttaacatccatattggaaagggaaagctgcacgcaacgggctccaagcgaggcaagaagatgaccctaaggccagggcctgttacccaggaggacagatgcgaccatctcaccttgaaagaacctttctctggagagccgtccgaggaggtaaaggaggaggggggcaagcctcagatgaactcggagggcgaaattccatcactacccagcggatctcagtctgcgaaaccagtcagtcagcctcggaagtcaacacagcctgacgtctgtgcttcaccccaggagaaaccgctccgtacactcttccaccagcccgaggaggagatcgaggatggtggtctgttcatccctatggaagaacaggataacgaggaatccgaaaaacggaggaaaaaaaaaaagggtacgaaaagaaaacgcgacggacggggccaggagggcaccctcgcgtatgacctgaagctcgatgatatgcttgatcggacccttgaggacggggctaagcagcacaacctaacagccgtaaatgtgcggaacatcctgcatgaggtgatcactaacgagcacgtggtggcaatgatgaaagccgcaataagcgagactgaggacatgccgatgttcgagcctaagatgacacggtcaaagttaaaggaggttgtggagaagggagtcgtgattccaacatggaacattagtcctatcaaaaaggccaatgaaattaagcccccacaatttgtggacatacatctagaagaggacgacagctctgatgaagagtaccagcccgacgatgaagaagaagacgaaacagcagaagagtccctgctagaaagtgacgtagagagcaccgcaagcagccctcggggtgcaaagaaatcaaggctccgacagtcatcagagatgaccgaaactgatgaggagtccggaattctttctgaggcagaaaaagttaccactcctgcaattagacatatctccgcagaggtggtacctatgggcccgccacctcctccaaagccaaaacaaactcgggactccaccttcatggaaaagctgcacgcagtggacgaggaactggcaagtagcccagtgtgcatggactcatttcagcctatggacgacagtctgattgcatttcgtactcgctcaaagatgccgctgaaagatgtccctctgggtcaattggaggctgaactgcaggctccagacatcacacctgacatgtatgacccaaacacggcggacgatgaggactggaagatgtggctcggcggcctcatgaacgatgatgtgggtaacgaggacgaggcagatgacgacgatgatccagagtacaactttctcgaagacctggatgaacccgacaccgaagacttcagaactgatcgcgctgtgaggattaccaagaaagaggtgaatgaactgatggaagaacttttcgaaacttttcaggacgaaatgggttttagcaacatggaggatgatggacctgaagaggaggaatgtgtggcagagcctagaccgaactttaatactcctcaggcactaagattcgaagagccattagctaacctacttaatgaacagcacagaacggtgaaagagctcttcgaacaactcaaaatgaagaagagtagcgccaagcaattacaggaggtcgagaaagttaagcctcagagtgaaaaggttcaccaaacactcattctggatcccgcccaacgtaaacggttacagcagcaaatgcaacagcacgtgcagttactgactcaaatacaccttctggccacctgtaaccctaacctcaaccccgaagcgacaaccacacgtatattcttgaaagagttggggacattcgcccagagttctatagctttacaccaccagtacaacccaaaatttcagactttattccaaccctgcaaccttatgggcgccatgcagttgattgaagatttttctacccacgtgtctatcgactgttctccacataagactgtgaagaaaactgccaatgagttcccctgtcttcccaagcaggtagcatggatcctggcaacttccaaggtcttcatgtacccagagttactgcccgtgtgctccttgaaagccaagaatccgcaggataaaatcgtcttcacaaaggcggaggacaacttgctggcacttggtctgaagcattttgaagggactgaatttcctaaccccttaattagcaaatacttgctgacatgtaagactgctcatcagctgaccgtacgcatcaagaacctgaatatgaatcgagcgcctgataacattatcaaattttacaagaaaactaagcaattacccgtgctgggcaaatgctgcgaagagatacagcctcaccagtggaaacctccaatcgaacgagaggaacatcgacttccattttggctcaaagcttccctgccaagtatccaggaggagcttcgccatatggcagatggggctagggaggttggaaacatgacaggcaccacagaaatcaactccgatcgatccctcgaaaaggacaacctggagctcggaagcgaaagtcgctacccgctcctgcttcctaagggcgtggtgctgaagctgaagccagtggcgacacgctttccccggaaggcttggcgccaaaaaagatcctcagtgttgaaaccattgcttatccaaccttcaccatctttacagcctagtttcaatcccggtaagacccccgctagaagcacccattccgaagcaccccccagcaaaatggtcttgcgcatcccacaccctatacagccagctacggtactacagactgtgcctggagttccccctcttggggtttctggtggcgagtccttcgaaagcccggctgccctacccgccgtaccacctgaggctaggacttcatttccattatctgaaagtcaaaccctgctgagttctgcccccgtgccaaaggtaatgctgcccagcctggcaccttccaaatttcggaagccttatgtgaggagaaggccaagcaaacgcagaggcgtgaaggcctcaccatgcatgaaaccagcccccgtaattcatcatcctgcctcagtgatctttacagtgccagccaccacagtaaaaatcgtgtctcttgggggtggatgcaatatgatacagccggttaatgcggccgtggcgcagagcccacagactatccccatcacaaccttgctggtgaatcccaccagcttcccctgtcctttgaaccagtccttagtggcttcctccgtgagcccgcttattgtgagcgggaactccgtaaaccttcccatcccttccacaccggaagataaggctcacgtaaacgtggacatcgcctgcgctgtcgcagacggcgaaaacgcatttcagggactcgaacctaagctggagccccaggagctcagcccattaagcgccaccgtcttccctaaggtggaacacagccccggtccccctctcgccgatgctgaatgtcaagagggtctcagcgaaaattcggcgtgtaggtggactgtggtcaagacagaagaaggccgccaagctctggagccgctacctcagggtattcaggaatccctgaataaccccacccccggcgatctggaggaaatcgtcaagatggaaccagaagaggcgcgagaggaaatctcaggtagccctgagcgagacatctgcgacgacatcaaagtggagcatgctgtagaattggacacgggtgcacccagtgaggaattatcgagtgccggggaagttaccaagcaaacagtcctccagaaggaagaggagcgaagtcagcccacaaaaaccccctcatcctcccaggagccccctgacgagggaaccagtgggacggatgtgaacaagggttcttctaaaaacgctctgtctagtatggaccccgaggtacggctgtccagccctcccgggaagcccgaagactcttcaagtgtcgacggacaaagcgtgggaaccccagtcggacccgaaacaggcggcgaaaaaaatggcccagaggaggaggaagaagaggactttgatgatttgacgcaagatgaggaggacgagatgagctcggcatcagaggaatcagttctatcagtgccagagcttcaagagaccatggagaagctcacgtggctggcaagcgaacggcggatgagccaggagggagagtccgaagaagagaactcgcaggaggagaacagcgaaccagaggaggaagaggaggaagaggcagaagggatggaatcactacagaaagaagatgagatgaccgatgaagcggtgggtgactccgcggagaaacctccaacctttgctagccccgagactgccccagaggtggagacgtcgagaacccctcccggagaatcaatcaaggccgctggcaaggggaggaacaaccaccgtgctcggaacaaaaggggatcaagggccagggctagtaaggataccagtaaacttctgctgttgtatgacgaagacatcctcgaaagggacccgctgcgggagcagaaagacctggccttcgctcaggcctatctgacaagagtgcgggaagcgctccagcacattccaggaaagtatgaggatttcctacaagtcatctatgagttcgaatcttcaacccagcgtagaaccgccgtagacctctacaaatctttgcaaatccttctacaagactggcctcagttgcttaaagatttcgctgcgttcctgttgccagagcaggctctggcctgtgggctgtttgaggaacagcaggctttcgaaaagtccagaaagtttctccgtcagttagagatttgttttgccgagaaccctagccatcaccagaagatcatcaaagtgctccagggctgcgcggattgcttgccccaggagatcaccgagctgaaaacccagatgtggcagctgcttaagggacatgaccatctccaagatgagttcagcatcttctttgatcacctgcggcccgcggcctctagaatgggggactttgaagagattaattggacagaggagaaggagtacgagtttgacggcttcgaggaagttgccctgccggatgttgaggaggaagaagaaccacctaagattcctaccgcgtccaagaacaagagaaagaaagagattggggttcagaaccacgacaaagagacagaatggccagatggcgctaaggactgcgcatgctcgtgtcacgaaggaggaccagatagtaaacttaagaagtccaagcggcgttcctgttcacattgttcctcaaaagtttgtgatagcaaatcatataagagtaaagaaccgcatgagctggtaggaagttcacctcatcgggaggctagtccaatgcccggggccaaggaggcgggccagggcaaagatatgatggaggaggaggcacctgaggagcgggaatccactgaagccacccaaagtagaaccgtgcggaccactagaaagggagagatgccagtctcagggctggcagtgggcagcacccttcccagcccacgcgaggtgaccgttactgagaggctgctactagacggaccacctccacactctcctgagaccccacagtttccgcccaccacaggcgctgtgttgtacactgtaaaaagaaatcaggtgggacccgaagttcggagctgcccaaaggcaagtccaaggctgcaaaaagaaagagagggacagaaagcagttagcgagagcgaagccctgatgctggtctgggatgcttccgagacagaaaaactgcccggtaccgtagagccccccgcctctttcctttctccagtctcttccaaaacacgggacgctggacggcgacatgttagtgggaagccggacacccaggaaaggtggctgcctagcagccgagctcgtgtcaaaaccagggaccgcacatgcccggtacatgaaagtccaagtggaatagacacctccgaaacaagccccaaggctccgcgcggaggcctggccaaagattccggcacccaggctaaggggcccgaaggcgaacagcagcccaaagccgctgaggctacagtgtgtgctaataattcaaaggtgtcaagtacaggtgagaaggtggtcctctggactcgtgaggccgatagagtgatcctgacaatgtgccaggaacagggggcgcagccccagacattcaacatcatcagccaacagttaggcaacaaaacaccggccgaggtgagtcaccgttttagagaactcatgcagctgtttcatactgcatgcgaggcatcctctgaggacgaagatgacgcaacatcaaccagtaatgccgatcaactttccgaccatggagacctgctcagtgaggaagagctcgacgagtag

SEQ ID NO: 102782 - DNA, 6723 bp, Artificial Sequence
  derived and/or modified sequence
atgctgccctgcaagaagaggaggaccaccgtgacagagagcctgcagcacaagggcaaccaggaggagaacaacgtggacctggagagcgctgtgaagccagagagtgaccaggtgaaggacctgagctctgtgtccctgtcctgggaccccagccacggccgggtggccggctttgaggtgcagagcctgcaggatgctggcaaccagctgggcatggaggacaccagcctgagcagcggcatgctgacccagaacaccaacgtgcccatcctggagggcgtggatgtggccatcagccagggcatcaccctgcccagcctggagagcttccaccccctgaacatccacatcggcaagggcaagctgcacgccaccggcagcaagaggggcaagaagatgaccctgcggcccggccctgtgacccaggaggacagatgtgaccacctgaccctgaaggagcccttctctggagagcccagcgaggaggtgaaggaggagggcggcaagccccagatgaacagcgagggggagatccccagcctgcccagcggcagccagagcgccaagcctgtgtcccagcccaggaagagcacccagccagatgtgtgtgccagcccccaggagaagcccctgcggaccctcttccaccagcctgaggaggagattgaagatggcggcctcttcatccccatggaggagcaggacaatgaggagagcgagaagaggaggaagaagaagaagggcaccaagaggaagagagatggccggggccaggagggcaccctggcctatgacctgaagctggatgacatgctggacaggaccctggaggatggagccaagcagcacaacctgacagctgtgaatgtgaggaacatcctgcacgaggtgatcaccaatgaacatgtggtggccatgatgaaggccgccatcagcgagacagaggacatgcccatgtttgagcccaagatgaccaggagcaagctgaaggaggtggtggagaagggcgtggtgatccccacctggaacatcagccccatcaagaaggccaatgagatcaagccaccccagtttgtggacatccacctggaggaggatgacagcagtgatgaggagtaccagccagatgatgaggaggaggatgaaacagctgaggagagcctgctggagagtgatgtggagagcacagccagcagccccaggggggccaagaagagccggctgcggcagagcagcgagatgacagaaacagatgaggagagcggcatcctgtctgaggccgagaaggtgaccaccccagccatccgccacatctctgctgaggtggtgcccatgggccccccacctccacccaagcccaagcagacccgggacagcaccttcatggagaagctgcatgctgtggatgaggagctggccagcagccctgtgtgcatggacagcttccagcccatggatgacagcctgattgccttccgcaccaggagcaagatgcccctgaaggatgtgcccctgggccagctggaggccgagctgcaggccccagacatcaccccagacatgtatgaccccaacacagcagatgatgaggactggaagatgtggctgggcggcctgatgaatgatgatgtgggcaatgaagatgaagcagatgatgatgatgatcctgagtacaacttcctggaggacctggatgagccagacacagaggacttcagaacagacagagctgtgcgcatcaccaagaaggaggtgaatgagctgatggaggagctgtttgagaccttccaggatgagatgggcttcagcaacatggaggatgatggccctgaggaggaggagtgtgtggccgagccccggcccaacttcaacaccccccaggccctgcgctttgaggagcccctggccaacctgctgaatgagcagcacaggacagtgaaggagctgtttgagcagctgaagatgaagaagagcagcgccaagcagctgcaggaggtggagaaggtgaagccccagagcgagaaggtgcaccagaccctcatcctggaccctgcccagaggaagaggctgcagcagcagatgcagcagcacgtgcagctgctgacccagatccacctgctggccacctgcaaccccaacctgaaccctgaggccaccaccacccgcatcttcctgaaggagctgggcacctttgcccagagcagcatcgccctgcaccaccagtacaaccccaagttccagaccctcttccagccctgcaacctgatgggcgccatgcagctgattgaggacttcagcacccacgtgtccattgactgcagcccccacaagacagtgaagaagacagccaatgagttcccctgcctgcccaagcaggtggcctggatcctggccaccagcaaggtgttcatgtacccagagctgctgcctgtgtgcagcctgaaggccaagaacccccaggacaagatcgtgttcaccaaggccgaggacaacctgctggccctgggcctgaagcactttgagggcacagagttccccaaccccctcatcagcaagtacctgctgacctgcaagacagcccaccagctgactgtgcgcatcaagaacctgaacatgaacagagccccagacaacatcatcaagttctacaagaagaccaagcagctgcctgtgctgggcaagtgctgtgaggagatccagccccaccagtggaagccacccatcgagcgggaggagcaccggctgcccttctggctgaaggccagcctgcccagcatccaggaggagctgcggcacatggctgatggagcccgggaggtgggcaacatgacaggcaccacagagatcaacagcgacaggagcctggagaaggacaacctggagctgggcagcgagagccgctaccccctgctgctgcccaagggcgtggtgctgaagctgaagcctgtggccacccgcttccccaggaaggcctggaggcagaagaggagctctgtgctgaagcccctgctgatccagcccagccccagcctgcagcccagcttcaaccctgggaagaccccagcccggagcacccacagcgaggccccacccagcaagatggtgctgcgcatcccccaccccatccagcctgccaccgtgctgcagacagtgcctggggtgccccccctgggcgtgtctggaggagagagctttgagagccctgctgccctgcctgctgtgcccccagaggcccggaccagcttccccctgtctgagagccagaccctgctgagcagcgcccctgtgcccaaggtgatgctgcccagcctggcccccagcaagttcaggaagccctacgtgagaagaagacccagcaagaggcggggcgtgaaggccagcccctgcatgaagccagcccctgtgatccaccacccagccagcgtcatcttcaccgtgcctgccaccaccgtgaagatcgtgtccctgggcggcggctgcaacatgatccagcctgtgaatgctgctgtggcccagagcccccagaccatccccatcaccaccctgctggtgaaccccaccagcttcccctgccccctgaaccagagcctggtggccagctctgtgagccccctgattgtgtctggcaacagcgtgaacctgcccatccccagcaccccagaggacaaggcccacgtgaatgtggacatcgcctgtgctgtggctgatggagaaaatgccttccagggcctggagcccaagctggagccccaggagctgagccccctgagcgccaccgtcttccccaaggtggagcacagccctggcccccccctggctgatgctgagtgccaggagggcctgtctgagaacagcgcctgccgctggacagtggtgaagacagaggagggccggcaggccctggagcccctgccccagggcatccaggagagcctgaacaaccccacccctggggacctggaggagatcgtgaagatggagcctgaggaggcccgggaggagatcagcggcagccctgagcgggacatctgtgatgacatcaaggtggagcacgctgtggagctggacaccggggcccccagcgaggagctgagcagcgctggggaggtgaccaagcagacagtgctgcagaaggaggaggagaggagccagcccaccaagacccccagcagcagccaggagcccccagatgagggcaccagcggcacagatgtgaacaagggcagcagcaagaatgccctgagctccatggaccctgaggtgcggctgagcagccccccaggcaagccagaggacagcagctctgtggatggccagagcgtgggcacccctgtgggccctgagaccggcggggagaagaatggacctgaggaggaggaggaggaggactttgatgacctgacccaggatgaagaagatgagatgagcagcgccagcgaggagagcgtgctgtctgtgcctgagctgcaggagaccatggagaagctgacctggctggccagcgagaggaggatgagccaggagggggagagcgaggaggagaacagccaggaggagaacagcgagcctgaggaggaggaggaggaggaggccgagggcatggagagcctgcagaaggaggatgagatgacagatgaggccgtgggggacagcgctgagaagccacccacctttgccagccctgagacagcccctgaggtggagaccagcaggaccccacctggagagagcatcaaggccgccggcaagggcaggaacaaccaccgggccaggaacaagaggggcagccgggcccgggccagcaaggacaccagcaagctgctgctgctgtatgatgaggacatcctggagcgggaccccctgcgggagcagaaggacctggcctttgcccaggcctacctgaccagggtgcgggaggccctgcagcacatccctgggaagtatgaggacttcctgcaggtgatctatgaatttgagagcagcacccagaggagaacagctgtggacctgtacaagagcctgcagatcctgctgcaggactggccccagctgctgaaggactttgctgccttcctgctgcctgagcaggccctggcctgtggcctgtttgaggagcagcaggcctttgagaagagcaggaagttcctgcggcagctggagatctgctttgctgagaaccccagccaccaccagaagatcatcaaggtgctgcagggctgtgccgactgcctgccccaggagatcacagagctgaagacccagatgtggcagctgctgaagggccatgaccacctgcaggatgagttcagcatcttctttgaccacctgcggcctgctgccagcaggatgggagactttgaggagatcaactggacagaggagaaggagtatgaatttgatggctttgaggaggtggccctgcctgatgtggaggaggaggaggagccccccaagatccccacagccagcaagaacaagaggaagaaggagattggagtgcagaaccacgacaaggagacagagtggccagatggagccaaggactgtgcctgcagctgccatgaaggaggccctgacagcaagctgaagaagagcaagaggaggagctgcagccactgcagcagcaaggtgtgtgacagcaagagctacaagagcaaggagccccatgagctggtgggcagcagcccccaccgggaggccagccccatgcctggggccaaggaggccggccagggcaaggacatgatggaggaggaggcccctgaggagcgggagagcacagaggccacccagagcaggacagtgaggaccaccaggaaaggagagatgcctgtgtctggcctggccgtgggcagcaccctgcccagcccccgggaggtgacagtgacagagcggctgctgctggatggccccccaccccacagccctgagaccccccagtttcctcccaccaccggggctgtgctgtacacagtgaagaggaaccaggtgggccctgaggtgcgcagctgccccaaggccagcccccggctgcagaaggagcgggagggccagaaggctgtgtctgagagcgaggccctgatgctggtgtgggatgccagcgagacagagaagctgcccggcaccgtggagcccccagccagcttcctgagccctgtgagcagcaagaccagagatgctggaagaagacatgtgtctgggaagccagacacccaggagcgctggctgcccagcagccgggcccgggtgaagacccgggacaggacctgccctgtgcatgagagccccagcggcatcgacaccagcgagaccagccccaaggccccccggggcggcctggccaaggacagcggcacccaggccaagggccctgagggggagcagcagcccaaggctgctgaggccaccgtgtgtgccaacaacagcaaggtgagcagcactggagagaaggtggtgctgtggacccgggaggccgacagagtcatcctgaccatgtgccaggagcagggcgcccagccccagaccttcaacatcatcagccagcagctgggcaacaagaccccagctgaggtgagccaccgcttccgggagctgatgcagctgttccacacagcctgtgaggccagcagtgaagatgaagatgatgccaccagcaccagcaatgctgaccagctgagtgaccatggagacctgctgtctgaggaggagctggatgaatag

SEQ ID NO: 102783 - DNA, 6723 bp, Artificial Sequence
  derived and/or modified sequence
atgctgccctgcaagaagcggcggaccaccgtgaccgagagcctgcagcataagggcaaccaggaggaaaataacgtagatctagagagcgctgtgaagccagagtcagaccaggtcaaggatctcagctctgtgtctctttcctgggatccatcacatggcagggtcgctggttttgaagtgcagagtttgcaggatgctggaaatcagctcggcatggaagacacctcactgagctcaggtatgctgacccaaaatacaaacgtcccaattctcgaaggggttgacgtcgccatttcccaggggatcacactcccgagcctggaaagcttccacccactcaatatccacatcggcaaaggcaagttgcacgcaacgggctctaaaagaggaaagaaaatgacgctgcggccagggccagtgacccaggaggataggtgtgaccacttgactcttaaggaacctttttcaggggagccgagtgaggaggtgaaagaagagggtggcaagcctcagatgaatagtgagggggagattccctccctaccatctggttctcagtcagccaaaccagtctcccagccacgcaaatcaacacagcctgatgtatgcgcctctcctcaggaaaagcccctcaggaccctcttccaccagcctgaagaagagatcgaagacggcggattatttatccccatggaggagcaggacaatgaagagtctgagaagagaagaaaaaaaaagaagggtacaaaacgcaaacgggatggtcgggggcaggaaggcactctcgcctatgatctcaagctcgacgatatgttggatcgaacgctggaggacggggcaaaacagcacaacctcaccgccgttaatgtccggaacattctgcatgaggtcattacaaatgagcacgtagtggccatgatgaaggcggcgatatcggaaacggaagacatgcctatgttcgagcctaagatgacccggagcaaactgaaggaggtggtcgagaaaggagtggttatccctacctggaatatcagtccaatcaagaaagctaatgagattaaaccccctcagtttgtcgacattcacctcgaagaagacgactcatccgatgaagagtatcaacctgacgacgaagaagaggacgaaacagccgaagagagcctgctggaatctgatgtggaatctactgcatccagcccccgaggggctaagaagtcgcgcttgaggcagtccagtgaaatgacagaaactgacgaagaaagcggcattttgtctgaggccgagaaagtcaccactcccgctatcagacacataagcgctgaggtagtgcctatgggacctcccccgccaccaaagcccaagcagacccgcgattccaccttcatggagaagctacatgcagtggacgaggaactcgctagctccccagtttgtatggacagcttccaaccaatggacgattccctgattgctttccggacacgctcaaaaatgcccttgaaggacgtgccactgggccagttggaggcagaactgcaggccccggatattacaccggatatgtatgacccaaatacagccgacgacgaagactggaagatgtggttaggaggactgatgaatgatgatgtgggaaacgaggacgaggcggacgacgatgatgatcccgagtataattttctggaggacctggatgagcccgacaccgaagattttcggaccgacagagcggtcagaattactaagaaggaagtaaatgagttgatggaggagctgttcgagacattccaagatgaaatgggcttcagtaatatggaggatgacggtcctgaagaggaagagtgcgtggccgagccacgccctaattttaacacgccccaagccttaagattcgaggagcctctcgcaaacctgctgaacgaacagcaccgcacagtgaaagagttgttcgaacagctgaaaatgaaaaagtcctcagcaaagcaattgcaggaggtcgaaaaagtgaagcctcagtcagaaaaagtgcaccagaccctcattcttgaccccgcacagaggaaacggttgcaacagcagatgcagcagcacgtccaactactaacgcagatccatcttctggccacatgcaatccaaatctgaaccctgaggcaacaacaacccgcatcttcttgaaagagctggggacgtttgcacagagctctatcgcgttacaccatcagtataacccaaaatttcagaccctgttccagccatgtaatctgatgggggcaatgcaactgatagaagacttctccacgcatgtgtccatcgattgctctcctcacaagaccgtgaagaagaccgccaacgaatttccttgtctgcccaagcaagtcgcatggatcctggccacttcaaaagtgttcatgtatcccgagctgctgccagtgtgttccttgaaggcgaagaaccctcaggacaagatcgtgtttaccaaggctgaggacaatcttctggctctcggtctgaaacatttcgagggtactgaatttcccaacccattgatcagtaagtacctgctgacatgcaaaacggctcatcagctgactgtccgaatcaaaaatttaaatatgaacagagctcccgataatatcatcaagttctacaagaaaaccaaacagttacctgtcttaggaaaatgctgcgaggaaattcaaccacatcagtggaaaccgccgatcgagagagaagagcatcggctgcctttttggcttaaagcaagtctgccatcaatccaggaagagcttcgacatatggcagacggtgccagggaggtaggcaacatgaccgggacaaccgagataaattcggatcgatctttggagaaagacaatctggagctaggcagtgagtcgcgctaccccctgctacttcctaaaggtgtggtactcaagttgaaacccgtagcgaccagatttccgagaaaggcctggagacaaaaacgctcaagtgtccttaagccgctgctaatccagccgagcccgtctctccaaccaagtttcaaccccggaaagactcctgcacggagtacccacagtgaggctcccccaagtaagatggttttaagaattccccacccaatacagccagctactgttcttcagacagtgccaggtgtgccaccactgggggtgtcgggaggggaatccttcgagagtcctgcagcccttcctgccgtgccccctgaggccagaaccagcttcccgctgtctgagtctcagactctgctgtcctcagctccagtgcccaaggtcatgctaccgtcccttgcgccatccaagtttcgaaaaccttacgtgcggcgcaggccgagcaagcgacgcggcgtgaaagcaagcccgtgcatgaagcccgctcctgtcatacaccaccccgcctcggtcatctttacagtgccagccactacagtgaaaattgtatcacttggaggcggctgcaatatgatccagccggttaacgccgccgtcgcacaatcacctcagaccattccaatcacaaccttgctcgttaatcctactagcttcccttgcccccttaatcaatctcttgtcgcttcttccgtttcgcccttgattgtgagcgggaactccgtgaatttaccaattcctagcactcccgaggacaaggcgcacgtgaatgtcgacatcgcttgtgccgtagccgatggagaaaatgccttccagggcctggaacccaaactggagccgcaagagctcagccctttaagtgctacggtctttcccaaagtggagcatagtcccggcccccccctggctgatgctgagtgccaggagggtctcagcgaaaatagtgcttgcaggtggacggtcgtgaagacagaagaaggaagacaggcgctggaaccactcccacaggggattcaggagagcctgaacaatccaacccctggagatctagaggaaatcgtgaagatggaacccgaggaagctcgagaagaaatctcaggctcccctgagcgcgatatctgcgatgacattaaggtcgagcatgccgtagagctggatactggagcaccttcagaggagctgtcatccgcaggcgaggttaccaagcagactgtgctccagaaggaagaggaacgatcccagccaacgaaaacgccatccagctcccaggaacctcccgacgagggtacaagcggcaccgacgtgaataaggggagtagcaagaatgccctttcctctatggatccagaggtcagactgtcctcccccccaggtaaaccagaagactcctctagtgttgatgggcaatctgtgggaacgcccgtcggacccgagaccgggggtgaaaagaatggcccagaagaggaggaggaggaggattttgacgacctgactcaggatgaggaggatgagatgtcctctgcctccgaggagagtgtactatctgtgcccgagctgcaggaaaccatggaaaagctgacttggctggcgtctgagcgtaggatgtctcaagagggggagagcgaggaggaaaactcacaggaggagaactccgagccggaagaggaggaggaggaagaggccgagggaatggaaagtcttcagaaggaggacgaaatgacagacgaggccgtgggcgactccgccgagaagccacctacatttgcttctcctgagaccgcccccgaggtggagacctctagaacaccacctggggagtctataaaggcagcgggaaagggccgcaataaccatagggcacgtaacaagagaggaagcagagcacgcgcctcgaaggatacctctaagctgctgttactttacgatgaggacatattggaacgggacccattgagagagcaaaaagacttggcgtttgctcaagcctacctgacgcgagtgagagaagcgctgcaacacatccctggaaagtacgaagattttctgcaggtgatttatgagttcgagtccagcacccaacgacggaccgccgttgacctctataaatccttgcagatcctgttgcaggactggcctcagctcttaaaagacttcgcagcatttctattaccagagcaggctcttgcttgtggtttgttcgaggagcagcaggcgtttgagaaaagtcgtaagttcctccgccaactggaaatctgcttcgcggagaatccttcccaccatcagaagataataaaggtgctgcaggggtgcgcggactgtctgccacaggaaattaccgagctgaagacccagatgtggcagctactgaagggacacgatcatctgcaggatgagtttagtatcttctttgaccatctcagaccagccgcaagtagaatgggggacttcgaagagatcaattggaccgaggaaaaggagtatgaattcgacggtttcgaggaggtggctctgcctgatgtagaagaggaagaggagcctcccaagataccaaccgcctctaagaataagcggaagaaagagataggtgtgcagaaccacgataaggagaccgagtggcctgatggggccaaagattgcgcatgctcctgtcatgagggggggcctgattccaagctcaagaagagtaagcggagaagctgcagtcactgcagtagcaaggtttgtgattccaaatcctataagagtaaggagccccatgagctggtgggctcatctccccaccgagaagcctcaccgatgcccggagccaaggaggctgggcagggaaaggatatgatggaggaagaggctcccgaagaacgggaatcaacagaggcgacccagtctcgtactgtcagaactacgagaaagggcgagatgcccgtgtcgggattggcggttggtagcacactgccctcacctcgggaggttacagtgaccgaacgtctcctgctcgacggacccccgcctcactccccggagaccccacagtttccccccacgaccggcgcggttttgtacacggttaagcggaatcaagtgggccccgaggtgcgcagttgtccaaaggcttccccccgactccaaaaagagagggagggtcaaaaagctgttagtgaaagcgaagccttgatgctggtttgggatgccagcgaaacagaaaagctgcccggcacagtcgagccaccagcttcattcctaagccctgtgagctctaaaacgcgggatgccggccgccgccacgtgagtgggaaacccgatactcaggagagatggttaccatcttccagagcccgtgttaagacccgagataggacttgccctgttcacgagtcaccttctggcattgatacaagcgagacatcaccaaaagcccctcggggagggctggcgaaggatagcgggacgcaggccaaagggcccgagggcgaacaacaacccaaagccgcagaggccaccgtgtgcgccaataattcaaaagtgagtagcacaggtgaaaaagtcgtcttatggacacgcgaggccgatcgcgtgatcttgactatgtgccaggagcaaggggcccagccacagacattcaatatcatttctcagcaattggggaacaagactccggccgaggtgagtcatagatttcgggagcttatgcagcttttccacactgcctgcgaggcttctagtgaagacgaggacgatgcaacctctacaagtaatgcagatcagctgtccgaccacggtgacctcctgtccgaagaagaactggacgaatag

SEQ ID NO: 102784 - DNA, 6723 bp, Artificial Sequence
  derived and/or modified sequence
atgctgccctgcaagaagcggcggaccaccgtgaccgagagcctgcagcataagggtaatcaggaggaaaacaatgtggacttagagtccgccgtcaagccagaatcagatcaggtgaaggacctgtcttccgtgagtctaagctgggaccccagccacggccgggtcgcagggtttgaagtgcagtctctgcaggatgccggcaatcagttgggtatggaagacacgagcctgtcctcaggaatgcttactcagaacaccaatgtgcctatcctcgagggtgtcgacgttgctatctcccaaggaatcaccctgccctctttagagtccttccatcccctgaacattcacataggaaaaggcaagctgcacgcaactggttccaaacggggaaaaaagatgacactgcgacctggtcctgttactcaggaggatcgctgtgatcatctcaccctgaaagaacccttttcaggggaaccttctgaggaagtgaaagaagagggaggaaagccgcagatgaattcagaaggggaaataccatcccttcctagcggcagccagtccgcaaagcccgtttcccagcccagaaagagcactcagcccgatgtgtgcgcctcaccccaggagaagccactgagaacgctgttccaccaacccgaagaggagatcgaagatggaggcctctttataccgatggaagaacaggacaacgaggagtcagagaagcgcagaaaaaagaagaaggggacaaagcgcaaaagggatggaaggggacaggagggtaccctggcgtacgacctgaaactcgacgatatgcttgacaggaccttagaggacggggcaaaacagcacaatctgaccgccgtgaatgtgcggaacatcctgcatgaggtcataaccaacgaacacgtggtcgcaatgatgaaagccgccattagcgaaaccgaggacatgcccatgttcgagcctaaaatgactagatccaagctgaaggaagtggtggaaaaaggtgtggtgatccccacctggaacatctcaccaatcaaaaaggccaatgagatcaaaccgccccagttcgtcgacattcacctcgaggaggatgactcttctgacgaggaatatcagccagacgacgaggaagaagacgagaccgccgaagagtcccttctggagtcagacgttgaaagtacagcatcatctcctaggggtgccaagaagtcccgcctgcggcagtcatccgaaatgaccgaaaccgatgaggaatctggaattctgtcagaggcggaaaaggtgactaccccggcgatccgtcacataagcgctgaggtagtgcctatgggcccaccccctccacccaaacccaagcagacacgtgactccaccttcatggagaagctgcatgccgttgatgaggaacttgccagttctcccgtgtgcatggatagttttcaacccatggacgactccctcattgcgtttagaactcgatccaagatgcccctgaaggacgtgcccttgggccagttagaagccgagttacaagccccagatatcacacctgatatgtacgatcctaacaccgccgacgacgaggactggaagatgtggctaggaggactcatgaacgacgatgttggaaatgaagatgaggctgatgatgacgatgatcccgagtataattttcttgaggaccttgatgagccagacactgaagacttccgcactgacagggctgttcgcataacaaaaaaagaggtgaatgagctaatggaagagttattcgagacctttcaagatgagatggggttttccaacatggaggacgatgggccagaagaagaggaatgcgtggctgagccaagaccaaactttaacactcctcaagctctgcgattcgaagagcctcttgccaacctgctgaacgaacaacaccgtactgttaaggagctgtttgagcagctgaagatgaagaagtcgtcagcgaaacagctgcaggaggtggaaaaggtcaagcctcaaagtgagaaggttcaccaaaccctaattctggaccctgctcagcgtaaacgccttcaacaacagatgcagcagcacgtgcagctgctgacacagatacacctgcttgctacttgtaaccccaacctgaatccagaggcaactacaactaggatctttctcaaagagctgggcacgtttgcccagtctagtatcgccctgcaccaccagtacaaccccaagttccagacactcttccagccgtgcaatctgatgggagctatgcaattaatagaagatttctctacccacgtgagtattgactgcagccctcataagaccgttaaaaagacagccaatgaattcccatgcctgcccaagcaggtggcttggattctggctacctcaaaggtgtttatgtacccagaacttctacccgtatgtagtcttaaggcgaagaacccacaggataagatcgtctttaccaaagccgaagataacctcctcgccctgggcttgaagcatttcgaagggacagaatttccaaatcctctgataagcaaatatctcctcacttgtaagactgcccaccagctaactgtgcgaattaagaatttaaatatgaaccgggccccagataatattatcaagttctacaagaagacaaaacagctgcctgtcctgggcaagtgctgcgaggaaatccaaccccaccagtggaaaccacccattgaaagggaggagcaccgtttgcctttttggctgaaggctagccttccctctatccaagaagagctgcgccatatggctgatggcgcccgtgaagtgggcaacatgacaggaacgaccgaaataaacagtgatcggagcttagagaaagataacctcgaactgggatccgaatcaaggtaccccttgttgcttcccaagggggtggtcctgaagctgaaacccgtggcaaccaggttccctcggaaagcatggcgccagaagcgaagctctgtgttgaagcctcttctgatccagcccagtccatctttacagccaagtttcaaccctgggaaaacgcctgcacgctccacacatagtgaagccccaccaagtaagatggtcttgaggatacctcaccccattcagcctgctactgtgttgcagaccgtaccaggagtgcctccgttgggagtatcagggggcgagtccttcgaatcacctgctgcacttcctgctgtgcctcctgaggcgcgcacctcttttccactgtccgagtctcagaccttattatcatccgcccctgtgcccaaagtgatgttaccgagtctcgcgccaagcaagttcagaaagccttatgtgaggagacgtccgtctaaacgtagaggagtgaaagcttcaccttgtatgaagcccgcacccgtgattcaccaccccgcttcagtcatatttaccgtccccgccactaccgtcaagatcgtgtctctcggtggggggtgcaatatgattcagcccgtgaacgctgccgtggcacagtcaccacagaccattcctataacaactctccttgttaatcctacgagctttccctgccccctgaatcagtcactggtggcctccagtgtaagccccctgatcgtgtctgggaactccgtgaacctgcctatcccctcgacccccgaggacaaggctcatgtaaatgtggatatcgcgtgcgctgtcgccgacggggagaatgcgtttcaggggttggagcctaagttggagcctcaagagctctctcccctgtccgccaccgtgtttcccaaagtggagcattcccctggcccacctctcgccgatgccgaatgccaggaaggcctctccgaaaatagtgcctgccggtggaccgtggtaaaaaccgaggagggtagacaggcacttgagcccctgccacaaggcattcaggagagtctgaataaccctacccccggtgacttggaggagattgtaaaaatggagcccgaggaagcccgcgaagaaattagcggttcacccgaacgggatatttgcgacgacattaaagtggaacatgccgtggagctggacactggagccccctccgaggaactatcgtcggccggagaggtgaccaaacagacggtgctgcagaaagaagaggaaaggtcacagcccaccaagaccccttccagcagccaagagccaccagatgaaggcaccagcggcaccgatgttaacaaggggagctccaagaacgccctgagctccatggaccccgaagtcagactgtcttccccccccggtaaacccgaggacagctccagcgtggatggacagagtgtagggacccctgtaggacctgaaactgggggggaaaaaaacggtccagaagaagaagaggaggaggattttgatgacctgacacaggacgaggaggacgaaatgagctcagccagcgaggagtccgtgctgtcagtgcccgagctccaggagacgatggaaaagctcacatggttggcaagcgagcggagaatgtctcaggaaggcgaatcagaggaggaaaattctcaagaggagaattctgagccagaagaagaagaggaagaggaagcagagggtatggaatctctgcagaaagaggacgaaatgacagacgaggcggtgggcgattctgccgagaagccacccaccttcgctagcccagagacagcccctgaggtagagacgtccagaactcctcccggcgagagtataaaggcagccggcaagggcagaaataatcaccgcgcccggaacaaacggggatcccgggcccgggcttccaaggatacctcaaaactgcttcttttatacgatgaggacatcctggaacgggatcctctgcgggaacaaaaagatcttgcatttgcccaggcctatctcacacgcgtgagggaagctctgcaacatattccagggaagtatgaggattttctacaagtcatctacgagttcgagagctcgacccagagacggactgcagtcgacctgtataagagcctgcagatcctgctgcaggactggcctcagctgctgaaagattttgctgccttcctcctccctgaacaagccttagcttgtgggctgttcgaggagcaacaggcatttgaaaaaagcagaaagtttctccgccaactggagatttgtttcgctgaaaatcccagtcatcaccagaagatcataaaggtccttcaggggtgcgccgattgccttccccaggaaattacagagctcaagacccagatgtggcaactccttaagggacacgatcacctgcaagacgagttcagcatctttttcgaccacctgcgccctgccgcctcaaggatgggcgatttcgaggaaataaattggacagaggaaaaggaatatgagtttgacgggttcgaggaggtcgctcttcctgatgtcgaagaggaggaggagccgccaaagattccaactgcttcaaagaacaagcgtaagaaagagataggggtgcagaatcacgataaagagaccgagtggcctgatggcgctaaagattgcgcttgtagctgccatgagggaggacctgacagcaaactgaaaaagtccaaaagacgcagctgcagccactgtagtagcaaggtctgtgattcaaagtcatataagtccaaagagcctcacgaactcgtgggctcatcccctcaccgcgaagcgagtcccatgccgggagccaaggaggccgggcagggtaaggacatgatggaggaggaggctcccgaagagcgcgaatctactgaagccacgcaatctcgcaccgtccgcaccaccagaaagggggagatgcctgtgtccggacttgccgtgggctctaccttacctagccctagagaggtgaccgttacagagaggcttctgttggatgggcccccgcctcatagccctgagaccccacagtttcccccgaccacaggcgcagtgctttatactgttaagcgaaaccaagtgggacccgaggtgcgcagctgtcctaaggcctcaccaagactgcagaaagaacgtgaaggacagaaggcagtcagcgagtccgaagcattgatgctggtgtgggacgcgtcagaaactgaaaaacttcctggaactgtggaaccacccgcctcctttttgtcaccagtaagctccaaaacacgagacgctggcagaagacatgtcagcggaaaacccgatactcaggaaagatggctcccttcaagcagagccagagtgaaaaccagagacaggacttgccctgtgcatgagtcaccctccgggatcgatacgagtgagactagccccaaggcaccgcgcgggggactggcgaaggacagcgggacacaagcaaaaggcccagagggtgagcagcagccaaaagccgcagaggccaccgtgtgcgccaacaatagcaaagtgtccagtaccggcgagaaagtagtgttgtggacccgagaagccgacagggtgatcctcaccatgtgtcaggagcaaggcgcccagccccaaacctttaacatcatcagccagcagttgggcaataaaaccccggccgaggtatcccatcgcttccgcgaattaatgcagctgtttcatacagcatgtgaggcgagctcagaggatgaagatgatgcaactagtacttctaacgccgatcaactgagcgatcatggagacctgctatctgaagaggaattggatgagtag

SEQ ID NO: 102785 - DNA, 6723 bp, Artificial Sequence
  derived and/or modified sequence
atgttaccttgtaagaaaagaagaacaacagtgacggagagccttcaacacaaaggaaatcaggaagagaacaacgtagatctggaatctgccgtgaaacccgagagcgatcaggttaaggatctaagtagcgtttctctgtcttgggatccatcccacggcagggtcgcaggatttgaagtgcagtccttgcaggatgccggtaaccagctaggcatggaggatacttccttgagctccggaatgctcactcaaaacaccaatgtgcccattcttgaaggagtggatgtggccattagtcagggaataaccctcccctctctcgaatcttttcaccccctcaatatccacatcggcaaaggcaagttgcatgcaaccggaagcaaaaggggaaagaagatgaccctgcgccctgggcctgtgacccaggaagaccggtgcgatcaccttacactgaaggagccattctctggcgagccaagcgaagaagtgaaagaagaggggggaaagccacagatgaacagtgagggtgagatcccatcactgcctagtggctcccagtccgccaaacctgtgtcccagcccaggaagagcacccagcctgacgtctgtgcttccccacaggaaaagccgctgcgcacactgttccaccagcccgaggaggagattgaggacggtgggctcttcatccccatggaggagcaagataatgaggaatctgagaagcgaagaaaaaagaagaaaggcacaaagagaaagcgcgatgggagagggcaagaagggacattagcctatgatttgaagcttgatgatatgctggataggaccctggaagatggggctaagcagcataatttaactgctgtgaacgtcagaaatatactacatgaggttataaccaacgaacacgtagtggccatgatgaaggccgcaatttctgagacagaagatatgcccatgttcgaacccaaaatgacccgctctaaactgaaagaggtggtggagaagggcgttgtcatccccacatggaacatttctcccatcaagaaggccaatgagataaaaccccctcagtttgtggatatccacctagaggaggacgattctagtgacgaggaataccaacctgacgatgaggaagaggacgagactgctgaggaaagcctgctcgaatcagatgtggaatccactgcctccagccccagaggggctaaaaagtcacggctccgtcagtcaagtgagatgacagaaactgatgaggagtcaggcatactatcagaagccgagaaagtcaccaccccagctattcggcacatttcggccgaagtggtcccaatgggtcccccacctccacctaaacctaagcaaactcgggattctacgttcatggaaaagctccatgcagtggacgaggagcttgcttcttcacccgtgtgtatggattcttttcagcccatggatgactcactgatcgcattccgaacacgctccaagatgccactgaaagatgtgcccctgggccagctggaggccgaactccaggctccagatatcacacccgacatgtatgatcccaacacagccgatgacgaggactggaagatgtggctaggtggcctgatgaatgatgatgttggcaatgaggatgaagccgacgatgacgacgatcctgaatacaactttttagaagaccttgatgagccagacaccgaggactttaggaccgaccgggctgttaggattaccaagaaggaggtaaacgagctcatggaggagctctttgaaacattccaggacgagatggggttttccaacatggaggatgatggccctgaggaagaggagtgtgtggctgagccccgtcctaatttcaacaccccccaggctctgaggttcgaagaaccgctcgcgaacttattgaatgagcagcaccgcacggtgaaggaactctttgagcaactgaagatgaagaagagttctgcaaaacagctgcaggaggtggaaaaagtgaagccccagtccgagaaagtgcaccagactctgatcctggacccggcacaacgcaagagactgcagcagcagatgcagcagcacgtacagttgttgacccaaatacacctactggcaacatgtaatcctaacctcaatccggaagccactaccacccgaatattcctcaaggagctcgggacgtttgcccagtcatccatagcactccatcaccagtacaatccaaagttccaaacactcttccagccttgtaacctaatgggagccatgcagctgattgaagatttcagcacacatgtttccattgactgcagcccccacaaaaccgtgaagaagactgccaatgagttcccatgcctccccaaacaggtggcatggatcctcgccacctcgaaagtatttatgtacccagaattattacctgtgtgctcacttaaggccaagaatccccaggataagatcgttttcactaaagccgaagacaatctcctcgcactgggtctcaaacacttcgaagggactgagtttccaaaccctttaatctcaaagtatctcttgacctgtaagactgcgcatcagcttactgtgcggattaagaatcttaatatgaatcgggctcccgacaatataattaagttttacaaaaagacaaaacaactgccagtgcttgggaagtgctgcgaggaaattcagccccatcaatggaagccgccaattgagcgggaggaacatcggttacctttctggctcaaagcctccctgcccagcatacaggaggaactccgacacatggccgacggagcacgtgaggtcggtaatatgaccgggaccaccgaaataaactctgacagatctctcgaaaaagacaacctggagctgggctctgaaagcagatacccactcctgctgcccaagggggtggttcttaagttaaagcccgtcgccacaaggttcccacgcaaggcctggagacagaaaaggagctctgtactgaaacctctactcatccagccatctccatctctgcagccctcctttaatcctggaaaaacaccagctcgaagcacacacagcgaggcgccaccctcgaagatggttcttcgtattcctcatcccattcaacctgccaccgtgttacaaaccgtcccaggagtgcccccacttggggtcagcggcggagagtcctttgaatctcctgccgcacttcctgccgttccacccgaggctaggactagtttccctctgagcgagtcccaaacactgctgagcagcgcccctgtgccaaaagtaatgcttccgtccttggccccaagtaagttccggaagccctacgtgcgaagaagacccagcaaacgccgaggggtgaaggccagcccttgcatgaaacccgctcccgtgattcatcacccagcgtcggtgatatttactgtgccagctaccacagtcaagatcgtcagtctgggaggtggctgcaacatgatccagcctgtgaatgccgcagtggctcagagccctcagactattccgattacaactttactggttaacccaacaagctttccctgtcccctgaaccagagcctcgtggctagttccgtctcacctctcatcgtgagtggcaactcagtgaatctccccataccatctacccctgaagacaaggcgcacgtgaacgtggacatcgcttgtgcagtggctgacggcgaaaatgccttccaggggctggaacccaaactggagcctcaggagctttcccctctaagtgccactgtcttccccaaggtggagcacagccccggtcccccattggccgatgccgagtgtcaagaggggctctccgaaaacagtgcctgccgatggaccgtggtgaagacagaagaggggcgacaggcgctcgagcccctgccacagggaatccaggaatctctgaataatcccaccccaggcgatttagaggagattgtgaaaatggagcctgaggaggcccgagaagagatctcaggctctccagagagggacatctgcgatgatatcaaggtcgagcatgcagtggagcttgataccggggctccaagcgaggagttgtcaagcgcaggggaagtgacaaaacagacggtgttacagaaagaggaagagcgttcccagccaactaaaacaccgtcaagctcccaggagcctccagacgaagggactagcggaactgatgtcaataagggcagttcaaaaaacgctctttcaagtatggaccccgaggtgcgcctttcctccccacccggtaagccagaagattcatctagcgttgacggccaatccgtggggacacccgtggggcctgagacaggtggggagaagaacgggcctgaagaagaagaggaggaagattttgacgatctaacacaggatgaggaagatgaaatgagttccgcatcggaggagagcgtgttatccgttcccgaactacaggagactatggagaagctgacctggctggcatctgaacggcgaatgagccaggaaggggagtcagaagaggaaaattcccaagaggaaaattccgaaccggaggaggaggaggaagaagaggctgaaggcatggaatcactgcagaaagaggacgaaatgacggacgaagcagttggggattcggcggaaaaaccccctacattcgccagtccagaaaccgccccagaggttgaaactagtcgcacgccacccggtgaatcgattaaggccgctggcaagggcagaaataaccatagagccaggaacaagcggggttctcgggcacgcgcaagtaaggacacatctaaacttctgctgctatatgatgaagacattctggaacgggatccactacgggaacagaaagatctggccttcgcccaggcttacctgacccgggttagagaggcactgcaacacattcccggaaaatacgaagacttcctccaggtgatttacgagttcgagtcaagcacccagagacgcaccgcggtggatctttataagagcctgcagatcctgcttcaggattggccccaattgttgaaagacttcgctgcgtttcttttgccagaacaggctctcgcttgcggtctgtttgaggaacaacaggcatttgagaaatcacgaaagttcctccggcaactcgagatttgtttcgctgagaacccctcgcatcatcagaaaatcatcaaggtcctgcaggggtgtgccgattgtctcccccaagagatcactgagttgaaaacacagatgtggcagctgttaaaaggacatgatcacctgcaggacgagttttccatttttttcgaccacttacgccctgcagcttcccggatgggagatttcgaagaaatcaattggaccgaggaaaaggagtatgagtttgacggcttcgaggaagtagcgctgcccgatgtagaagaggaggaagaaccccctaaaatccctacagccagtaagaacaagagaaagaaagaaattggcgtgcaaaatcacgacaaggagacagagtggccggatggcgctaaggactgcgcctgctcatgtcacgaggggggacccgattccaaattgaagaagtccaagcgccgaagctgcagtcactgttcttctaaagtctgcgactctaagtcatataagtctaaagagccacacgaactcgttggatccagccctcaccgcgaagcctcccccatgcctggtgctaaagaggcgggtcagggaaaggacatgatggaagaagaggcacccgaggagcgagaaagtactgaggccacccagtcacggacagtcaggacaaccaggaaaggggaaatgccagtgagtggcctggctgtcggaagcaccctcccctcccccagagaagtgaccgtgaccgaaaggctgcttctggacggtcccccaccccattctcctgagaccccacagtttccacctaccacaggtgccgtcctgtatactgtgaagcggaaccaggtcgggccagaggtaaggtcatgccccaaagcatctccaagactgcaaaaggagcgggaaggacagaaggctgtgtccgagagtgaagctttgatgttagtgtgggatgcgagtgagacagaaaagctgcccggaactgtcgaacccccagcttcgttcctcagcccagtgtcttccaaaacgcgggacgccggacggaggcatgtttccgggaaacccgatacccaggaaaggtggttgcctagttcccgagccagggtgaaaaccagagatcgcacatgtcctgtacatgaatctccaagtggaattgataccagcgaaacgagccctaaagcccctcgtgggggtctggctaaggactctggaacccaagcaaaaggcccagagggagagcagcagcctaaggccgcagaggcaaccgtttgtgccaacaatagtaaagtgtctagcacaggggaaaaagttgttctgtggacgagagaagccgatcgtgtgatcctcacaatgtgccaggagcaaggtgcccagcctcagacgtttaacattatttcacagcagctcggtaataagacacctgcggaagtcagccaccgcttccgggaactgatgcagctgtttcataccgcttgtgaggcctcctctgaagacgaggatgacgctacaagtacgtcaaacgcggatcagctttcagaccatggagaccttctgtccgaggaagagctggacgaatat

SEQ ID NO: 102786 - DNA, 6722 bp, Artificial Sequence
  derived and/or modified sequence
atgctgccctgtaaaaaaagaagaacaacagtcactgagagtctccaacataagggtaatcaggaagaaaacaatgtcgatctagagagcgccgttaagcccgaatcagaccaggtgaaagatctgagcagtgtgtcattatcttgggaccctagtcatggcagagttgccggtttcgaagtgcagtccctccaagatgccggaaatcagctgggtatggaggacacctcattgtctagcggtatgttaacccagaacactaatgtaccgattttggaaggtgtcgatgtcgctatttctcagggcatcacactgccttccctcgagtctttccaccctctcaatatccacatcggcaaggggaagctgcatgcgaccggttccaagcgaggtaagaagatgactctgcgcccaggtcccgtgactcaggaggatcggtgtgaccacctgactctaaaggagccattttctggagaacccagcgaagaggtcaaagaggagggtggcaagccccaaatgaatagcgagggggaaataccctccctcccgagcggtagtcagagcgctaaaccagtcagccaacctcggaagagcacccaaccggacgtgtgcgcatcaccacaagagaagcctctacgcactcttttccaccagcccgaggaagagattgaggatggcggactgttcatccccatggaggagcaggacaatgaagaatctgagaaacgtcggaaaaaaaaaaagggaaccaagaggaagagagatggaagaggacaagagggcactctagcatacgacctgaagctggatgatatgctggatcggaccctggaagatggagccaaacagcacaatcttaccgccgtaaacgtgaggaatatattgcatgaggtgattaccaacgaacacgttgttgcaatgatgaaagcagccatcagcgagactgaggacatgcccatgtttgagcccaagatgacgcgatctaagctaaaggaagtggtggagaaaggagtagtcatacccacctggaatatttctccgatcaaaaaggcgaacgagatcaaacctcctcagttcgtggacatccatttagaggaagacgacagctcagacgaagagtatcaacccgacgatgaggaggaagacgaaaccgcagaagagtcactgctcgagtccgatgtcgaaagcacagcgtccagtccacggggagcaaaaaaaagtcgtttgaggcagtcctcagaaatgacagaaactgacgaggaatccggtatactgagcgaagcggagaaagtgaccacaccagccatacgccatattagcgccgaggtcgtgcccatggggccacctcccccacctaagccaaagcaaacacgggactctactttcatggagaaacttcatgccgttgacgaggaactggccagctcacccgtgtgcatggatagctttcagccaatggacgattctcttattgctttccgtactaggtctaaaatgccgctaaaagacgtccctctgggtcagctagaggctgaattgcaggccccagacattacacccgatatgtacgatcctaacaccgcagacgacgaagattggaagatgtggcttggaggcctgatgaacgacgatgtgggaaatgaggacgaagctgatgacgacgatgatcccgagtacaattttctcgaggacctcgatgaacctgatacagaggacttccgcacagaccgcgcagtgcgtatcacaaaaaaggaagtcaatgaactgatggaggagttgttcgagacctttcaggatgaaatgggattttcaaatatggaggatgacggtcctgaggaagaagaatgtgtcgcagagccgaggccgaacttcaatacaccacaagccctcagattcgaggaacccttggcgaacctgcttaacgagcagcaccggacggtaaaggagctgtttgagcagttgaagatgaaaaagtccagcgcaaaacaacttcaggaagtggagaaagttaaaccacagtccgaaaaggtgcaccagacacttattcttgatcctgcacagagaaaacgcctccagcagcaaatgcagcaacatgttcagctgctaactcagattcatttgctggctacttgcaatcccaatctcaatcctgaggccaccactacacggatttttctcaaagaactcggaaccttcgcacagtcttctatcgccctccatcatcaatacaaccccaagttccaaacgctgtttcaaccttgcaacctgatgggcgctatgcagctaatcgaagatttcagcacccacgtgagcatcgattgctctccacataaaaccgtaaagaaaaccgctaacgagttcccctgtctgcccaagcaagtggcgtggattctggctacttccaaagttttcatgtatccagaacttttgcccgtttgttcccttaaggctaaaaatccccaggataaaatagtgttcacaaaggcagaggacaatttactggctttgggcctcaagcactttgaggggaccgaatttcctaatcctctgatcagtaaatatctgctcacctgtaaaacagcccaccagctcaccgtaagaatcaaaaacctcaatatgaaccgggcaccggacaacatcattaagttctataagaaaacaaagcagttaccagtactggggaagtgttgcgaggagattcagccccatcagtggaagccccctattgagcgggaggagcaccgtctccctttctggctgaaggcaagcctcccgagcattcaagaagagctgaggcatatggccgacggcgcacgagaggtcggaaatatgaccggcacaaccgagattaactccgaccggtcgcttgaaaaagataatctggaacttggatccgagagtcgatatccactcctactccctaaaggggttgtgctaaaactgaagccagtagccacacgatttccccgtaaagcatggcgtcagaagagatcttctgttctgaaacctctactaatccagcccagccctagcttgcagccctcttttaacccaggcaagacacccgctcggtctactcatagcgaggcacccccaagtaaaatggtcttgcgcatcccacatccaattcaacctgccacggtcctgcagacagtgcccggagttccacctcttggggtgagcgggggtgagtctttcgaatcccccgctgcactccccgcagtgcctccggaggctaggactagtttccccttatccgaatctcaaacactgctgtcgagtgcaccagtgcctaaggttatgttacccagcctggcaccttcgaagtttaggaagccatacgtgcggagaaggccttcaaagagacgcggtgtaaaggcatctccctgtatgaagcccgctccagtgatccatcatcctgctagcgtaatctttactgtgcctgccaccaccgtgaaaatagtgtcccttgggggtggttgtaacatgatccagcctgtcaatgcagcggttgcccaaagccctcaaactatccctatcacaactctgctggtcaatccgacatctttcccatgtccactgaaccagtctctggtggcttcgagtgtgtctcccctgatagttagtggtaattccgtcaatctgccaatcccgagcactcccgaggacaaagctcatgttaatgtggatatcgcttgtgccgtagcagacggagagaacgcctttcaaggattggaacctaaactcgaaccccaggaacttagccccttatccgcaacagtcttccctaaggtggagcactcccccggaccgccactggccgatgctgaatgtcaagagggactgtcagagaattccgcctgccggtggacagtcgttaaaacagaagagggcagacaggcactagaaccacttccgcagggtatccaggagagcttgaataatcctacgcccggagatttagaggagattgtaaaaatggaacccgaggaggctcgagaggagatatcggggtcgcccgagagagatatatgcgatgacatcaaggtagagcacgcagtcgaacttgacacaggagccccatccgaggaactcagcagcgccggtgaagttaccaagcagacggtgctgcagaaggaagaagaacgaagtcagcctaccaagacgcctagctctagtcaggagccgcctgacgagggcacctcaggaacggacgtgaacaaaggcagttcaaaaaacgctctgtcatcgatggaccctgaggtgaggctgagctctcccccaggaaaacctgaggacagctcttccgtggatgggcagtcagtcggcacgcccgtgggacctgagacggggggtgagaaaaacggacctgaagaagaggaggaggaggattttgacgacctgacacaggatgaagaggacgagatgtcttccgcctctgaggagtctgtgctgtccgtgcctgaactgcaggagactatggagaaactaacctggctggcatccgaacgacgcatgagccaggagggcgagagcgaggaagagaatagccaggaggagaattcagagccagaggaggaggaggaggaagaggcagagggcatggagagtttgcagaaggaggatgagatgacagacgaagcggttggggacagtgcagaaaaacccccaacgttcgccagccccgagacggctccagaggttgagacgagccggaccccgcctggagaatccataaaggccgctgggaagggcagaaataatcatcgtgcaaggaacaaaagaggttcaagagcacgggctagtaaagacacatccaagttgctgcttttgtacgatgaagatattctggagcgggatccgctcagggagcagaaggaccttgcattcgctcaagcatacctcacccgggttagggaagccctccaacacatccctgggaagtatgaggatttcttacaggtgatttacgagttcgagagctcaacacagcgccgtaccgccgtagacttgtataaaagtctgcagattttgctccaagattggccgcagttactgaaagatttcgccgcatttttactccccgaacaagcactggcgtgtggactgttcgaggaacagcaggcatttgagaagagtagaaaattcctgaggcagttggaaatctgcttcgctgagaatccaagccaccaccagaagattattaaagtactgcaggggtgcgccgattgcctgccacaggaaattaccgagctcaagacacagatgtggcagctgctgaaaggccatgaccatcttcaggacgaatttagcatctttttcgaccaccttaggcccgcagcgtctcgaatgggggattttgaggaaatcaattggacggaagagaaagagtatgagtttgacggcttcgaggaggtcgctctgcccgatgtcgaggaagaagaagagcccccaaagatacccacagcaagcaaaaataagagaaaaaaagaaattggcgtccagaatcatgacaaagagacagagtggcctgacggtgcgaaggactgcgcatgctcttgtcacgagggaggacctgattccaagctcaagaagtctaagcgtagatcctgcagtcattgttcaagcaaagtatgcgactccaaaagctacaagagtaaagaaccacatgagctcgtgggcagctctccgcacagagaggcaagtcctatgccaggcgctaaagaggccggtcagggcaaggacatgatggaggaggaggcccctgaagagagagagtctaccgaggctacccagagccggaccgtacgcactacacgcaagggcgagatgccagttagcggactagccgtaggtagtaccctgccatctccacgggaggtgactgtgacagaaagacttctgctggacggacccccacctcatagcccggaaactccacaattcccacccactaccggtgccgtgctgtatactgtgaaacgaaatcaagtaggcccagaggtaaggtcttgccctaaagcctcccccagattacaaaaggagagagaaggccagaaggccgtttcagagtctgaggctctgatgctggtgtgggacgcctccgaaacagagaaactacctggcactgttgagccacccgcatcgtttttgtcccccgtctcaagcaagactcgcgatgctgggaggagacacgtgagtggcaagccagatactcaggaacggtggcttccatcctcccgggcacgcgtcaagacccgtgacagaacctgccccgttcacgagagcccttccggcatagacactagcgagacttctcctaaggccccaagaggagggctcgcgaaggattccggaacacaggccaagggaccagaaggggagcagcaaccaaaagcagccgaagcgacagtctgtgccaataatagtaaagtctctagtacaggggaaaaagtggtactatggactagagaggccgatagggtgatacttaccatgtgtcaagagcagggagctcagccacagacgttcaatatcatttctcaacaactgggaaacaagacaccggcagaggtgtctcataggttccgtgagctcatgcagctgttccatacggcgtgtgaggcaagtagcgaggatgaggacgatgccacctcgacatcgaatgccgaccagctgtccgatcacggggacctcttgagcgaagaggaactggatgaata

SEQ ID NO: 102787 - DNA, 7138 bp, Artificial Sequence
  derived and/or modified sequence
tggcgcatagtgttaggcgcatgctccttgatgcactgcggcgcggcgctccgaggctcggggacgcgcacgcaattcgctgttgttggctgacttccggtggtgccaaagccgtttccgtggaatcaggccggctgaatggaacaaaagtgggacttttaaaatgttgccctgtaagaagagaagaactacagtgacagagtccctacagcataaaggcaatcaagaggaaaacaacgtagacctagaatcagccgttaaaccagaatctgaccaggttaaggacttgagttcggtgtcactatcctgggatccaagtcatggcagagtagctggcttcgaagtacagtctttgcaggatgcaggaaatcagcttggtatggaggatacatctctgagctctggaatgctcacccagaacacaaatgtaccaattctagaaggtgttgatgtggccatctctcagggaatcaccctaccttccttggagtcttttcacccccttaatatacacattggtaaaggaaaactccacgctactggctcaaagagagggaaaaaaatgacactcaggcctgggccagttacccaagaagacagatgtgatcatcttaccctaaaggagcctttttcaggagagcctagtgaagaagtcaaggaagaaggagggaaacctcaaatgaattctgaaggggagataccttccctgccatcaggcagccaatctgcaaaaccagtaagccagcccaggaaatcaacccagccagatgtttgtgcctctcctcaagaaaagccactcaggactctgtttcaccaacctgaggaagagatagaagatggtggactcttcattccaatggaagaacaagacaatgaagaaagtgagaaaaggagaaaaaagaaaaagggtaccaagaggaaacgagatggaaggggtcaagaagggaccttggcatatgacctgaaactggatgacatgcttgaccgtaccttggaggatggtgccaagcagcacaatctaacagcagtcaatgtccgaaacatccttcatgaagtaatcacaaatgaacacgtggtagctatgatgaaagcagccatcagtgagacggaagatatgccaatgtttgagcctaaaatgacacgctctaaactgaaggaagtagtggaaaaaggagtggtaattccaacatggaatatttcaccaattaagaaggccaatgaaattaagcctcctcagtttgtggatatccaccttgaagaagatgattcctcagatgaagaataccagccggatgatgaagaagaagatgaaactgctgaagagagcttattggaaagtgatgttgaaagcactgcttcatctccacgtggggcaaagaaatccagattgaggcagtcttctgagatgactgaaacagatgaggagagtggcatattatcagaggctgagaaagtcaccacaccagccatcaggcacatcagtgctgaggtagtgcccatggggcccccgccccctccaaagccgaaacagaccagagatagtactttcatggagaagttacatgcggtagatgaggagctggcttccagtccagtctgcatggattctttccagcccatggatgacagtctcattgcatttcgaacgcgttctaagatgcccctgaaagatgttcccctgggccaattagaggcagagctccaagctccagacatcactccagatatgtatgaccccaatacggcagatgatgaggactggaagatgtggctggggggacttatgaatgatgatgtggggaatgaagatgaagcagatgatgatgatgatccagaatataatttcctggaagacctcgatgaaccagacacagaggatttccggactgaccgggcagtgagaatcaccaaaaaggaagtaaatgagctgatggaagagctgtttgaaactttccaagatgagatgggattctccaacatggaagatgatggcccagaagaggaggagtgtgtagctgagcctcgtcctaactttaacacccctcaagctctacggtttgaggaaccactggccaacctgttaaatgaacaacatcggacagtgaaggagctatttgaacagctgaagatgaagaaatcttcagccaaacagctgcaggaagtagagaaggttaaaccccagagtgagaaagttcatcagactctgattctggacccagcacagaggaagagactccagcagcagatgcagcagcacgttcagctcttgacccaaatccaccttcttgccacctgcaaccccaacctcaatccggaggccactaccaccaggatatttcttaaagagctgggaacctttgctcaaagctccatcgcccttcaccatcagtacaaccccaagtttcagaccctgttccaaccctgtaacttgatgggagctatgcagctgattgaagacttcagcacacatgtcagcattgactgcagccctcataaaactgtcaagaagactgcgaatgaatttccctgtttgccaaagcaagtggcttggattctggccacaagcaaggttttcatgtatccagagttacttccagtgtgttccctgaaggcaaagaatccccaggataagatcgtcttcaccaaggctgaggacaatttgttagctttaggactgaagcattttgaaggaactgagtttcctaatcctctaatcagcaagtaccttctaacctgcaaaactgcccaccaactgacagtgagaatcaagaacctcaacatgaacagagctcctgacaacatcattaaattttataagaagaccaaacagctgccagtcctaggaaaatgctgtgaagagatccagccacatcagtggaagccacctatagagagagaagaacaccggctcccattctggttaaaggccagtctgccatccatccaggaagaactgcggcacatggctgatggtgctagagaggtaggaaatatgactggaaccactgagatcaactcagatcgaagcctagaaaaagacaatttggagttggggagtgaatctcggtacccactgctattgcctaagggtgtagtcctgaaactgaagccagttgccacccgtttccccaggaaggcttggagacagaagcgttcatcagtcctgaagcccctccttatccaacccagcccctctctccagcccagcttcaaccctgggaaaacaccagcccgatcaactcattcagaagcccctccgagcaaaatggtgctccggattcctcacccaatacagccagccactgttttacagacagttccaggtgtccctccactgggggtcagtggaggtgagagttttgagtctcctgcagcactgcctgctgtgccccctgaggccaggacaagcttccctctgtctgagtcccagactttgctctcttctgcccctgtgcccaaggtaatgctgccctcccttgccccttctaagtttcgaaagccatatgtgagacggagaccctcaaagagaagaggagtcaaggcctctccctgtatgaaacctgcccctgttatccaccaccctgcatctgttatcttcactgttcctgctaccactgtgaagattgtgagccttggcggtggctgtaacatgatccagcctgtcaatgcggctgtggcccagagtccccagactattcccatcactaccctcttggttaaccctacttccttcccctgtccattgaaccagtcccttgtggcctcctctgtctcacccttaattgtttctggcaattctgtgaatcttcctataccatccacccctgaagataaggcccacgtgaatgtggacattgcttgtgctgtggctgatggggaaaatgcctttcagggcctagaacccaaattagagccccaggaactatctcctctctctgctactgttttcccgaaagtggaacatagcccagggcctccactagcagatgcagagtgccaagaaggattgtcagagaatagtgcctgtcgctggaccgttgtgaaaacagaggaggggaggcaagctctggagccgctccctcagggcatccaggagtctctaaacaaccctacccctggggatttagaggaaattgtcaagatggaacctgaagaagctagagaggaaatcagtggatcccctgagcgtgatatttgtgatgacatcaaagtggaacatgctgtggaattggacactggtgccccaagcgaggagttgagcagtgctggagaagtaacgaaacagacagtcttacagaaggaagaggagaggagtcagccaactaaaaccccttcatcttctcaagagccccctgatgaaggaacctcagggacagatgtgaacaaaggatcatcaaagaatgctttgtcctcaatggatcctgaagtgaggcttagtagccccccagggaagccagaagattcatccagtgttgatggtcagtcagtggggactccagttgggccagaaactggaggagagaagaatgggccagaagaagaggaagaagaggactttgatgacctcacccaagatgaggaagatgaaatgtcatcagcttctgaggaatctgtgctttctgtcccagaactccaggaaacaatggagaaactgacttggctggcatctgaaaggcgcatgagtcaggagggtgagtctgaagaagagaattctcaggaggagaactctgagccagaagaagaggaggaagaagaagcagaaggaatggaaagcctgcagaaagaggatgaaatgacggatgaagcagttggagactctgctgagaagcctcctacttttgcttcacctgagactgctccagaagtggagaccagcagaactccaccaggagagagcatcaaagctgctggaaaaggccggaacaatcatcgagctcgcaacaagcggggaagtcgggctcgggccagcaaggacacctccaagctgctgttgctgtatgatgaggacattctcgagcgagatccactcagggagcagaaggacttggcctttgcccaagcttatctgaccagggtgcgagaagccctacaacatatccctggcaagtatgaagacttccttcaagtcatctatgaatttgagtcaagtacccagagacggacggctgtagatctctacaaaagcctgcaaattctgctccaagactggcctcagctgttgaaagactttgctgctttcctgttacctgagcaagctctggcctgtggattatttgaggagcagcaggcttttgagaagagccgcaagttccttcggcagctggagatttgctttgcagagaacccctcacaccaccagaagattatcaaggtcctccaaggctgtgcagactgccttccccaggagatcaccgagctcaagacacagatgtggcagctcctcaagggccacgaccacctgcaggatgagttttctatcttctttgaccacttgcgcccagcagctagccggatgggtgactttgaagagatcaattggactgaggaaaaggagtatgagtttgatggctttgaagaagtggccctgcctgatgtggaagaagaggaggagcctcccaagatacccacagcctcaaagaacaagaggaaaaaagagatcggggtccaaaatcatgataaggagactgaatggccagatggggccaaggactgtgcctgctcctgccatgaaggaggtccagattccaagctgaagaagagcaaaaggcggagctgtagccactgtagcagcaaggtctgtgacagcaaatcctacaagagcaaggagccccatgagttggtgggcagcagcccccaccgagaggctagtcctatgcctggtgctaaggaagctgggcagggcaaggatatgatggaagaggaagccccagaggagcgggagagcactgaggccacccagagcaggactgtcaggaccaccagaaagggagagatgcctgtttcaggattggcagtggggagcactttgccatcccctcgagaagtgactgttacagaacggctcctcctggatggcccaccacctcattcaccagagactcctcaatttccccccacaactggagctgtactgtacactgttaagagaaaccaggttgggcctgaggttcgctcctgccccaaggcatcccccagacttcagaaagagagggagggccaaaaggcagtgagtgagtcagaggctttgatgctggtctgggatgcatcagaaactgagaaattgcctggtaccgtggaaccccctgcttccttcctgagtcctgtttcctcaaagaccagagatgcagggagaagacatgtgtccgggaaaccagacactcaagagagatggctgccctcaagcagagctcgggtgaagacaagagacaggacgtgccctgtccatgaatctccatcaggaattgacacctcagagacttctcccaaagcccctagagggggtttggctaaagacagtggaacacaggccaagggtccagagggggagcagcagccaaaggccgcagaagctacggtgtgtgccaacaacagcaaggtcagctccactggggaaaaggttgtcctgtggacaagggaagctgaccgtgtgatcctcaccatgtgccaggagcaaggggcacagccacagaccttcaacatcatctcccagcagctgggaaataagacccctgctgaggtttcccaccgttttcgagaactcatgcagctcttccacactgcctgtgaagccagctctgaggatgaggatgatgcaaccagtaccagcaatgcagaccagctgtctgaccatggggaccttctgtctgaagaggagctggatgaatgagactctgggaatcatctacacaggaccaaacccaacaggcgccctggcaccggggagggggtagttgtactctgcttgtacagtccttgagcccagtttacagatctggagagcaggaggccaggacaaggacaaaggctggaggatggagtaggacccaggggctctgccatcctaggcatcattcaaggtcttttatgaagactttacagatgtcctctgtaaatagcatcgagagtggagttcagctcc

SEQ ID NO: 102788 - DNA, 7713 bp, Artificial Sequence
  derived and/or modified sequence
ctctcccggaggggactcctcccaccgccgagttttcccgagaatgaggccgcgcccactgacgcgctgtggttccaaaacgagaaagtactgaaggaatggaacaaaagtgggacttttaaaatgttgccctgtaagaagagaagaactacagtgacagagtccctacagcataaaggcaatcaagaggaaaacaacgtagacctagaatcagccgttaaaccagaatctgaccaggttaaggacttgagttcggtgtcactatcctgggatccaagtcatggcagagtagctggcttcgaagtacagtctttgcaggatgcaggaaatcagcttggtatggaggatacatctctgagctctggaatgctcacccagaacacaaatgtaccaattctagaaggtgttgatgtggccatctctcagggaatcaccctaccttccttggagtcttttcacccccttaatatacacattggtaaaggaaaactccacgctactggctcaaagagagggaaaaaaatgacactcaggcctgggccagttacccaagaagacagatgtgatcatcttaccctaaaggagcctttttcaggagagcctagtgaagaagtcaaggaagaaggagggaaacctcaaatgaattctgaaggggagataccttccctgccatcaggcagccaatctgcaaaaccagtaagccagcccaggaaatcaacccagccagatgtttgtgcctctcctcaagaaaagccactcaggactctgtttcaccaacctgaggaagagatagaagatggtggactcttcattccaatggaagaacaagacaatgaagaaagtgagaaaaggagaaaaaagaaaaagggtaccaagaggaaacgagatggaaggggtcaagaagggaccttggcatatgacctgaaactggatgacatgcttgaccgtaccttggaggatggtgccaagcagcacaatctaacagcagtcaatgtccgaaacatccttcatgaagtaatcacaaatgaacacgtggtagctatgatgaaagcagccatcagtgagacggaagatatgccaatgtttgagcctaaaatgacacgctctaaactgaaggaagtagtggaaaaaggagtggtaattccaacatggaatatttcaccaattaagaaggccaatgaaattaagcctcctcagtttgtggatatccaccttgaagaagatgattcctcagatgaagaataccagccggatgatgaagaagaagatgaaactgctgaagagagcttattggaaagtgatgttgaaagcactgcttcatctccacgtggggcaaagaaatccagattgaggcagtcttctgagatgactgaaacagatgaggagagtggcatattatcagaggctgagaaagtcaccacaccagccatcaggcacatcagtgctgaggtagtgcccatggggcccccgccccctccaaagccgaaacagaccagagatagtactttcatggagaagttacatgcggtagatgaggagctggcttccagtccagtctgcatggattctttccagcccatggatgacagtctcattgcatttcgaacgcgttctaagatgcccctgaaagatgttcccctgggccaattagaggcagagctccaagctccagacatcactccagatatgtatgaccccaatacggcagatgatgaggactggaagatgtggctggggggacttatgaatgatgatgtggggaatgaagatgaagcagatgatgatgatgatccagaatataatttcctggaagacctcgatgaaccagacacagaggatttccggactgaccgggcagtgagaatcaccaaaaaggaagtaaatgagctgatggaagagctgtttgaaactttccaagatgagatgggattctccaacatggaagatgatggcccagaagaggaggagtgtgtagctgagcctcgtcctaactttaacacccctcaagctctacggtttgaggaaccactggccaacctgttaaatgaacaacatcggacagtgaaggagctatttgaacagctgaagatgaagaaatcttcagccaaacagctgcaggaagtagagaaggttaaaccccagagtgagaaagttcatcagactctgattctggacccagcacagaggaagagactccagcagcagatgcagcagcacgttcagctcttgacccaaatccaccttcttgccacctgcaaccccaacctcaatccggaggccactaccaccaggatatttcttaaagagctgggaacctttgctcaaagctccatcgcccttcaccatcagtacaaccccaagtttcagaccctgttccaaccctgtaacttgatgggagctatgcagctgattgaagacttcagcacacatgtcagcattgactgcagccctcataaaactgtcaagaagactgcgaatgaatttccctgtttgccaaagcaagtggcttggattctggccacaagcaaggttttcatgtatccagagttacttccagtgtgttccctgaaggcaaagaatccccaggataagatcgtcttcaccaaggctgaggacaatttgttagctttaggactgaagcattttgaaggaactgagtttcctaatcctctaatcagcaagtaccttctaacctgcaaaactgcccaccaactgacagtgagaatcaagaacctcaacatgaacagagctcctgacaacatcattaaattttataagaagaccaaacagctgccagtcctaggaaaatgctgtgaagagatccagccacatcagtggaagccacctatagagagagaagaacaccggctcccattctggttaaaggccagtctgccatccatccaggaagaactgcggcacatggctgatggtgctagagaggtaggaaatatgactggaaccactgagatcaactcagatcgaagcctagaaaaagacaatttggagttggggagtgaatctcggtacccactgctattgcctaagggtgtagtcctgaaactgaagccagttgccacccgtttccccaggaaggcttggagacagaagcgttcatcagtcctgaagcccctccttatccaacccagcccctctctccagcccagcttcaaccctgggaaaacaccagcccgatcaactcattcagaagcccctccgagcaaaatggtgctccggattcctcacccaatacagccagccactgttttacagacagttccaggtgtccctccactgggggtcagtggaggtgagagttttgagtctcctgcagcactgcctgctgtgccccctgaggccaggacaagcttccctctgtctgagtcccagactttgctctcttctgcccctgtgcccaaggtaatgctgccctcccttgccccttctaagtttcgaaagccatatgtgagacggagaccctcaaagagaagaggagtcaaggcctctccctgtatgaaacctgcccctgttatccaccaccctgcatctgttatcttcactgttcctgctaccactgtgaagattgtgagccttggcggtggctgtaacatgatccagcctgtcaatgcggctgtggcccagagtccccagactattcccatcactaccctcttggttaaccctacttccttcccctgtccattgaaccagtcccttgtggcctcctctgtctcacccttaattgtttctggcaattctgtgaatcttcctataccatccacccctgaagataaggcccacgtgaatgtggacattgcttgtgctgtggctgatggggaaaatgcctttcagggcctagaacccaaattagagccccaggaactatctcctctctctgctactgttttcccgaaagtggaacatagcccagggcctccactagcagatgcagagtgccaagaaggattgtcagagaatagtgcctgtcgctggaccgttgtgaaaacagaggaggggaggcaagctctggagccgctccctcagggcatccaggagtctctaaacaaccctacccctggggatttagaggaaattgtcaagatggaacctgaagaagctagagaggaaatcagtggatcccctgagcgtgatatttgtgatgacatcaaagtggaacatgctgtggaattggacactggtgccccaagcgaggagttgagcagtgctggagaagtaacgaaacagacagtcttacagaaggaagaggagaggagtcagccaactaaaaccccttcatcttctcaagagccccctgatgaaggaacctcagggacagatgtgaacaaaggatcatcaaagaatgctttgtcctcaatggatcctgaagtgaggcttagtagccccccagggaagccagaagattcatccagtgttgatggtcagtcagtggggactccagttgggccagaaactggaggagagaagaatgggccagaagaagaggaagaagaggactttgatgacctcacccaagatgaggaagatgaaatgtcatcagcttctgaggaatctgtgctttctgtcccagaactccaggaaacaatggagaaactgacttggctggcatctgaaaggcgcatgagtcaggagggtgagtctgaagaagagaattctcaggaggagaactctgagccagaagaagaggaggaagaagaagcagaaggaatggaaagcctgcagaaagaggatgaaatgacggatgaagcagttggagactctgctgagaagcctcctacttttgcttcacctgagactgctccagaagtggagaccagcagaactccaccaggagagagcatcaaagctgctggaaaaggccggaacaatcatcgagctcgcaacaagcggggaagtcgggctcgggccagcaaggacacctccaagctgctgttgctgtatgatgaggacattctcgagcgagatccactcagggagcagaaggacttggcctttgcccaagcttatctgaccagggtgcgagaagccctacaacatatccctggcaagtatgaagacttccttcaagtcatctatgaatttgagtcaagtacccagagacggacggctgtagatctctacaaaagcctgcaaattctgctccaagactggcctcagctgttgaaagactttgctgctttcctgttacctgagcaagctctggcctgtggattatttgaggagcagcaggcttttgagaagagccgcaagttccttcggcagctggagatttgctttgcagagaacccctcacaccaccagaagattatcaaggtcctccaaggctgtgcagactgccttccccaggagatcaccgagctcaagacacagatgtggcagctcctcaagggccacgaccacctgcaggatgagttttctatcttctttgaccacttgcgcccagcagctagccggatgggtgactttgaagagatcaattggactgaggaaaaggagtatgagtttgatggctttgaagaagtggccctgcctgatgtggaagaagaggaggagcctcccaagatacccacagcctcaaagaacaagaggaaaaaagagatcggggtccaaaatcatgataaggagactgaatggccagatggggccaaggactgtgcctgctcctgccatgaaggaggtccagattccaagctgaagaagagcaaaaggcggagctgtagccactgtagcagcaaggtctgtgacagcaaatcctacaagagcaaggagccccatgagttggtgggcagcagcccccaccgagaggctagtcctatgcctggtgctaaggaagctgggcagggcaaggatatgatggaagaggaagccccagaggagcgggagagcactgaggccacccagagcaggactgtcaggaccaccagaaagggagagatgcctgtttcaggattggcagtggggagcactttgccatcccctcgagaagtgactgttacagaacggctcctcctggatggcccaccacctcattcaccagagactcctcaatttccccccacaactggagctgtactgtacactgttaagagaaaccaggttgggcctgaggttcgctcctgccccaaggcatcccccagacttcagaaagagagggagggccaaaaggcagtgagtgagtcagaggctttgatgctggtctgggatgcatcagaaactgagaaattgcctggtaccgtggaaccccctgcttccttcctgagtcctgtttcctcaaagaccagagatgcagggagaagacatgtgtccgggaaaccagacactcaagagagatggctgccctcaagcagagctcgggtgaagacaagagacaggacgtgccctgtccatgaatctccatcaggaattgacacctcagagacttctcccaaagcccctagagggggtttggctaaagacagtggaacacaggccaagggtccagagggggagcagcagccaaaggccgcagaagctacggtgtgtgccaacaacagcaaggtcagctccactggggaaaaggttgtcctgtggacaagggaagctgaccgtgtgatcctcaccatgtgccaggagcaaggggcacagccacagaccttcaacatcatctcccagcagctgggaaataagacccctgctgaggtttcccaccgttttcgagaactcatgcagctcttccacactgcctgtgaagccagctctgaggatgaggatgatgcaaccagtaccagcaatgcagaccagctgtctgaccatggggaccttctgtctgaagaggagctggatgaatgagactctgggaatcatctacacaggaccaaacccaacaggcgccctggcaccggggagggggtagttgtactctgcttgtacagtccttgagcccagtttacagatctggagagcaggaggccaggacaaggacaaaggctggaggatggagtaggacccaggggctctgccatcctaggcatcattcaaggtcttttatgaagactttacagatgtcctctgtaaatagcatcgagagtggagttcagctcctttctctacttttttttggtctgatggcacatatttattgttctgtggtctaatcacagtgtttctaaatgtaaaaagtgcatatgttggtgtagctagtcccgcgacattgagctcctctgcatgaagacactgggctcctgcatccagctgtttttattgcaaactagctcctttctcccacactgggaactttagtccacgaggctgtcaccaccctggtagcactgggccaggctttgtagctcctgcagcagctctgctacgtcatcgtgctccactccagcatccatgaagctggcccagcgccgcaagtcgagtttggtgaggtctctggccaaggcttccagggtctggtgcagggacgaagaggaacacagtgccccaaacactgggatgctctccactgctgtggagggagaggaaacagagacctgtagatggatgattattctgccctgggactcgccaaactgataaggaagtccaaccttagtagacttgattgtaaactcaacaaatttggtgtattgtccccttagtacaccagtactccagaggaagaatgcttttcttgggagccatagggtgaataaaggaatgtttaactgtgga

SEQ ID NO: 102789 - DNA, 6723 bp, Artificial Sequence
  derived and/or modified sequence
atgctgccctgcaagaagagaagaaccaccgtgaccgagagcctgcagcacaagggcaaccaggaggagaacaacgtggacctggagagcgccgtgaagcccgagagcgaccaggtgaaggacctgagcagcgtgagcctgagctgggaccccagccacggcagagtggccggcttcgaggtgcagagcctgcaggacgccggcaaccagctgggcatggaggacaccagcctgagcagcggcatgctgacccagaacaccaacgtgcccatcctggagggcgtggacgtggccatcagccagggcatcaccctgcccagcctggagagcttccaccccctgaacatccacatcggcaagggcaagctgcacgccaccggcagcaagagaggcaagaagatgaccctgagacccggccccgtgacccaggaggacagatgcgaccacctgaccctgaaggagcccttcagcggcgagcccagcgaggaggtgaaggaggagggcggcaagccccagatgaacagcgagggcgagatccccagcctgcccagcggcagccagagcgccaagcccgtgagccagcccagaaagagcacccagcccgacgtgtgcgccagcccccaggagaagcccctgagaaccctgttccaccagcccgaggaggagatcgaggacggcggcctgttcatccccatggaggagcaggacaacgaggagagcgagaagagaagaaagaagaagaagggcaccaagagaaagagagacggcagaggccaggagggcaccctggcctacgacctgaagctggacgacatgctggacagaaccctggaggacggcgccaagcagcacaacctgaccgccgtgaacgtgagaaacatcctgcacgaggtgatcaccaacgagcacgtggtggccatgatgaaggccgccatcagcgagaccgaggacatgcccatgttcgagcccaagatgaccagaagcaagctgaaggaggtggtggagaagggcgtggtgatccccacctggaacatcagccccatcaagaaggccaacgagatcaagcccccccagttcgtggacatccacctggaggaggacgacagcagcgacgaggagtaccagcccgacgacgaggaggaggacgagaccgccgaggagagcctgctggagagcgacgtggagagcaccgccagcagccccagaggcgccaagaagagcagactgagacagagcagcgagatgaccgagaccgacgaggagagcggcatcctgagcgaggccgagaaggtgaccacccccgccatcagacacatcagcgccgaggtggtgcccatgggccccccccccccccccaagcccaagcagaccagagacagcaccttcatggagaagctgcacgccgtggacgaggagctggccagcagccccgtgtgcatggacagcttccagcccatggacgacagcctgatcgccttcagaaccagaagcaagatgcccctgaaggacgtgcccctgggccagctggaggccgagctgcaggcccccgacatcacccccgacatgtacgaccccaacaccgccgacgacgaggactggaagatgtggctgggcggcctgatgaacgacgacgtgggcaacgaggacgaggccgacgacgacgacgaccccgagtacaacttcctggaggacctggacgagcccgacaccgaggacttcagaaccgacagagccgtgagaatcaccaagaaggaggtgaacgagctgatggaggagctgttcgagaccttccaggacgagatgggcttcagcaacatggaggacgacggccccgaggaggaggagtgcgtggccgagcccagacccaacttcaacaccccccaggccctgagattcgaggagcccctggccaacctgctgaacgagcagcacagaaccgtgaaggagctgttcgagcagctgaagatgaagaagagcagcgccaagcagctgcaggaggtggagaaggtgaagccccagagcgagaaggtgcaccagaccctgatcctggaccccgcccagagaaagagactgcagcagcagatgcagcagcacgtgcagctgctgacccagatccacctgctggccacctgcaaccccaacctgaaccccgaggccaccaccaccagaatcttcctgaaggagctgggcaccttcgcccagagcagcatcgccctgcaccaccagtacaaccccaagttccagaccctgttccagccctgcaacctgatgggcgccatgcagctgatcgaggacttcagcacccacgtgagcatcgactgcagcccccacaagaccgtgaagaagaccgccaacgagttcccctgcctgcccaagcaggtggcctggatcctggccaccagcaaggtgttcatgtaccccgagctgctgcccgtgtgcagcctgaaggccaagaacccccaggacaagatcgtgttcaccaaggccgaggacaacctgctggccctgggcctgaagcacttcgagggcaccgagttccccaaccccctgatcagcaagtacctgctgacctgcaagaccgcccaccagctgaccgtgagaatcaagaacctgaacatgaacagagcccccgacaacatcatcaagttctacaagaagaccaagcagctgcccgtgctgggcaagtgctgcgaggagatccagccccaccagtggaagccccccatcgagagagaggagcacagactgcccttctggctgaaggccagcctgcccagcatccaggaggagctgagacacatggccgacggcgccagagaggtgggcaacatgaccggcaccaccgagatcaacagcgacagaagcctggagaaggacaacctggagctgggcagcgagagcagataccccctgctgctgcccaagggcgtggtgctgaagctgaagcccgtggccaccagattccccagaaaggcctggagacagaagagaagcagcgtgctgaagcccctgctgatccagcccagccccagcctgcagcccagcttcaaccccggcaagacccccgccagaagcacccacagcgaggccccccccagcaagatggtgctgagaatcccccaccccatccagcccgccaccgtgctgcagaccgtgcccggcgtgccccccctgggcgtgagcggcggcgagagcttcgagagccccgccgccctgcccgccgtgccccccgaggccagaaccagcttccccctgagcgagagccagaccctgctgagcagcgcccccgtgcccaaggtgatgctgcccagcctggcccccagcaagttcagaaagccctacgtgagaagaagacccagcaagagaagaggcgtgaaggccagcccctgcatgaagcccgcccccgtgatccaccaccccgccagcgtgatcttcaccgtgcccgccaccaccgtgaagatcgtgagcctgggcggcggctgcaacatgatccagcccgtgaacgccgccgtggcccagagcccccagaccatccccatcaccaccctgctggtgaaccccaccagcttcccctgccccctgaaccagagcctggtggccagcagcgtgagccccctgatcgtgagcggcaacagcgtgaacctgcccatccccagcacccccgaggacaaggcccacgtgaacgtggacatcgcctgcgccgtggccgacggcgagaacgccttccagggcctggagcccaagctggagccccaggagctgagccccctgagcgccaccgtgttccccaaggtggagcacagccccggcccccccctggccgacgccgagtgccaggagggcctgagcgagaacagcgcctgcagatggaccgtggtgaagaccgaggagggcagacaggccctggagcccctgccccagggcatccaggagagcctgaacaaccccacccccggcgacctggaggagatcgtgaagatggagcccgaggaggccagagaggagatcagcggcagccccgagagagacatctgcgacgacatcaaggtggagcacgccgtggagctggacaccggcgcccccagcgaggagctgagcagcgccggcgaggtgaccaagcagaccgtgctgcagaaggaggaggagagaagccagcccaccaagacccccagcagcagccaggagccccccgacgagggcaccagcggcaccgacgtgaacaagggcagcagcaagaacgccctgagcagcatggaccccgaggtgagactgagcagcccccccggcaagcccgaggacagcagcagcgtggacggccagagcgtgggcacccccgtgggccccgagaccggcggcgagaagaacggccccgaggaggaggaggaggaggacttcgacgacctgacccaggacgaggaggacgagatgagcagcgccagcgaggagagcgtgctgagcgtgcccgagctgcaggagaccatggagaagctgacctggctggccagcgagagaagaatgagccaggagggcgagagcgaggaggagaacagccaggaggagaacagcgagcccgaggaggaggaggaggaggaggccgagggcatggagagcctgcagaaggaggacgagatgaccgacgaggccgtgggcgacagcgccgagaagccccccaccttcgccagccccgagaccgcccccgaggtggagaccagcagaaccccccccggcgagagcatcaaggccgccggcaagggcagaaacaaccacagagccagaaacaagagaggcagcagagccagagccagcaaggacaccagcaagctgctgctgctgtacgacgaggacatcctggagagagaccccctgagagagcagaaggacctggccttcgcccaggcctacctgaccagagtgagagaggccctgcagcacatccccggcaagtacgaggacttcctgcaggtgatctacgagttcgagagcagcacccagagaagaaccgccgtggacctgtacaagagcctgcagatcctgctgcaggactggccccagctgctgaaggacttcgccgccttcctgctgcccgagcaggccctggcctgcggcctgttcgaggagcagcaggccttcgagaagagcagaaagttcctgagacagctggagatctgcttcgccgagaaccccagccaccaccagaagatcatcaaggtgctgcagggctgcgccgactgcctgccccaggagatcaccgagctgaagacccagatgtggcagctgctgaagggccacgaccacctgcaggacgagttcagcatcttcttcgaccacctgagacccgccgccagcagaatgggcgacttcgaggagatcaactggaccgaggagaaggagtacgagttcgacggcttcgaggaggtggccctgcccgacgtggaggaggaggaggagccccccaagatccccaccgccagcaagaacaagagaaagaaggagatcggcgtgcagaaccacgacaaggagaccgagtggcccgacggcgccaaggactgcgcctgcagctgccacgagggcggccccgacagcaagctgaagaagagcaagagaagaagctgcagccactgcagcagcaaggtgtgcgacagcaagagctacaagagcaaggagccccacgagctggtgggcagcagcccccacagagaggccagccccatgcccggcgccaaggaggccggccagggcaaggacatgatggaggaggaggcccccgaggagagagagagcaccgaggccacccagagcagaaccgtgagaaccaccagaaagggcgagatgcccgtgagcggcctggccgtgggcagcaccctgcccagccccagagaggtgaccgtgaccgagagactgctgctggacggcccccccccccacagccccgagaccccccagttcccccccaccaccggcgccgtgctgtacaccgtgaagagaaaccaggtgggccccgaggtgagaagctgccccaaggccagccccagactgcagaaggagagagagggccagaaggccgtgagcgagagcgaggccctgatgctggtgtgggacgccagcgagaccgagaagctgcccggcaccgtggagccccccgccagcttcctgagccccgtgagcagcaagaccagagacgccggcagaagacacgtgagcggcaagcccgacacccaggagagatggctgcccagcagcagagccagagtgaagaccagagacagaacctgccccgtgcacgagagccccagcggcatcgacaccagcgagaccagccccaaggcccccagaggcggcctggccaaggacagcggcacccaggccaagggccccgagggcgagcagcagcccaaggccgccgaggccaccgtgtgcgccaacaacagcaaggtgagcagcaccggcgagaaggtggtgctgtggaccagagaggccgacagagtgatcctgaccatgtgccaggagcagggcgcccagccccagaccttcaacatcatcagccagcagctgggcaacaagacccccgccgaggtgagccacagattcagagagctgatgcagctgttccacaccgcctgcgaggccagcagcgaggacgaggacgacgccaccagcaccagcaacgccgaccagctgagcgaccacggcgacctgctgagcgaggaggagctggacgagtag

SEQ ID NO: 102790 - protein, 459 aa, Artificial Sequence
  derived and/or modified sequence
MGVPKFYRWISERYPCLSEVVKEHQIPEFDNLYLDMNGIIHQCSHPNDDDVHFRISDDKIFTDIFHYLEVLFRIIKPRKVFFMAVDGVAPRAKMNQQRGRRFRSAKEAEDKIKKAIEKGETLPTEARFDSNCITPGTEFMARLHEHLKYFVNMKISTDKSWQGVTIYFSGHETPGEGEHKIMEFIRSEKAKPDHDPNTRHCLYGLDADLIMLGLTSHEAHFSLLREEVRFGGKKTQRVCAPEETTFHLLHLSLMREYIDYEFSVLKEKITFKYDIERIIDDWILMGFLVGNDFIPHLPHLHINHDALPLLYGTYVTILPELGGYINESGHLNLPRFEKYLVKLSDFDREHFSEVFVDLKWFESKVGNKYLNEAAGVAAEEARNYKEKKKLKGQENSLCWTALDKNEGEMITSKDNLEDETEDDDLFETEFRQYKRTYYMTKMGVDVVSEYVFANAFILK

SEQ ID NO: 102791 - protein, 249 aa, Artificial Sequence
  derived and/or modified sequence
MLGLTSHEAHFSLLREEVRFGGKKTQRVCAPEETTFHLLHLSLMREYIDYEFSVLKEKITFKYDIERIIDDWILMGFLVGNDFIPHLPHLHINHDALPLLYGTYVTILPELGGYINESGHLNLPRFEKYLVKLSDFDREHFSEVFVDLKWFESKVGNKYLNEAAGVAAEEARNYKEKKKLKGQENSLCWTALDKNEGEMITSKDNLEDETEDDDLFETEFRQYKRTYYMTKMGVDVVSEYVFANAFILK

SEQ ID NO: 102792 - DNA, 1380 bp, Artificial Sequence
  derived and/or modified sequence
atgggcgtaccaaagttttacagatggatcagtgaaaggtacccttgtctgtccgaggtggtgaaagaacaccaaatacccgaattcgataacctttatttagatatgaacggtatcatccatcagtgcagtcaccccaacgacgacgacgtgcactttagaatctctgacgacaaaatcttcactgatatcttccactacctggaagtactgtttcgcattataaagcctagaaaggtgttctttatggcggttgacggggttgctccccgagcgaaaatgaaccagcagagaggtcggcgattccgttccgccaaggaagcagaagataaaataaaaaaggccattgaaaaaggtgagaccctgcccaccgaggctagatttgattctaattgtatcaccccagggacggagttcatggctcgactgcatgaacaccttaagtattttgtcaatatgaagatcagcacagacaagtcttggcaaggggttaccatatatttcagcggccacgagacaccaggagagggagaacacaagattatggagtttatcagatcagaaaaagcgaaacccgatcacgatccgaacacaaggcactgcctgtacgggctggatgccgacctgattatgctgggactaacctctcacgaggcacacttcagccttctgcgcgaggaagtgcgctttgggggaaagaagacccagcgagtatgcgcaccagaagaaacaacctttcaccttctgcatctcagccttatgcgcgaatacatagactacgagttctctgtcctgaaggagaaaatcacatttaagtatgatattgaacgcattatcgacgactggattttgatgggctttctggtgggcaatgactttatccctcatctccctcatctgcatattaatcacgatgcgctgccgcttctgtacggcacctatgtgacaattttgccagagcttggaggctatatcaatgagagcggacaccttaaccttccacgctttgaaaagtacctcgtgaagttgagcgattttgaccgagagcattttagcgaggtatttgtcgatctgaagtggttcgaaagcaaagtggggaacaagtatctgaacgaggccgcgggcgtggccgctgaagaggctagaaattacaaggagaagaaaaagcttaaaggccaggaaaactccctgtgctggacggcactggacaaaaatgagggcgagatgataacaagtaaggataacctggaagacgaaacagaagacgacgatctgttcgaaacagagtttcgacagtataagagaacgtattatatgaccaaaatgggcgtagatgtggtcagcgagtatgtatttgcaaatgcgttcatcctaaagtag

SEQ ID NO: 102793 - DNA, 750 bp, Artificial Sequence
  derived and/or modified sequence
atgctcggcttgacatcccatgaagctcacttctctttactccgcgaggaggttaggttcggagggaaaaaaacacagagagtttgtgcacccgaggagacaaccttccacttgttgcatctcagcttgatgagagagtatatcgattacgaatttagcgtgctgaaggagaagatcacatttaagtatgacatagaacgtatcattgatgactggatcttaatgggctttttggtcggaaatgatttcatcccccacctcccgcatcttcacatcaatcacgatgctttacctttgctgtacgggacatacgtgactattttgcccgagctcggcgggtatattaatgagagcggtcacttgaaccttccccgcttcgaaaaatatctggtcaaactatccgactttgaccgcgagcacttcagtgaggtctttgttgacttaaagtggtttgaatccaaagtgggcaataaatatctgaacgaggctgctggcgtggccgctgaggaggctaggaattacaaggagaagaagaagctgaaagggcaggagaattccctgtgttggaccgcccttgacaaaaatgaaggcgaaatgatcacgtctaaagataatttggaggatgaaacagaggacgatgatctattcgagactgaatttagacagtacaaacggacttattacatgaccaagatgggcgtagacgtggtatccgaatacgtctttgcaaacgctttcatcctgaaatag

SEQ ID NO: 102794 - DNA, 2075 bp, Artificial Sequence
  derived and/or modified sequence
ggcggagccccggcggggcgtttggtttcggtttggccctgactgggattagtgttgacgatcgaaatgggagtccccaagttttacagatggatctcagagcggtatccctgtctcagcgaagtggtgaaagagcatcagattcctgaatttgacaacttgtacctggatatgaatggaattatacatcagtgctcccatcctaatgatgatgatgttcactttagaatttcagatgataaaatctttactgatatttttcactacctggaggtgttgtttcgcattattaaacccaggaaagtgttctttatggctgtagatggtgtggctcctcgagcaaaaatgaaccagcagcgtgggaggcgttttaggtcagcaaaggaggcagaagacaaaattaaaaaggcaatagagaagggagaaactcttcctacagaggccagatttgattccaactgtatcacaccaggaactgaatttatggccaggttacatgaacatctgaagtattttgtaaatatgaaaatttccacagacaagtcatggcaaggagttaccatctacttctcaggccatgagactcctggagaaggagagcataaaatcatggaatttatcagatccgagaaagcaaagccagatcatgatccaaacaccagacactgtctttatggtttagatgctgacttgattatgcttggattaacaagtcatgaggcacatttttctctcttaagagaagaagttcgatttggtggcaaaaaaacacaacgggtatgtgctccagaagaaactacatttcaccttctacacttgtctttaatgagagagtatattgactatgagttttcagtattaaaagaaaagatcacatttaaatatgatattgaaaggataatagatgattggattttgatggggtttcttgttggtaatgattttatccctcatctacctcatttacatattaatcatgatgcactgcctcttctttatggaacatatgttaccatcctgccagaacttgggggttatattaatgaaagtgggcacctcaacttacctcgatttgagaaataccttgtgaaactatcagattttgatcgggagcacttcagtgaagtttttgtggacctaaaatggtttgaaagcaaagttggtaacaagtacctcaatgaagcagcaggtgtcgcagcagaagaagccaggaactacaaggaaaagaaaaagttaaagggccaggaaaattctctgtgttggactgctttagacaaaaatgaaggcgaaatgataacttctaaggataatttagaagatgagactgaagatgatgacctatttgaaactgagtttagacaatataaaagaacatattacatgacgaagatgggggttgacgtagtatctgagtacgtttttgccaatgcttttattttaaaatagaaaaaattagattttgcagttattcagaaaatatgattttgatgaagtagtgggagaaaaaggattttttggtttcatgaattattgtgtatgtttcaactagtctggttttggagaagatggtattaattctgacttgtattatattcctgtgataaaaattgctgaagagaaaatgatccttatgtataaggatttttgttacaaagttgtttataatagtaaaaaaattagaaataatctaaatgtccaataagaaggttcatcataattggccactgcttcttcattacagtcaccatctctgtcacctcttccatctccggaatctgcagaactgctaaactggtacttgcagaaagttcataacaatttggaaggatgcttatagtacattattaagtacaaattgtaaaggcaagacatgaaatcatacatacagtatgctctcattaaccttaaaaaaacctagatatagataaaagactgaaacactaaaaatgtaaaagtgatggctataagatgataaaaatgctgttcttcattgtccagattttcactcctgaggaaatagttcttttataataaaaaagcaatatttttcatattaaaaaactacctcccagaaa

SEQ ID NO: 102795 - DNA, 1180 bp, Artificial Sequence
  derived and/or modified sequence
gcggcggagccccggcggggcgtttggtttcggtttggccctgactgggattagtgttgacgatcgaaatgggagtccccaagttttacagatggatctcagagcggtatccctgtctcagcgaagtggtgaaagagcatcagattcctgaatttgacaacttgtacctggatatgaatggaattatacatcagtgctcccatcctaatgatgatgatgttcactttagaatttcagatgataaaatctttactgatatttttcactacctggaggtgttgtttcgcattattaaacccaggaaagtgttctttatggctgtagatggtgtggctcctcgagcaaaaatgaaccagcagcgtgggaggcgttttagattatgcttggattaacaagtcatgaggcacatttttctctcttaagagaagaagttcgatttggtggcaaaaaaacacaacgggtatgtgctccagaagaaactacatttcaccttctacacttgtctttaatgagagagtatattgactatgagttttcagtattaaaagaaaagatcacatttaaatatgatattgaaaggataatagatgattggattttgatggggtttcttgttggtaatgattttatccctcatctacctcatttacatattaatcatgatgcactgcctcttctttatggaacatatgttaccatcctgccagaacttgggggttatattaatgaaagtgggcacctcaacttacctcgatttgagaaataccttgtgaaactatcagattttgatcgggagcacttcagtgaagtttttgtggacctaaaatggtttgaaagcaaagttggtaacaagtacctcaatgaagcagcaggtgtcgcagcagaagaagccaggaactacaaggaaaagaaaaagttaaagggccaggaaaattctctgtgttggactgctttagacaaaaatgaaggcgaaatgataacttctaaggataatttagaagatgagactgaagatgatgacctatttgaaactgagtttagacaatataaaagaacatattacatgacgaagatgggggttgacgtagtatctgagtacgtttttgccaatgcttttattttaaaatagaaaaaattagattttgcagttattcagaaaatatgattttgatgaagtagt

SEQ ID NO: 102796 - DNA, 1380 bp, Artificial Sequence
  derived and/or modified sequence
atgggcgtgcccaagttctaccgctggatcagcgagcgctacccctgcctgtctgaggtggtgaaggagcaccagatccctgagtttgacaacctgtacctggacatgaatggcatcatccaccagtgcagccaccccaatgatgatgatgtgcacttccgcatcagtgatgacaagatcttcacagacatcttccactacctggaggtgctcttccgcatcatcaagcccaggaaggtgttcttcatggctgtggatggagtggccccccgggccaagatgaaccagcagaggggccgccgcttccgcagcgccaaggaggccgaggacaagatcaagaaggccatcgagaagggggagaccctgcccacagaggccaggtttgacagcaactgcatcaccccaggcacagagttcatggcccggctgcacgagcacctgaagtactttgtgaacatgaagatcagcacagacaagtcctggcagggcgtgaccatctacttcagcggccacgagaccccaggagagggggagcacaagatcatggagttcatccgctctgagaaggccaagccagaccatgaccccaacaccaggcactgcctgtatggcctggatgctgacctgatcatgctgggcctgaccagccatgaggcccacttcagcctgctgcgggaggaggtgcgctttggaggcaagaagacccagagggtgtgtgcccctgaggagaccaccttccacctgctgcacctgagcctgatgagggagtacatcgactatgagttctctgtgctgaaggagaagatcaccttcaagtatgacatcgagcgcatcattgatgactggatcctgatgggcttcctggtgggcaatgacttcatcccccacctgccccacctgcacatcaaccatgatgccctgcccctgctgtatggcacctacgtgaccatcctgcctgagctgggcggctacatcaatgaaagtggccacctgaacctgcccaggtttgagaagtacctggtgaagctgagtgactttgaccgggagcacttcagcgaggtgtttgtggacctgaagtggtttgagagcaaggtgggcaacaagtacctgaatgaagctgctggggtggccgctgaggaggccaggaactacaaggagaagaagaagctgaagggccaggagaacagcctgtgctggacagccctggacaagaatgaaggagagatgatcaccagcaaggacaacctggaggatgaaacagaagatgatgacctgtttgaaacagagttccggcagtacaagaggacctactacatgaccaagatgggcgtggatgtggtgtctgaatatgtgtttgccaatgccttcatcctgaagtag

SEQ ID NO: 102797 - DNA, 750 bp, Artificial Sequence
  derived and/or modified sequence
atgctgggcctgaccagccatgaggcccacttcagcctgctgcgggaggaggtgcgctttggaggcaagaagacccagagggtgtgtgcccctgaggagaccaccttccacctgctgcacctgagcctgatgagggagtacatcgactatgagttctctgtgctgaaggagaagatcaccttcaagtatgacatcgagcgcatcattgatgactggatcctgatgggcttcctggtgggcaatgacttcatcccccacctgccccacctgcacatcaaccatgatgccctgcccctgctgtatggcacctacgtgaccatcctgcctgagctgggcggctacatcaatgaaagtggccacctgaacctgcccaggtttgagaagtacctggtgaagctgagtgactttgaccgggagcacttcagcgaggtgtttgtggacctgaagtggtttgagagcaaggtgggcaacaagtacctgaatgaagctgctggggtggccgctgaggaggccaggaactacaaggagaagaagaagctgaagggccaggagaacagcctgtgctggacagccctggacaagaatgaaggagagatgatcaccagcaaggacaacctggaggatgaaacagaagatgatgacctgtttgaaacagagttccggcagtacaagaggacctactacatgaccaagatgggcgtggatgtggtgtctgaatatgtgtttgccaatgccttcatcctgaagtag

SEQ ID NO: 102798 - DNA, 1380 bp, Artificial Sequence
  derived and/or modified sequence
atgggcgtgcccaagttctaccggtggatcagcgagcggtacccctgcctgagcgaggtggtcaaggaacaccaaatcccagaatttgataatctgtacttggacatgaacggtataatccatcagtgctcccatccaaatgatgacgatgtgcacttccgcattagtgatgataagatcttcacagacatcttccactacttggaggtgttattcaggatcataaaaccgcgcaaagtgttttttatggccgtcgacggagtggctccccgggccaagatgaatcagcagcggggccgtagattcagaagtgccaaggaggccgaagataagattaagaaagccattgaaaaaggcgaaacactgccaaccgaagctagattcgacagtaattgtatcactcccggtacagagttcatggcacggttacacgaacatttgaagtacttcgtgaatatgaaaatctcaactgacaagtcatggcagggggtgacaatttacttctctggccacgagacacccggggagggggagcataagatcatggaattcattcgttctgaaaaagctaagccagatcatgatcctaatacaagacattgtctgtacggcctggatgccgacctgatcatgttgggattaacatcccacgaggcgcacttttcactcttgcgggaagaagttaggtttggaggaaaaaaaacacagcgggtgtgtgctcctgaggagacaacattccacctactgcatctctctctgatgcgtgaatacattgattacgaattctctgtcttgaaggagaaaataacctttaagtacgacattgaacgtatcattgatgattggatcttgatgggattcctggtgggaaacgatttcatccctcacttgcctcaccttcacattaaccatgatgccctgccactgctgtacggcacgtatgttaccatcctgcccgagttgggtgggtacatcaacgaatccggccaccttaatctgccgaggtttgaaaaatacctcgtaaaactcagtgacttcgaccgagagcacttcagcgaagtgtttgttgacctgaaatggtttgaatctaaggtaggcaacaagtatttaaatgaagcggccggggtagccgccgaggaggctcgcaactacaaggaaaagaagaaactgaaaggccaagaaaattccctctgttggacggcgctagataagaatgagggtgaaatgatcacaagcaaagacaacctcgaggatgagactgaggatgacgatctgtttgaaacagagtttaggcaatataagcgcacatattacatgaccaagatgggcgtggatgtggtctccgaatacgtcttcgcaaatgccttcatccttaagtag

SEQ ID NO: 102799 - DNA, 750 bp, Artificial Sequence
  derived and/or modified sequence
atgctgggcctgaccagccacgaggcccacttcagcctgctgcgggaggaggttcgctttggggggaaaaagacccagcgtgtctgcgctccagaggagacgaccttccaccttttacatctctctctgatgcgggagtacatcgattatgaattttcggtgctcaaagaaaaaattaccttcaagtatgacatcgaacgcatcattgacgactggatactgatggggttcctcgtggggaacgattttatcccccacctgcctcatctgcacatcaaccacgatgccctgccactgctgtatggcacctacgtgactattcttccagagttgggcggttacatcaatgaaagcggacacctgaatctgcctcgtttcgagaagtatttggtgaaactgtcggattttgaccgcgaacacttcagcgaagtctttgtggacctgaagtggttcgaatctaaagttggtaataagtatttgaacgaagctgccggcgtcgcagcggaggaggctcgtaactacaaagagaagaaaaagttgaaagggcaagaaaactccctctgttggaccgctctcgataagaatgagggagaaatgattacatctaaagacaacctggaggacgagacggaagacgatgacctttttgaaaccgagttccgccagtataagcggacgtactacatgacaaagatgggcgtggatgtggtctcggaatacgttttcgcgaatgcctttattctgaagtag

SEQ ID NO: 102800 - DNA, 1380 bp, Artificial Sequence
  derived and/or modified sequence
atgggggttccaaagttctaccgttggatctctgaaagatatccatgtcttagtgaggtggtgaaggagcaccagattcccgagtttgacaatctctacctagacatgaacggtatcattcatcagtgcagtcatcccaatgacgatgacgtgcacttcaggatttccgacgataaaatctttaccgacatcttccattacctagaggtgcttttccgcatcattaagcctcgaaaggtgttttttatggccgtggacggcgtggctcctcgggctaagatgaaccagcagcgaggcaggcggtttagaagtgccaaagaggccgaagataagatcaaaaaggctattgaaaagggggagaccctgcctactgaagccaggttcgacagtaactgcatcacaccaggaaccgaatttatggcgaggctccacgaacacttgaaatattttgttaatatgaaaatcagtacagacaagtcctggcagggggttaccatctacttttctgggcacgagactccaggcgaaggcgagcataaaatcatggagttcattagatcagaaaaagctaagcctgatcacgacccaaacacaagacactgcctctacggcctcgacgcagatcttattatgttgggattgacctcacacgaagcacacttcagtctccttcgggaggaagtacgcttcggaggaaagaagacacagagggtttgtgccccagaagaaacgacgtttcacctcctacacttaagcctcatgagagaatacatcgattatgaattctccgtgctaaaggaaaagattacttttaagtacgacattgaacggatcattgacgactggatcctgatgggctttctcgtgggtaatgatttcatccctcacctaccccatctccacatcaaccacgacgctcttccactgctgtatgggacgtacgttacaatactcccagaactgggaggttatattaatgaatccgggcaccttaatctgcctcgttttgagaagtacttagtgaaattatctgactttgacagagagcatttttcagaggtgttcgtagacttgaagtggttcgaaagcaaagtaggcaacaagtaccttaatgaggcagccggagtcgctgcggaggaagccaggaattataaagagaagaagaaactcaaaggtcaagagaatagtctgtgttggacagctctggacaagaacgaaggtgaaatgattacaagcaaggataacctggaggacgaaacagaagatgatgacctgttcgaaactgagtttcgtcagtacaaaaggacttattacatgacaaagatgggcgtggacgtcgtgtcagaatacgtcttcgcaaatgctttcattcttaagtag

SEQ ID NO: 102801 - DNA, 750 bp, Artificial Sequence
  derived and/or modified sequence
atgttagggctaacaagtcatgaggcacactttagcctgttgcgggaagaggtccggtttgggggaaaaaagacacagcgtgtctgtgcgccagaagaaacaacatttcacctcctgcatctctctctgatgcgggagtacatcgactatgagttctccgtgctgaaagaaaaaatcacctttaaatacgacattgagagaatcattgacgattggattttgatggggtttctggtgggcaatgatttcatcccccatctcccacatctacacatcaatcatgacgcgctccctcttctgtatggaacctacgttacaatcttaccggaactggggggttacattaacgagtctggccatcttaatttgccaagattcgaaaaatacctggtgaagttgagcgactttgaccgagagcacttcagtgaggtgttcgttgatttgaaatggttcgaatcaaaagtgggcaataagtacctgaacgaagccgcaggggtggccgctgaagaagcaaggaattataaggaaaagaagaaactcaaaggccaggagaattctctatgctggaccgctctcgacaagaacgagggtgaaatgatcacctccaaagacaacttagaggacgaaacggaggacgacgatctgttcgagacagagttccggcagtataaaaggacctactatatgacaaagatgggcgtagacgtcgtgtccgagtacgtcttcgcgaatgcgttcatcttaaaatag

SEQ ID NO: 102802 - DNA, 1380 bp, Artificial Sequence
  derived and/or modified sequence
atgggcgtgcccaagttctacagatggatcagcgagagatacccctgcctgagcgaggtggtgaaggagcaccagatccccgagttcgacaacctgtacctggacatgaacggcatcatccaccagtgcagccaccccaacgacgacgacgtgcacttcagaatcagcgacgacaagatcttcaccgacatcttccactacctggaggtgctgttcagaatcatcaagcccagaaaggtgttcttcatggccgtggacggcgtggcccccagagccaagatgaaccagcagagaggcagaagattcagaagcgccaaggaggccgaggacaagatcaagaaggccatcgagaagggcgagaccctgcccaccgaggccagattcgacagcaactgcatcacccccggcaccgagttcatggccagactgcacgagcacctgaagtacttcgtgaacatgaagatcagcaccgacaagagctggcagggcgtgaccatctacttcagcggccacgagacccccggcgagggcgagcacaagatcatggagttcatcagaagcgagaaggccaagcccgaccacgaccccaacaccagacactgcctgtacggcctggacgccgacctgatcatgctgggcctgaccagccacgaggcccacttcagcctgctgagagaggaggtgagattcggcggcaagaagacccagagagtgtgcgcccccgaggagaccaccttccacctgctgcacctgagcctgatgagagagtacatcgactacgagttcagcgtgctgaaggagaagatcaccttcaagtacgacatcgagagaatcatcgacgactggatcctgatgggcttcctggtgggcaacgacttcatcccccacctgccccacctgcacatcaaccacgacgccctgcccctgctgtacggcacctacgtgaccatcctgcccgagctgggcggctacatcaacgagagcggccacctgaacctgcccagattcgagaagtacctggtgaagctgagcgacttcgacagagagcacttcagcgaggtgttcgtggacctgaagtggttcgagagcaaggtgggcaacaagtacctgaacgaggccgccggcgtggccgccgaggaggccagaaactacaaggagaagaagaagctgaagggccaggagaacagcctgtgctggaccgccctggacaagaacgagggcgagatgatcaccagcaaggacaacctggaggacgagaccgaggacgacgacctgttcgagaccgagttcagacagtacaagagaacctactacatgaccaagatgggcgtggacgtggtgagcgagtacgtgttcgccaacgccttcatcctgaagtag

SEQ ID NO: 102803 - DNA, 750 bp, Artificial Sequence
  derived and/or modified sequence
atgctgggcctgaccagccacgaggcccacttcagcctgctgagagaggaggtgagattcggcggcaagaagacccagagagtgtgcgcccccgaggagaccaccttccacctgctgcacctgagcctgatgagagagtacatcgactacgagttcagcgtgctgaaggagaagatcaccttcaagtacgacatcgagagaatcatcgacgactggatcctgatgggcttcctggtgggcaacgacttcatcccccacctgccccacctgcacatcaaccacgacgccctgcccctgctgtacggcacctacgtgaccatcctgcccgagctgggcggctacatcaacgagagcggccacctgaacctgcccagattcgagaagtacctggtgaagctgagcgacttcgacagagagcacttcagcgaggtgttcgtggacctgaagtggttcgagagcaaggtgggcaacaagtacctgaacgaggccgccggcgtggccgccgaggaggccagaaactacaaggagaagaagaagctgaagggccaggagaacagcctgtgctggaccgccctggacaagaacgagggcgagatgatcaccagcaaggacaacctggaggacgagaccgaggacgacgacctgttcgagaccgagttcagacagtacaagagaacctactacatgaccaagatgggcgtggacgtggtgagcgagtacgtgttcgccaacgccttcatcctgaagtag

SEQ ID NO: 102804 - protein, 2241 aa, Artificial Sequence
  derived and/or modified sequence
MLPCKKRRTTVTESLQHKGNQEENNVDLESAVKPESDQVKDLSSVSLSWDPSHGRVAGFEVQSLQDAGNQLGMEDTSLSSGMLTQNTNVPILEGVDVAISQGITLPSLESFHPLNIHIGKGKLHATGSKRGKKMTLRPGPVTQEDRCDHLTLKEPFSGEPSEEVKEEGGKPQMNSEGEIPSLPSGSQSAKPVSQPRKSTQPDVCASPQEKPLRTLFHQPEEEIEDGGLFIPMEEQDNEESEKRRKKKKGTKRKRDGRGQEGTLAYDLKLDDMLDRTLEDGAKQHNLTAVNVRNILHEVITNEHVVAMMKAAISETEDMPMFEPKMTRSKLKEVVEKGVVIPTWNISPIKKANEIKPPQFVDIHLEEDDSSDEEYQPDDEEEDETAEESLLESDVESTASSPRGAKKSRLRQSSEMTETDEESGILSEAEKVTTPAIRHISAEVVPMGPPPPPKPKQTRDSTFMEKLHAVDEELASSPVCMDSFQPMDDSLIAFRTRSKMPLKDVPLGQLEAELQAPDITPDMYDPNTADDEDWKMWLGGLMNDDVGNEDEADDDDDPEYNFLEDLDEPDTEDFRTDRAVRITKKEVNELMEELFETFQDEMGFSNMEDDGPEEEECVAEPRPNFNTPQALRFEEPLANLLNEQHRTVKELFEQLKMKKSSAKQLQEVEKVKPQSEKVHQTLILDPAQRKRLQQQMQQHVQLLTQIHLLATCNPNLNPEATTTRIFLKELGTFAQSSIALHHQYNPKFQTLFQPCNLMGAMQLIEDFSTHVSIDCSPHKTVKKTANEFPCLPKQVAWILATSKVFMYPELLPVCSLKAKNPQDKIVFTKAEDNLLALGLKHFEGTEFPNPLISKYLLTCKTAHQLTVRIKNLNMNRAPDNIIKFYKKTKQLPVLGKCCEEIQPHQWKPPIEREEHRLPFWLKASLPSIQEELRHMADGAREVGNMTGTTEINSDRSLEKDNLELGSESRYPLLLPKGVVLKLKPVATRFPRKAWRQKRSSVLKPLLIQPSPSLQPSFNPGKTPARSTHSEAPPSKMVLRIPHPIQPATVLQTVPGVPPLGVSGGESFESPAALPAVPPEARTSFPLSESQTLLSSAPVPKVMLPSLAPSKFRKPYVRRRPSKRRGVKASPCMKPAPVIHHPASVIFTVPATTVKIVSLGGGCNMIQPVNAAVAQSPQTIPITTLLVNPTSFPCPLNQSLVASSVSPLIVSGNSVNLPIPSTPEDKAHVNVDIACAVADGENAFQGLEPKLEPQELSPLSATVFPKVEHSPGPPLADAECQEGLSENSACRWTVVKTEEGRQALEPLPQGIQESLNNPTPGDLEEIVKMEPEEAREEISGSPERDICDDIKVEHAVELDTGAPSEELSSAGEVTKQTVLQKEEERSQPTKTPSSSQEPPDEGTSGTDVNKGSSKNALSSMDPEVRLSSPPGKPEDSSSVDGQSVGTPVGPETGGEKNGPEEEEEEDFDDLTQDEEDEMSSASEESVLSVPELQETMEKLTWLASERRMSQEGESEEENSQEENSEPEEEEEEEAEGMESLQKEDEMTDEAVGDSAEKPPTFASPETAPEVETSRTPPGESIKAAGKGRNNHRARNKRGSRARASKDTSKLLLLYDEDILERDPLREQKDLAFAQAYLTRVREALQHIPGKYEDFLQVIYEFESSTQRRTAVDLYKSLQILLQDWPQLLKDFAAFLLPEQALACGLFEEQQAFEKSRKFLRQLEICFAENPSHHQKIIKVLQGCADCLPQEITELKTQMWQLLKGHDHLQDEFSIFFDHLRPAASRMGDFEEINWTEEKEYEFDGFEEVALPDVEEEEEPPKIPTASKNKRKKEIGVQNHDKETEWPDGAKDCACSCHEGGPDSKLKKSKRRSCSHCSSKVCDSKSYKSKEPHELVGSSPHREASPMPGAKEAGQGKDMMEEEAPEERESTEATQSRTVRTTRKGEMPVSAGLAVGSTLPSPREVTVTERLLLDGPPPHSPETPQFPPTTGAVLYTVKRNQVGPEVRSCPKASPRLQKEREGQKAVSESEALMLVWDASETEKLPGTVEPPASFLSPVSSKTRDAGRRHVSGKPDTQERWLPSSRARVKTRDRTCPVHESPSGIDTSETSPKAPRGGLAKDSGTQAKGPEGEQQPKAAEATVCANNSKVSSTGEKVVLWTREADRVILTMCQEQGAQPQTFNIISQQLGNKTPAEVSHRFRELMQLFHTACEASSEDEDDATSTSNADQLSDHGDLLSEEELDE

SEQ ID NO: 102805 - protein, 970 aa, Artificial Sequence
  derived and/or modified sequence
MLPCKKRRTTVTESLQHKGNQEENNVDLESAVKPESDQVKDLSSVSLSWDPSHGRVAGFEVQSLQDAGNQLGMEDTSLSSGMLTQNTNVPILEGVDVAISQGITLPSLESFHPLNIHIGKGKLHATGSKRGKKMTLRPGPVTQEDRCDHLTLKEPFSGEPSEEVKEEGGKPQMNSEGEIPSLPSGSQSAKPVSQPRKSTQPDVCASPQEKPLRTLFHQPEEEIEDGGLFIPMEEQDNEESEKRRKKKKGTKRKRDGRGQEGTLAYDLKLDDMLDRTLEDGAKQHNLTAVNVRNILHEVITNEHVVAMMKAAISETEDMPMFEPKMTRSKLKEVVEKGVVIPTWNISPIKKANEIKPPQFVDIHLEEDDSSDEEYQPDDEEEDETAEESLLESDVESTASSPRGAKKSRLRQSSEMTETDEESGILSEAEKVTTPAIRHISAEVVPMGPPPPPKPKQTRDSTFMEKLHAVDEELASSPVCMDSFQPMDDSLIAFRTRSKMPLKDVPLGQLEAELQAPDITPDMYDPNTADDEDWKMWLGGLMNDDVGNEDEADDDDDPEYNFLEDLDEPDTEDFRTDRAVRITKKEVNELMEELFETFQDEMGFSNMEDDGPEEEECVAEPRPNFNTPQALRFEEPLANLLNEQHRTVKELFEQLKMKKSSAKQLQEVEKVKPQSEKVHQTLILDPAQRKRLQQQMQQHVQLLTQIHLLATCNPNLNPEATTTRIFLKELGTFAQSSIALHHQYNPKFQTLFQPCNLMGAMQLIEDFSTHVSIDCSPHKTVKKTANEFPCLPKQVAWILATSKVFMYPELLPVCSLKAKNPQDKIVFTKAEDNLLALGLKHFEGTEFPNPLISKYLLTCKTAHQLTVRIKNLNMNRAPDNIIKFYKKTKQLPVLGKCCEEIQPHQWKPPIEREEHRLPFWLKASLPSIQEELRHMADGARQSYRRKRRGVSQLKPLHLLKSPLMKEPQGQM

SEQ ID NO: 102806 - DNA, 6726 bp, Artificial Sequence
  derived and/or modified sequence
atgcttccctgcaaaaaaaggcggactactgtcactgaaagcttgcagcataaaggcaaccaggaggaaaataatgtcgacttggaatctgcagtgaagccagagtctgatcaggtgaaagacctgtcttctgtctctctaagttgggatccctcccacggccgggtggcgggtttcgaagtgcagtcgctccaagatgccggaaatcagctgggaatggaggatacgagcctgtccagcggaatgctcacccaaaacaccaatgttcccattctggagggggtcgacgtcgcaatctcccagggcatcacgttaccatccctagaatctttccaccccctcaacatacacataggcaaggggaaactgcacgccacaggaagcaaaaggggcaaaaaaatgactctaagacctggtcctgtcactcaggaggaccgctgtgatcacctgacccttaaggaacctttctcgggagagccatcagaagaagtaaaagaagaaggtgggaaaccacagatgaatagcgaaggggagattccttcgttgccatccggaagccagagtgcaaagcctgtgtcccaacctcgcaagtccactcaaccagatgtgtgcgcctctcctcaagaaaaaccgctgcggaccctttttcatcagcccgaggaggagattgaggatggaggcctattcatccctatggaggagcaggacaacgaggaatcagagaaaagaagaaagaaaaaaaagggcacaaagcggaagagggacggaagggggcaggagggaaccctcgcttatgacctgaagctggatgatatgcttgaccgcactctggaagatggtgctaagcagcataacctgacggccgtgaacgtgcgcaacatccttcacgaagtgattaccaacgagcatgtggttgcaatgatgaaggctgccatcagtgagaccgaggatatgcccatgtttgaacctaagatgacacgcagcaaattaaaggaagtcgtggagaagggggttgtgatcccgacctggaatattagtccaatcaagaaagccaatgagatcaagccgccgcaatttgttgacattcacttggaggaggacgattcttccgatgaagaatatcagccagacgatgaggaggaagatgaaacagcagaggagtcgctcttggaatcggatgtggagtccaccgcaagctccccacggggtgctaaaaagtctaggctgcgtcaaagctctgaaatgaccgagaccgatgaggagagtgggattctttctgaggctgagaaagtaaccactcctgcaattaggcatatcagcgcagaggtcgtccccatgggaccccctccaccccctaaaccaaaacagactcgcgattccaccttcatggaaaagctgcacgcagtcgacgaggagctcgcctcttcccctgtctgcatggattcctttcagcctatggatgactccctgatagcttttcgcacgcgctccaagatgcctctgaaggatgtccctctgggtcagctcgaagctgagctgcaggctcccgacatcacccctgatatgtacgaccccaacaccgccgacgacgaggactggaagatgtggctgggcgggctcatgaatgacgatgtcggcaacgaagatgaagctgatgacgatgatgatccggaatataactttctggaggacctggatgaacccgacaccgaggattttaggacggatcgtgctgtgcgaatcaccaaaaaagaagtcaatgagctcatggaagaactgttcgagacctttcaggacgaaatggggtttagtaacatggaggacgacggcccggaagaggaagagtgtgtggcggaaccgcgccccaacttcaatacaccccaggccctgcgcttcgaggagccactagctaatttacttaacgagcagcatagaacagtcaaggagctgttcgagcaattgaagatgaagaaaagcagtgctaaacagctccaggaggttgagaaggttaaaccacaatccgaaaaagtacatcagacgctaattctggaccctgcccagcggaagaggttgcagcagcagatgcagcagcacgtacagctgttgacccaaattcacttgctggcaacatgtaatcccaatctgaatccagaggcgacgacgacaaggatctttctgaaggaacttggcacgttcgcccaaagttctatcgcactgcaccaccagtacaatccaaagttccagacactgtttcagccatgtaatcttatgggggctatgcagctgatcgaggatttttcgacccatgtttcaattgactgttcaccacataaaactgtgaagaaaaccgcgaatgagttcccctgcttacccaagcaagtggcatggatcctggcaacctctaaagtctttatgtaccccgaactgttaccagtctgtagcctgaaagcgaaaaacccccaggataaaattgtgtttactaaagccgaagataacctgttggcccttggcctgaagcattttgagggcactgaattcccaaatcctctcatatccaagtacctgttaacttgcaagaccgcccaccaactgacagtgaggatcaagaacctgaacatgaatcgcgctcctgataacatcatcaaattctacaagaaaactaaacagctgcccgtgcttggaaagtgctgtgaggaaattcaacctcatcaatggaagccgcccattgaaagggaagaacataggcttcctttctggcttaaggcatccttgccttctatccaggaggaactgaggcatatggccgatggcgcccgggaagttggcaatatgactggcaccacggaaataaactccgaccgctccctcgagaaggataacctcgagctgggctccgagagccggtaccctttgcttctgccaaaaggtgtcgtgttgaaattaaagccggtcgcaacaaggtttccacgcaaggcctggagacagaagagatccagcgtgctgaagcctttactgatccagccttcgccctcactacagccctcgttcaacccgggcaagacccccgcacggagcacacatagcgaagcgcctccatcaaagatggtcctgcgaatcccccatccaatccagcccgcgaccgtgctgcaaacagtccccggcgtaccccccctcggggtgtccgggggcgaatcatttgaaagcccggccgcactgccagccgtccccccagaggccaggacctctttccctctcagcgagagccagaccctgcttagcagtgccccagtgcctaaagtcatgctccccagcctggcaccatctaaatttagaaaaccctacgtacggcgcagacccagcaagagacgtggcgtcaaggcctccccttgcatgaagcccgcaccggtgattcatcaccctgcttctgtgatctttacagtgccagctacaactgtgaagatagtaagcctcgggggtggttgcaatatgatccagcctgtgaatgccgccgtagcacagtcacctcagacaatccccatcactaccctgctggtcaatcccaccagtttcccatgccctctcaatcagtccctggtagcatccagtgtctcccccctgatcgtgagcgggaactcagtcaacctccccattcccagcactccagaagataaggcccatgtgaatgtagatatagcctgtgccgtcgccgacggcgagaacgctttccagggacttgagcccaaactggaacctcaagaactatccccattaagtgccactgtctttcccaaggtggaacacagtcccggcccccccctcgcggacgcagagtgccaggaaggactgtcagagaacagcgcctgtagatggacagtggttaagacagaagaaggaagacaggccttagagccactgccgcagggcatacaagagagtctgaataatcccacccctggtgaccttgaagagatcgtcaagatggaacccgaagaagctcgagaagaaatctcggggtctccagagagagacatctgtgacgatataaaggtcgagcacgccgtggaattggacacaggcgctccctcggaagagctcagtagtgccggcgaggtaactaagcagaccgtgctgcagaaagaggaggagagatcacagccaacgaaaacgccctcaagtagccaagagccccccgatgagggcacttccggcaccgacgtgaacaagggaagcagcaagaacgcactgtctagcatggatccagaggtgaggctaagcagtcccccaggcaagcccgaggatagcagttccgttgacggccaatctgtgggcactcctgtcggaccggagacagggggtgaaaagaatgggcccgaggaagaagaggaggaagactttgacgatctcacacaggatgaagaagatgaaatgtcaagcgccagtgaagaatctgtgctgtccgtcccggagctgcaggaaactatggagaagctgacctggcttgcatccgagaggaggatgtcacaggagggagagtccgaagaagagaacagccaggaagagaactcagagccagaagaagaagaggaggaggaagctgaggggatggagagtctgcagaaggaggatgagatgaccgatgaggccgttggagactcagctgaaaaacctccaacgttcgctagccctgagacagcgccagaggttgagacgagccgcaccccacctggcgaatccataaaggccgctgggaagggaagaaataaccatcgggcccgaaacaaacgggggtcccgggcccgggcctccaaggacacctctaagctcctcctcctttacgatgaggacattttggagagggaccctctgcgcgagcagaaggacctggcgttcgcccaggcatacctgaccagggtgcgagaagccctgcaacacatcccaggcaagtatgaggatttccttcaggtgatatacgaattcgagtctagcacacagcgacgcactgctgtcgacctgtataagtctttgcagattctgttgcaggactggccacagctcctgaaggatttcgcagccttcttgctccctgagcaggccctggcctgcggtctctttgaggaacagcaagcatttgagaagagccgcaaattcctaaggcagttggagatttgctttgctgagaatccttcacaccaccagaaaatcattaaggtgctgcagggttgcgctgattgtctgccacaagaaatcacggagttgaagacgcagatgtggcaactactgaaaggccatgatcacctgcaggatgaattctccattttttttgaccatcttagacccgcggcgtccaggatgggggacttcgaggagatcaattggacggaggaaaaggagtacgaattcgacgggttcgaggaggtggctctgcctgacgtggaagaggaagaagagccgcctaaaatcccaaccgccagcaaaaacaagcgaaaaaaggagatcggggtgcagaatcacgacaaagagaccgaatggccagacggcgccaaggactgcgcttgttcctgtcacgaaggcgggccagattcgaagctgaaaaagtctaagcggaggagttgttcccactgcagtagtaaggtgtgcgacagtaaaagttataagagcaaagaaccacacgagctagtgggatcaagtccgcatcgtgaggcatctcctatgcccggggctaaagaggcaggacagggcaaggacatgatggaggaagaggctcccgaagagagggagtccaccgaagctacacaatctaggaccgtgcgcactactcgtaaaggcgagatgcccgtgtctgcaggtctggcagtgggtagcaccctcccctccccgagggaggtgaccgttaccgaacggctcctgctggatggcccaccaccccattcgcctgagaccccgcagtttcctccgactaccggcgcggtactgtacacagtgaagaggaatcaagtgggccccgaagtcaggtcatgcccaaaggcgagcccccgcctgcagaaagaacgtgagggtcagaaggccgttagtgagtccgaggccctgatgttagtctgggatgccagcgagacagaaaaattacccggtaccgtggaaccaccagcgagcttcctgtcacccgtgtccagtaagactagggatgccggccgccgccacgtgtccggcaaaccagacacccaggagcggtggcttccgagttcccgcgctcgggtgaaaaccagggaccggacgtgtcctgttcacgaaagcccctcaggcattgacactagcgagactagcccaaaggctccacgggggggactagcgaaagactccgggacccaggcgaaggggcccgagggagagcagcagcccaaagcagccgaagcaaccgtatgtgccaacaacagcaaagttagcagtacaggagagaaggtcgtactgtggacgcgggaggcagaccgtgtgattttgacaatgtgtcaggagcagggagcccagccacagaccttcaacatcatctcccaacagcttggaaataagactcctgctgaagtgagccacaggtttcgggaactgatgcaattattccacactgcttgtgaggccagctccgaagatgaagacgacgccacttcaaccagcaacgcagaccaactgagcgaccatggtgacttattgtcggaggaggagctggacgaatag

SEQ ID NO: 102807 - DNA, 2913 bp, Artificial Sequence
  derived and/or modified sequence
atgcttccttgcaagaagcgccgcaccacggttacggagagcctgcagcataagggtaatcaggaggagaacaacgtggacttggagtctgccgtgaagcccgaatccgaccaggtgaaggacttaagctccgtcagtttgtcatgggacccatcccatggacgcgttgcaggctttgaggtccagtccctgcaggatgctggaaaccagctgggaatggaggacaccagcttgagtagtggaatgttgacgcaaaacacaaacgttccaatcctggagggggtggatgtagcaatctcacaaggaatcacactgccatcactggagtcgttccatcctctgaatatacacattggaaaaggaaagctacatgccacagggagtaagcgaggcaagaaaatgacattgagacccggacctgtgactcaggaagatcggtgcgaccacctcacactgaaggaacccttcagcggagagccctcggaagaggtcaaggaggaaggcgggaagccacagatgaatagtgagggcgagataccaagcctgccaagcggttcacagagtgccaaacccgtgtctcagcccaggaagagtacacagcccgacgtttgtgcgtctccccaagagaagccgctgcgaactctcttccatcaacctgaggaagagatcgaagacggcgggctatttatccctatggaagagcaagacaacgaggagtccgaaaagagaaggaaaaaaaagaagggcaccaaacgaaaaagagacggccgcggacaggaaggcaccctggcctacgatttgaagttggacgatatgctggatcggactttggaggacggggccaagcagcacaatcttaccgccgtaaacgtgaggaacatccttcatgaagtgatcactaacgagcacgtcgtcgccatgatgaaagctgcaatatctgaaaccgaagatatgcctatgtttgaacccaagatgacacgtagtaaattaaaagaagtagttgaaaagggtgtcgtcattcctacgtggaacatctctcccattaaaaaggcaaatgagatcaagccaccacagttcgtagacattcacctggaggaggatgattcgtccgacgaggaataccagccagatgatgaggaagaggatgaaactgccgaagaatcactgctcgagtccgatgtggagtcaaccgcgtcgagcccaagaggtgcaaagaagtcacgcctaagacagagctccgagatgaccgagactgacgaggagagtgggatactctctgaagctgagaaagtcaccacacccgccatcaggcacataagcgccgaagtcgtccctatggggccccctccccctcccaaaccaaaacagactcgagattcgacgttcatggaaaagctccacgcggtcgatgaagagcttgcttcaagccccgtttgcatggattccttccagcctatggacgatagcctcatcgcgttccgtacacggagtaagatgcccttgaaggacgtacccctgggccagttagaggcagagctgcaagcccccgacataacaccagacatgtatgatcctaataccgcagacgacgaggattggaaaatgtggctggggggtctaatgaacgatgatgtgggcaatgaggacgaggccgacgatgatgacgatccggagtataattttttggaagatctcgatgagccagataccgaggattttagaacagatagggcggtgcgcatcacgaagaaagaagtgaacgaactcatggaagaactgtttgaaaccttccaggacgagatggggttctcaaacatggaggacgacggcccagaagaagaggagtgtgtggcagaacctaggcccaactttaacacaccacaggctctgaggttcgaggagccactggccaatctgctcaatgagcagcatagaacggtgaaggagttgtttgagcagctgaagatgaagaaatcatctgctaaacagctgcaggaggtagagaaggtgaagcctcagagcgagaaggtgcaccagaccctcatattggaccctgcccagcgaaaacgtttgcagcagcagatgcagcaacatgtgcagttgctcactcagatccacctgctggctacatgtaaccccaatctgaatcccgaggccacaaccacccgaattttcctcaaagaactggggaccttcgcacagtccagcattgcactgcaccatcagtacaaccccaagttccagacactgttccagccatgcaatttgatgggcgccatgcagctgatcgaggatttctcaacccatgtaagtatcgattgcagccctcacaaaacagtgaaaaagaccgccaacgagttcccatgtctccctaagcaagtggcctggatactggcaacttcaaaagtgttcatgtacccagaattgctgccggtatgttcactcaaggccaagaatccccaggacaaaatcgtattcacaaaagccgaagataacctgctagctttgggtctcaagcatttcgagggcacagagttccctaatccccttatctctaaatatcttctgacttgcaagactgcacaccaactcaccgttaggattaagaatctaaacatgaatagggccccagataatattatcaagttctataaaaaaacaaagcaactgccggttctgggaaagtgctgtgaggagatccagccgcatcaatggaagccacccatcgagcgcgaggaacatcgtctgccattttggttgaaggcctccctgcccagcatacaggaggagttacgccacatggcagacggagcgcgccagagttacagaagaaagagaagaggagttagccagttgaaacccttacaccttttgaagtccccactgatgaaggagccgcagggacagatgtag

SEQ ID NO: 102808 - DNA, 6726 bp, Artificial Sequence
  derived and/or modified sequence
atgctgccctgcaagaagaggaggaccaccgtgacagagagcctgcagcacaagggcaaccaggaggagaacaacgtggacctggagagcgctgtgaagccagagagtgaccaggtgaaggacctgagctctgtgtccctgtcctgggaccccagccacggccgggtggccggctttgaggtgcagagcctgcaggatgctggcaaccagctgggcatggaggacaccagcctgagcagcggcatgctgacccagaacaccaacgtgcccatcctggagggcgtggatgtggccatcagccagggcatcaccctgcccagcctggagagcttccaccccctgaacatccacatcggcaagggcaagctgcacgccaccggcagcaagaggggcaagaagatgaccctgcggcccggccctgtgacccaggaggacagatgtgaccacctgaccctgaaggagcccttctctggagagcccagcgaggaggtgaaggaggagggcggcaagccccagatgaacagcgagggggagatccccagcctgcccagcggcagccagagcgccaagcctgtgtcccagcccaggaagagcacccagccagatgtgtgtgccagcccccaggagaagcccctgcggaccctcttccaccagcctgaggaggagattgaagatggcggcctcttcatccccatggaggagcaggacaatgaggagagcgagaagaggaggaagaagaagaagggcaccaagaggaagagagatggccggggccaggagggcaccctggcctatgacctgaagctggatgacatgctggacaggaccctggaggatggagccaagcagcacaacctgacagctgtgaatgtgaggaacatcctgcacgaggtgatcaccaatgaacatgtggtggccatgatgaaggccgccatcagcgagacagaggacatgcccatgtttgagcccaagatgaccaggagcaagctgaaggaggtggtggagaagggcgtggtgatccccacctggaacatcagccccatcaagaaggccaatgagatcaagccaccccagtttgtggacatccacctggaggaggatgacagcagtgatgaggagtaccagccagatgatgaggaggaggatgaaacagctgaggagagcctgctggagagtgatgtggagagcacagccagcagccccaggggggccaagaagagccggctgcggcagagcagcgagatgacagaaacagatgaggagagcggcatcctgtctgaggccgagaaggtgaccaccccagccatccgccacatctctgctgaggtggtgcccatgggccccccacctccacccaagcccaagcagacccgggacagcaccttcatggagaagctgcatgctgtggatgaggagctggccagcagccctgtgtgcatggacagcttccagcccatggatgacagcctgattgccttccgcaccaggagcaagatgcccctgaaggatgtgcccctgggccagctggaggccgagctgcaggccccagacatcaccccagacatgtatgaccccaacacagcagatgatgaggactggaagatgtggctgggcggcctgatgaatgatgatgtgggcaatgaagatgaagcagatgatgatgatgatcctgagtacaacttcctggaggacctggatgagccagacacagaggacttcagaacagacagagctgtgcgcatcaccaagaaggaggtgaatgagctgatggaggagctgtttgagaccttccaggatgagatgggcttcagcaacatggaggatgatggccctgaggaggaggagtgtgtggccgagccccggcccaacttcaacaccccccaggccctgcgctttgaggagcccctggccaacctgctgaatgagcagcacaggacagtgaaggagctgtttgagcagctgaagatgaagaagagcagcgccaagcagctgcaggaggtggagaaggtgaagccccagagcgagaaggtgcaccagaccctcatcctggaccctgcccagaggaagaggctgcagcagcagatgcagcagcacgtgcagctgctgacccagatccacctgctggccacctgcaaccccaacctgaaccctgaggccaccaccacccgcatcttcctgaaggagctgggcacctttgcccagagcagcatcgccctgcaccaccagtacaaccccaagttccagaccctcttccagccctgcaacctgatgggcgccatgcagctgattgaggacttcagcacccacgtgtccattgactgcagcccccacaagacagtgaagaagacagccaatgagttcccctgcctgcccaagcaggtggcctggatcctggccaccagcaaggtgttcatgtacccagagctgctgcctgtgtgcagcctgaaggccaagaacccccaggacaagatcgtgttcaccaaggccgaggacaacctgctggccctgggcctgaagcactttgagggcacagagttccccaaccccctcatcagcaagtacctgctgacctgcaagacagcccaccagctgactgtgcgcatcaagaacctgaacatgaacagagccccagacaacatcatcaagttctacaagaagaccaagcagctgcctgtgctgggcaagtgctgtgaggagatccagccccaccagtggaagccacccatcgagcgggaggagcaccggctgcccttctggctgaaggccagcctgcccagcatccaggaggagctgcggcacatggctgatggagcccgggaggtgggcaacatgacaggcaccacagagatcaacagcgacaggagcctggagaaggacaacctggagctgggcagcgagagccgctaccccctgctgctgcccaagggcgtggtgctgaagctgaagcctgtggccacccgcttccccaggaaggcctggaggcagaagaggagctctgtgctgaagcccctgctgatccagcccagccccagcctgcagcccagcttcaaccctgggaagaccccagcccggagcacccacagcgaggccccacccagcaagatggtgctgcgcatcccccaccccatccagcctgccaccgtgctgcagacagtgcctggggtgccccccctgggcgtgtctggaggagagagctttgagagccctgctgccctgcctgctgtgcccccagaggcccggaccagcttccccctgtctgagagccagaccctgctgagcagcgcccctgtgcccaaggtgatgctgcccagcctggcccccagcaagttcaggaagccctacgtgagaagaagacccagcaagaggcggggcgtgaaggccagcccctgcatgaagccagcccctgtgatccaccacccagccagcgtcatcttcaccgtgcctgccaccaccgtgaagatcgtgtccctgggcggcggctgcaacatgatccagcctgtgaatgctgctgtggcccagagcccccagaccatccccatcaccaccctgctggtgaaccccaccagcttcccctgccccctgaaccagagcctggtggccagctctgtgagccccctgattgtgtctggcaacagcgtgaacctgcccatccccagcaccccagaggacaaggcccacgtgaatgtggacatcgcctgtgctgtggctgatggagaaaatgccttccagggcctggagcccaagctggagccccaggagctgagccccctgagcgccaccgtcttccccaaggtggagcacagccctggcccccccctggctgatgctgagtgccaggagggcctgtctgagaacagcgcctgccgctggacagtggtgaagacagaggagggccggcaggccctggagcccctgccccagggcatccaggagagcctgaacaaccccacccctggggacctggaggagatcgtgaagatggagcctgaggaggcccgggaggagatcagcggcagccctgagcgggacatctgtgatgacatcaaggtggagcacgctgtggagctggacaccggggcccccagcgaggagctgagcagcgctggggaggtgaccaagcagacagtgctgcagaaggaggaggagaggagccagcccaccaagacccccagcagcagccaggagcccccagatgagggcaccagcggcacagatgtgaacaagggcagcagcaagaatgccctgagctccatggaccctgaggtgcggctgagcagccccccaggcaagccagaggacagcagctctgtggatggccagagcgtgggcacccctgtgggccctgagaccggcggggagaagaatggacctgaggaggaggaggaggaggactttgatgacctgacccaggatgaagaagatgagatgagcagcgccagcgaggagagcgtgctgtctgtgcctgagctgcaggagaccatggagaagctgacctggctggccagcgagaggaggatgagccaggagggggagagcgaggaggagaacagccaggaggagaacagcgagcctgaggaggaggaggaggaggaggccgagggcatggagagcctgcagaaggaggatgagatgacagatgaggccgtgggggacagcgctgagaagccacccacctttgccagccctgagacagcccctgaggtggagaccagcaggaccccacctggagagagcatcaaggccgccggcaagggcaggaacaaccaccgggccaggaacaagaggggcagccgggcccgggccagcaaggacaccagcaagctgctgctgctgtatgatgaggacatcctggagcgggaccccctgcgggagcagaaggacctggcctttgcccaggcctacctgaccagggtgcgggaggccctgcagcacatccctgggaagtatgaggacttcctgcaggtgatctatgaatttgagagcagcacccagaggagaacagctgtggacctgtacaagagcctgcagatcctgctgcaggactggccccagctgctgaaggactttgctgccttcctgctgcctgagcaggccctggcctgtggcctgtttgaggagcagcaggcctttgagaagagcaggaagttcctgcggcagctggagatctgctttgctgagaaccccagccaccaccagaagatcatcaaggtgctgcagggctgtgccgactgcctgccccaggagatcacagagctgaagacccagatgtggcagctgctgaagggccatgaccacctgcaggatgagttcagcatcttctttgaccacctgcggcctgctgccagcaggatgggagactttgaggagatcaactggacagaggagaaggagtatgaatttgatggctttgaggaggtggccctgcctgatgtggaggaggaggaggagccccccaagatccccacagccagcaagaacaagaggaagaaggagattggagtgcagaaccacgacaaggagacagagtggccagatggagccaaggactgtgcctgcagctgccatgaaggaggccctgacagcaagctgaagaagagcaagaggaggagctgcagccactgcagcagcaaggtgtgtgacagcaagagctacaagagcaaggagccccatgagctggtgggcagcagcccccaccgggaggccagccccatgcctggggccaaggaggccggccagggcaaggacatgatggaggaggaggcccctgaggagcgggagagcacagaggccacccagagcaggacagtgaggaccaccaggaaaggagagatgcctgtgtctgctggcctggccgtgggcagcaccctgcccagcccccgggaggtgacagtgacagagcggctgctgctggatggccccccaccccacagccctgagaccccccagttcccccccaccactggagctgtgctgtacacagtgaagaggaaccaggtgggccctgaggtgcgcagctgccccaaggccagcccccggctgcagaaggagcgggagggccagaaggctgtgtctgagagcgaggccctgatgctggtgtgggatgccagcgagacagagaagctgcccggcaccgtggagcccccagccagcttcctgagccctgtgagcagcaagaccagagatgctggccgccgccacgtgtctgggaagccagacacccaggagcgctggctgcccagcagccgggcccgggtgaagacccgggacaggacctgccctgtgcatgagagccccagcggcatcgacaccagcgagaccagccccaaggccccccggggcggcctggccaaggacagcggcacccaggccaagggccctgagggggagcagcagcccaaggctgctgaggccaccgtgtgtgccaacaacagcaaggtgagcagcactggagagaaggtggtgctgtggacccgggaggccgacagagtcatcctgaccatgtgccaggagcagggcgcccagccccagaccttcaacatcatcagccagcagctgggcaacaagaccccagctgaggtgagccaccgcttccgggagctgatgcagctgttccacacagcctgtgaggccagcagtgaagatgaagatgatgccaccagcaccagcaatgctgaccagctgagtgaccacggggacctgctgtctgaggaggagctggatgaatag

SEQ ID NO: 102809 - DNA, 2913 bp, Artificial Sequence
  derived and/or modified sequence
atgctgccctgcaagaagaggaggaccaccgtgacagagagcctgcagcacaagggcaaccaggaggagaacaacgtggacctggagagcgctgtgaagccagagagtgaccaggtgaaggacctgagctctgtgtccctgtcctgggaccccagccacggccgggtggccggctttgaggtgcagagcctgcaggatgctggcaaccagctgggcatggaggacaccagcctgagcagcggcatgctgacccagaacaccaacgtgcccatcctggagggcgtggatgtggccatcagccagggcatcaccctgcccagcctggagagcttccaccccctgaacatccacatcggcaagggcaagctgcacgccaccggcagcaagaggggcaagaagatgaccctgcggcccggccctgtgacccaggaggacagatgtgaccacctgaccctgaaggagcccttctctggagagcccagcgaggaggtgaaggaggagggcggcaagccccagatgaacagcgagggggagatccccagcctgcccagcggcagccagagcgccaagcctgtgtcccagcccaggaagagcacccagccagatgtgtgtgccagcccccaggagaagcccctgcggaccctcttccaccagcctgaggaggagattgaagatggcggcctcttcatccccatggaggagcaggacaatgaggagagcgagaagaggaggaagaagaagaagggcaccaagaggaagagagatggccggggccaggagggcaccctggcctatgacctgaagctggatgacatgctggacaggaccctggaggatggagccaagcagcacaacctgacagctgtgaatgtgaggaacatcctgcacgaggtgatcaccaatgaacatgtggtggccatgatgaaggccgccatcagcgagacagaggacatgcccatgtttgagcccaagatgaccaggagcaagctgaaggaggtggtggagaagggcgtggtgatccccacctggaacatcagccccatcaagaaggccaatgagatcaagccaccccagtttgtggacatccacctggaggaggatgacagcagtgatgaggagtaccagccagatgatgaggaggaggatgaaacagctgaggagagcctgctggagagtgatgtggagagcacagccagcagccccaggggggccaagaagagccggctgcggcagagcagcgagatgacagaaacagatgaggagagcggcatcctgtctgaggccgagaaggtgaccaccccagccatccgccacatctctgctgaggtggtgcccatgggccccccacctccacccaagcccaagcagacccgggacagcaccttcatggagaagctgcatgctgtggatgaggagctggccagcagccctgtgtgcatggacagcttccagcccatggatgacagcctgattgccttccgcaccaggagcaagatgcccctgaaggatgtgcccctgggccagctggaggccgagctgcaggccccagacatcaccccagacatgtatgaccccaacacagcagatgatgaggactggaagatgtggctgggcggcctgatgaatgatgatgtgggcaatgaagatgaagcagatgatgatgatgatcctgagtacaacttcctggaggacctggatgagccagacacagaggacttcagaacagacagagctgtgcgcatcaccaagaaggaggtgaatgagctgatggaggagctgtttgagaccttccaggatgagatgggcttcagcaacatggaggatgatggccctgaggaggaggagtgtgtggccgagccccggcccaacttcaacaccccccaggccctgcgctttgaggagcccctggccaacctgctgaatgagcagcacaggacagtgaaggagctgtttgagcagctgaagatgaagaagagcagcgccaagcagctgcaggaggtggagaaggtgaagccccagagcgagaaggtgcaccagaccctcatcctggaccctgcccagaggaagaggctgcagcagcagatgcagcagcacgtgcagctgctgacccagatccacctgctggccacctgcaaccccaacctgaaccctgaggccaccaccacccgcatcttcctgaaggagctgggcacctttgcccagagcagcatcgccctgcaccaccagtacaaccccaagttccagaccctcttccagccctgcaacctgatgggcgccatgcagctgattgaggacttcagcacccacgtgtccattgactgcagcccccacaagacagtgaagaagacagccaatgagttcccctgcctgcccaagcaggtggcctggatcctggccaccagcaaggtgttcatgtacccagagctgctgcctgtgtgcagcctgaaggccaagaacccccaggacaagatcgtgttcaccaaggccgaggacaacctgctggccctgggcctgaagcactttgagggcacagagttccccaaccccctcatcagcaagtacctgctgacctgcaagacagcccaccagctgactgtgcgcatcaagaacctgaacatgaacagagccccagacaacatcatcaagttctacaagaagaccaagcagctgcctgtgctgggcaagtgctgtgaggagatccagccccaccagtggaagccacccatcgagcgggaggagcaccggctgcccttctggctgaaggccagcctgcccagcatccaggaggagctgcggcacatggctgatggagcccggcagagctacagaaggaagaggcggggcgtgtcccagctgaagcccctgcacctgctgaagagccccctgatgaaggagccccagggccagatgtag

SEQ ID NO: 102810 - DNA, 6726 bp, Artificial Sequence
  derived and/or modified sequence
atgctgccctgcaagaagcggcggaccaccgtgaccgagagcctgcagcacaaagggaaccaagaagagaacaatgtcgacttggaaagtgcagtaaagcccgagtcagatcaggtgaaggatctcagtagcgtgagcctcagctgggacccctctcatgggcgggtggctggctttgaggtgcaaagcctccaggacgctggaaatcaactagggatggaagataccagcctctccagcgggatgttgacccagaacacaaacgtgccaatactggagggcgttgacgtggccatcagtcagggaattaccctgccatccctcgagtcattccaccccctcaatatacacattggcaaggggaagctgcatgctaccggttcaaagagaggcaagaagatgacacttaggcctggccctgtgactcaagaagatcggtgcgaccacctgacactgaaggagccatttagcggagaacccagtgaagaggtgaaagaggagggggggaagcctcagatgaattccgaaggggaaatcccttcactgcctagcggatcccagtcagcaaaacccgtttcccaacccaggaagtctacccaacctgacgtgtgcgcatcgccacaggaaaaaccactgaggactctgttccaccagcccgaagaggagattgaagatggaggcttatttatcccgatggaggagcaggataacgaggaatccgagaagagacgcaagaagaagaaagggactaaaagaaagcgcgacggtagaggacaagagggtacccttgcatatgacttaaaactggatgatatgttggatcgcactttggaggatggggcaaaacaacacaatcttaccgccgtgaatgtgagaaacatactgcacgaagttatcacgaacgaacacgttgtagccatgatgaaggccgctatttccgaaacagaggatatgcccatgtttgaacccaagatgacccgaagcaaactgaaggaggtggtggaaaagggagtcgtgatccccacctggaatatcagccctatcaaaaaggcaaacgaaattaagcctccacaattcgttgatattcatctggaggaggacgactcttctgatgaggagtaccagccagatgacgaagaggaggacgaaacagccgaagagtctctgctggaatccgatgtggaatccacagcctcctctcctaggggagctaagaaatcaagactcaggcagtcttccgagatgaccgaaacagacgaggaatcgggaattttgagcgaggcagagaaagtgacgactcccgccattcgacacatctccgctgaggttgtacccatgggaccgccaccccctccgaagccaaaacagaccagggactctaccttcatggagaaactgcacgcagtagacgaggaacttgcttccagccctgtctgtatggattctttccagcctatggacgatagtttgattgctttcaggacaagaagtaagatgccgcttaaagacgtgccactgggccagctggaggccgaactacaggcgcctgatattaccccagacatgtatgatcctaacacagcagacgatgaggactggaaaatgtggttgggtgggcttatgaacgatgatgtgggaaatgaggacgaggccgatgacgatgatgatccggagtacaacttccttgaagatctggacgaacctgacactgaggattttagaacggaccgggctgtgaggatcactaaaaaggaagtcaacgagctcatggaggaactttttgagacatttcaggacgagatgggcttttcgaatatggaggatgacggcccagaagaagaggagtgcgtggccgaaccgcgtcctaatttcaatactccgcaggctctgcggtttgaggaaccgcttgccaatcttcttaacgaacaacacaggaccgttaaggaattattcgagcagctgaaaatgaagaaaagcagtgcgaaacagttgcaggaggtcgagaaagtcaagcctcagtccgagaaggtgcaccagactctcatcctcgaccctgcccagagaaagcgcttacagcaacaaatgcagcagcatgttcagcttctgactcagatccatttacttgctacctgtaaccctaatttaaatcctgaggccacgaccacaaggatattcctgaaggagttaggcacgttcgcccagagtagcattgccctccatcatcaatacaatccgaaatttcagacattattccagccttgcaatctcatgggtgcaatgcagctaatcgaggatttttccactcatgtaagcattgactgctccccacataagacagttaaaaagaccgccaacgaattcccttgtttaccaaagcaggtcgcgtggatactggcaactagtaaggtatttatgtaccccgaactccttccagtgtgcagcctgaaagccaagaatccccaggacaagatagtattcaccaaagcagaggacaacctgctggctctggggcttaagcatttcgaggggaccgaattccctaacccattaatctctaagtacctgcttacatgcaagaccgcccaccaactcaccgtacgcattaaaaatttgaatatgaacagggcccccgataacatcattaagttctataaaaaaacgaagcaactcccggtgctggggaaatgttgtgaagaaatacagccacaccagtggaagccacctatcgaaagggaagagcataggttaccattctggctcaaagcttctctgccgtccattcaggaggagctgagacacatggccgacggcgccagggaggtaggcaacatgaccggtacaacagaaattaatagtgaccgcagcctagagaaagataatctggaactcggctccgaatctaggtatcctctcctgctccccaaaggtgtggtgctgaagcttaaacctgtggccacacggtttcctaggaaggcctggcggcagaagagatccagtgtgcttaagccgctattaatacagccatcccccagtctccagccaagtttcaatccggggaagacacccgcgcgctctacgcacagcgaggcacctccgtctaaaatggtcctccgcattcctcaccctatccagcctgccacagtcctgcaaacggtgcctggcgtaccccctctcggcgtgtccggcggggagagcttcgaaagcccggccgcccttcctgcagtgccgcccgaagcacgtacatccttcccactgagcgaatctcagactttgctgagctcagcccccgtgcctaaggtcatgcttcctagcctcgccccctcgaaatttaggaagccatacgtgaggcgacgcccatcgaaacgcagaggtgtgaaggcatctccttgtatgaagcccgcccctgtgatccaccatccagcttcagttattttcaccgttccagcaaccacagtgaaaatagtgtcattgggtggaggatgtaacatgatacagcccgttaacgcggccgtcgcacagagccctcagacaattcccatcaccaccttacttgtgaaccctacatctttcccatgtccattaaaccagagcctcgtggctagctcagtgagccctttgattgtcagcgggaactcagtcaacctcccaatccccagtacaccagaggacaaagcccatgtgaatgtggacatcgcctgtgctgtggcagatggtgagaatgctttccagggcctggagcctaagctggagcctcaagagttgagccctctaagcgctacagtgttcccaaaggtggagcacagccccggccctcctttggccgatgccgagtgccaagaggggctgagcgagaatagcgcctgcaggtggaccgtggtcaagaccgaggagggacgacaggctctcgaacctttgccccaaggcattcaggagtccttgaacaacccaacacccggcgacctggaagaaattgtcaagatggagcctgaagaggctcgtgaggagatctccgggagccctgagagggatatttgcgacgatatcaaagtagagcatgcagtggaactcgacacgggcgctccatcagaggaattgagctccgctggggaggtgactaagcagactgtgctccagaaggaagaggagcgctcccaacccactaagactcctagttcgtcccaagaaccaccggacgagggaacatcaggcaccgacgtcaacaaggggagtagtaagaacgccctgtcaagcatggaccctgaggtaaggctgagtagtccacccggcaagcctgaagacagctctagtgtcgacgggcaatcagtgggaactccagtggggcccgaaacaggaggggaaaagaacggccccgaagaagaggaggaggaagacttcgatgacttgactcaggatgaagaagatgaaatgagtagcgcctctgaggagtccgtgctgtctgtccccgaactccaggagacaatggaaaagctgacctggctggcttccgagagaagaatgagtcaggagggtgagagtgaggaagaaaacagccaagaggagaattccgagcctgaggaggaggaagaagaggaggcagaagggatggaatccctacaaaaagaagacgaaatgacggacgaggcagtcggagactcggccgagaaaccccctaccttcgcctcaccggagacagctcccgaggtcgagaccagccgtacacctcccggggagtcaattaaggccgcaggaaagggaagaaataaccacagagccaggaacaaaaggggaagtcgcgcccgggcatccaaggacaccagtaagctgctactgctctacgacgaggacatcttagagagagatcctttgcgtgaacagaaggacctggcgtttgcacaagcctatcttacaagggtccgcgaagcactgcagcatattccagggaaatacgaagacttcctgcaggttatctacgagtttgaatctagcacccagcgacggaccgccgtggatctctacaagtctcttcagattctgctacaggactggccccagttgctcaaagacttcgcagcttttcttcttcctgaacaggccctggcctgcggcctgtttgaagagcagcaggcgtttgagaagtcacgcaagtttcttcgtcagctcgaaatttgcttcgccgaaaacccatcacatcaccagaagataattaaggtgctccaagggtgtgccgactgtctgccacaggaaataacagaactaaagacccagatgtggcagctgctgaaggggcacgaccacctgcaggatgagttctctattttctttgatcacctgagaccagcagccagccgtatgggggacttcgaagaaatcaactggacagaagaaaaagagtatgagtttgacgggtttgaggaggtggcattgcctgacgtggaagaggaagaagaacctcctaagattccgacggcaagtaaaaataagaggaagaaggaaattggcgtgcagaaccatgacaaagagaccgaatggccagacggagcaaaagattgtgcatgcagttgccatgaaggggggcccgacagtaagctcaagaagtctaagagacggagttgcagccactgctccagcaaggtgtgcgattctaagagctacaagtcgaaggaaccccacgaactggtgggaagttctccccatcgggaagcttctcctatgccgggagctaaagaagctggccaggggaaagacatgatggaggaggaagcccccgaagaacgagaatccactgaagccacccagtctcgcacagtgaggaccacgcggaaaggagagatgcctgtttccgcaggacttgcggtgggatctacgctgccttccccaagggaggtgaccgtgacagaacggttgctgttagacgggccaccaccgcactcccccgagaccccacagtttccccccacaaccggggcagtgctctacacagtgaagagaaaccaggtgggtcccgaagttagaagttgccccaaggctagtccacgcctccaaaaggaacgggaaggacagaaggccgtgtccgagtccgaagcactcatgctggtatgggatgcaagcgaaacagaaaaattaccaggaactgttgagccacccgcttcttttttaagccctgtgtcctctaaaacacgcgacgctggccggaggcacgtttctgggaagcccgacacgcaggagaggtggctgccatctagccgagcacgcgtgaagacccgtgacagaacttgtccagttcatgagtcaccctccgggatcgatactagtgagacctcacccaaggctccacgaggggggttggcaaaagactccggaactcaggcaaagggcccagagggtgaacaacagcctaaagcggccgaagcaacagtctgcgccaataattctaaggtgtcttctacaggtgagaaagtcgtgctctggacgagagaggccgacagggttattctcaccatgtgccaggagcagggcgcccaaccacagacatttaacatcatctctcaacaattaggcaataagactcctgctgaggtgtctcacaggtttagagaactgatgcagttattccacaccgcctgtgaggcctcatccgaggacgaagatgacgctactagtacaagtaatgcagaccagcttagcgaccacggtgatttactctccgaggaggaactcgatgagtag

SEQ ID NO: 102811 - DNA, 2913 bp, Artificial Sequence
  derived and/or modified sequence
atgctgccctgcaagaagcggcggaccaccgtgaccgagagcctgcagcacaaaggaaatcaagaagaaaacaacgtggatctcgagagcgctgtgaaacccgagagcgaccaggtgaaagatctttcaagcgtatccctctcatgggacccctcccacgggagggtcgcaggcttcgaagtgcagtcactgcaggatgccgggaatcaactcggcatggaggatacgtcactgtcttcgggcatgctgacccagaacacaaatgttccaatactcgaaggtgtggatgtggctataagccagggaattactctcccgagcctggagtcctttcaccctctgaatatacatataggcaaagggaagctgcatgctacagggtctaaacgtggaaagaagatgaccctaagacctgggcccgtgactcaagaagaccgatgcgaccaccttacccttaaggaacctttttcaggcgagcccagtgaagaagtcaaggaggaaggaggtaagccacagatgaacagtgagggggagatccccagccttccttccggatctcagtcagctaaacccgtcagccagccgcggaagtccacccaaccagacgtatgcgcaagtcctcaggagaagccactgagaactctgttccatcagcccgaagaggagatcgaagacggaggcctctttattcctatggaggaacaggacaacgaagaaagtgaaaaaaggcgcaagaagaaaaaaggcacaaaacggaaaagggacgggcgcggacaggagggtaccctggcctacgacctgaagctggacgatatgctagacagaaccctcgaggatggcgccaaacagcataatttgaccgccgtgaacgtgcggaatatcctccacgaggtgatcacaaatgagcatgttgttgcaatgatgaaggccgctatttccgagaccgaggacatgccaatgttcgagccaaagatgacacgttccaagctcaaggaggttgttgagaagggtgtggtgatcccgacttggaacatctcccctatcaaaaaggccaacgagataaaaccaccacaattcgttgacatccaccttgaagaagatgattcgtctgacgaggaataccagccagacgatgaagaggaagatgaaaccgcagaggaatcgttgctcgagtccgatgtggaatccacagcctccagcccacggggggcaaagaagtcccggctcagacaatcctcagagatgacagagaccgacgaagagtccggaattctgagtgaggctgagaaggtgaccactccagctattcggcacatctcagcagaggtagtgcccatggggccgccacccccaccgaagcccaaacagacccgagactcaaccttcatggaaaagctacacgccgtcgatgaggaacttgcctctagtcccgtgtgcatggactcttttcagcccatggatgacagcctgatagccttcagaacccggagcaaaatgccactcaaggacgttccgctgggacagttggaagccgaactccaagctcccgatatcaccccagatatgtacgatcctaacacagccgatgatgaggattggaaaatgtggctgggaggcctcatgaatgatgacgtcggcaacgaagacgaggcagacgatgacgacgatcctgaatataactttcttgaggatctagacgaacccgatacggaagactttaggactgaccgggcagtcaggattaccaaaaaggaggttaacgagcttatggaagaacttttcgagacctttcaggacgagatgggattctcaaacatggaggatgacggacccgaggaggaggagtgcgtcgccgagcccagaccaaactttaacactcctcaggcacttcgatttgaagagccactagcaaatctactcaacgaacaacataggaccgtgaaggaactgttcgagcagcttaagatgaaaaagtcaagcgccaagcagcttcaggaggtggaaaaggtcaaaccacagtccgagaaggttcaccaaacactcatactggaccctgctcagcgaaagcggctgcagcaacaaatgcaacagcatgtgcagttacttacccaaattcatctgctggccacttgtaacccgaatttgaatcctgaggcaacaactactaggatttttctgaaagagcttggtactttcgcgcagagttcaatcgcactgcatcaccaatacaaccccaaatttcagacgctatttcagccatgtaacctgatgggtgccatgcagctgatcgaagattttagtacacacgtgtctattgactgttccccacacaagacagtaaaaaaaacagccaacgagttcccgtgcctgcccaagcaggtcgcctggatccttgccacaagtaaagtttttatgtatcccgagttgcttccagtctgcagcctcaaagcaaagaatccacaggataagattgtcttcacaaaagcggaggataacctccttgcacttgggcttaagcatttcgaaggcaccgaattccccaacccgctgatatccaagtacctgctaacatgcaaaactgcccatcaactcaccgtcaggataaagaatctgaacatgaaccgggcccccgataacatcatcaagttctataaaaagacaaagcagctcccagtgcttggaaagtgttgtgaggagatccagccacaccaatggaagcctccaatcgaacgggaggagcacagactgcccttctggctgaaggcgagtcttcccagtatccaggaggaactgagacatatggcggacggtgcccggcagagctaccgcagaaagaggagaggtgttagtcagttgaaaccactgcatctgctcaaatcccccctgatgaaagagccacaaggtcagatgtag

SEQ ID NO: 102812 - DNA, 6725 bp, Artificial Sequence
  derived and/or modified sequence
atgctgccatgtaaaaaacggcgaacaaccgtgactgagtccctccagcataaggggaaccaggaagaaaacaatgtagacctggagtctgccgttaagccagaaagtgaccaggtcaaggaccttagcagcgtcagcctgtcatgggacccaagtcatggacgggtcgcagggtttgaggtgcagtccctccaggatgcaggaaatcagctaggaatggaagatacatctttatcttctggaatgctgactcagaatacaaatgtacccattctggagggagttgatgtggcgatctcccaggggatcactcttccatcgcttgaatccttccatccactgaacattcatataggaaaggggaagctccatgcaactggatccaagaggggtaagaagatgactcttcggcctgggccagtgacgcaggaagacagatgcgaccatctgacactgaaagagccattttctggggagccctccgaagaggtgaaggaggagggcggaaagcctcagatgaattccgagggagaaatcccctcacttcccagcgggtcacagagtgctaagcccgtatcccaaccaagaaagtcaacccagcctgatgtctgtgctagcccgcaggagaagccactgcgaacactcttccatcagcctgaagaagagattgaggatggaggtttatttattcctatggaagaacaggacaatgaggaatccgagaagaggcggaagaagaagaagggcactaagcgtaaaagagacggcaggggccaggagggcaccttggcatacgatctcaagttggatgatatgctggaccggacactcgaggatggtgccaaacaacataacctcactgcggtgaatgtgcgcaacattctgcatgaggtgattaccaacgaacatgtggtggcaatgatgaaggccgcaatctctgaaaccgaggatatgccaatgttcgaacctaagatgacaaggagtaagctgaaggaagtcgtcgaaaaaggcgtagtgatccccacttggaatatcagccccatcaaaaaggctaatgaaattaagcccccacaatttgtcgacattcatctggaagaagacgatagttccgacgaagaatatcagcctgacgatgaggaagaagacgaaacagctgaggagagtctgctggagagcgacgttgaatcgacggcctcaagccctcgcggtgcgaaaaagtccagactcaggcagtcaagcgaaatgaccgagactgatgaagaatcagggatcctgagcgaggctgagaaggtgacgactcctgccatcaggcacatctcggctgaggttgtgcccatggggcctccgcctccacccaagcccaaacaaaccagagactccaccttcatggagaagcttcatgccgtcgacgaagaacttgcatcatctcccgtctgtatggattctttccaaccaatggatgatagcctcatcgccttccgcacaagaagtaagatgcctctcaaggacgttcctttgggtcaactggaagcggaactacaggcgccagatattactcctgacatgtacgatcctaacactgccgacgacgaggattggaaaatgtggctcggcggactgatgaacgacgacgtgggcaacgaggatgaagcagatgatgatgacgaccctgaatataacttcctggaggatcttgacgagccagatacagaagacttccgaacagaccgagccgtacgtatcacgaagaaggaagtaaacgagttgatggaggaactgtttgaaacattccaggacgagatgggcttctctaatatggaagacgacggacctgaagaagaagagtgcgtagccgagccccgaccgaattttaacacaccccaggccctgcggtttgaggaacccctcgctaacttgctcaacgagcagcataggaccgtgaaagaactgttcgagcagcttaagatgaaaaagagttccgctaagcagttgcaggaagttgaaaaggtcaaaccgcagagcgagaaggtgcaccagacactaattctggatcccgctcagcgcaagcgattacagcagcagatgcagcagcacgtgcagctgctaacccagatccatcttctggctacttgcaaccctaatttgaacccggaagcgacaacgacacggatcttcctgaaagaactgggtacttttgctcagtcatcaatcgcactccaccatcaatacaatcctaaattccagaccctgttccagccatgtaaccttatgggcgctatgcagctcatcgaagacttctctacacacgtctccatcgactgttcacctcacaagacagttaaaaagactgccaacgagttcccctgccttcccaaacaggttgcatggattctggccacttccaaagtgttcatgtaccccgaattgctgccagtttgtagccttaaggcaaagaatccacaggataaaatcgtcttcacgaaagccgaagacaatcttcttgccttagggctcaaacactttgagggcacagagtttccaaatccccttatcagcaaatatcttttgacgtgcaagactgcccaccagctgacagtcagaattaagaatctgaatatgaacagagcgcctgataacattataaagttttataagaagaccaaacagcttccagttctgggcaagtgttgtgaagaaatccagcctcatcagtggaagcccccaattgaaagagaggagcaccggttgcccttctggttgaaagcttctttgccatctattcaggaagagcttcggcatatggcggacggggcacgggaggttgggaacatgaccggtacaaccgagataaactctgaccgctcccttgaaaaggacaatctggagctgggctccgaatcccgttaccccctgctgttaccgaaaggtgtggtgttaaagctcaaacctgtggcgacccgcttccccaggaaggcgtggagacagaaacggtcatcagtgttaaagccgcttttaatccagccctctccatcgttacagccatcttttaacccgggaaagaccccggctcgaagtacccactccgaagcgcctccttccaaaatggttctcaggattccacatcctatccagcctgccaccgttctgcaaaccgtgccaggagttcctcccctcggggtaagcggcggtgagagtttcgaaagccctgccgcacttcccgctgtacctcccgaggccagaacaagcttcccactgtctgaaagtcaaaccctactcagctccgccccagtgcctaaggtaatgctgccaagtttggcaccctcgaaatttaggaaaccctatgtgcgcaggagaccctccaagcgccgaggcgtcaaggccagcccttgtatgaagccggctcccgtcattcaccatcctgcatctgtcatcttcacagtaccagctacgactgtgaagattgtttctctcggtggcggatgtaacatgattcagccagtgaacgctgccgtggcccagagtccacagacaatcccaattacaacgctgttggtgaaccctaccagctttccttgtcctctgaatcaatccctcgtggcctctagtgtgagccccctgattgtgtccggaaattctgtgaatctgcccattccatcaaccccggaagacaaggctcacgtcaacgtggatatcgcctgtgctgtggcggacggtgagaacgccttccaaggattagagcctaagcttgagccacaggaattatctcctctcagtgctaccgtctttcctaaggttgaacattcaccgggtccgcctctggcagacgctgaatgccaggaaggactctctgagaattctgcctgtcggtggacagtggtgaaaactgaggaagggagacaggctctggagccccttcctcagggaattcaggagagcctcaacaaccctacgcctggggacctggaggaaattgtcaaaatggagcctgaggaagccagagaggaaatttcaggatcccccgagagagatatttgcgatgacattaaggtcgagcacgcggtggagctggacacaggcgctccctccgaggagctctcctccgccggagaggtgacgaagcagactgttctgcaaaaagaggaggagagatcacagcctacaaagactccgtcttcttcgcaggagcctccagacgaaggaacttccggcactgatgttaataagggatctagcaagaatgcactttcatcaatggatccggaagtccggctctcctcccctcccggaaaacctgaggactcctccagcgtggacgggcaatccgttggtactcccgtaggaccagagacagggggtgaaaaaaacggacctgaggaggaggaggaggaagatttcgacgatctgacccaggatgaggaggacgagatgagcagtgcctccgaggagtccgtcttaagcgtgccagaactccaggagacaatggaaaagctaacttggctggcttctgagagaagaatgtcccaggaaggtgaatccgaggaggaaaactcccaggaggagaactctgagcctgaggaggaggaggaggaggaagctgagggtatggagagcctgcaaaaagaggacgagatgactgacgaagccgtgggagactcagctgagaagccccctacctttgcctcccccgagacagcccctgaagtcgagacatccagaactcccccaggcgaatccatcaaagccgctggtaagggtaggaacaatcatagggcacggaacaagcgaggctcccgggctcgcgcttcaaaggatacatccaagttactgttgttgtacgatgaggacatactggaaagggacccgttgcgcgaacaaaaagatctggcattcgcacaggcatacttgaccagggttagggaggccctgcaacacatacccggtaagtacgaagatttcttacaggtaatctacgagtttgaaagctccacacagcggagaaccgcggtggacttgtacaagtcactgcagatcctgctgcaagactggcctcagctgctgaaggatttcgccgcttttctgctgccagagcaggcactcgcctgtggtctttttgaagaacagcaggccttcgaaaaatctcggaagtttctgagacaactggagatctgttttgccgagaatccttcccatcaccagaaaatcattaaggtgctccagggatgtgcggattgcttaccccaggaaattaccgagctgaagactcagatgtggcaactgcttaagggacatgaccacttgcaggacgaatttagcattttctttgaccatctccgacctgctgcctcaaggatgggagatttcgaagagatcaattggactgaggagaaggagtacgaatttgacgggtttgaagaagtggcactgccagatgtggaggaagaggaggaacccccaaaaatccctaccgcaagtaagaataaaaggaaaaaagaaatcggggttcaaaaccacgataaagaaactgaatggcctgacggagcaaaagattgcgcctgctcgtgccacgaagggggtcctgatagcaagcttaaaaagagcaagagacgctcctgcagccactgttcatccaaagtctgtgattcaaaatcatataagtcaaaagaaccacatgaacttgtaggcagctccccacaccgagaggcctcaccgatgccaggcgctaaggaggctgggcagggcaaagacatgatggaggaggaggctccagaggaaagagagtccaccgaagctacgcagtctaggacagtccgtaccactaggaagggagaaatgccggtttctgccggtctggctgtaggatcaaccctgccgtcacctagagaagtgaccgtaaccgagcgactcctcctggacgggcctccgccacatagtccggagacaccacaattcccaccgaccactggtgctgtgctgtacaccgttaagcgcaaccaggtgggccctgaggttagaagttgtcccaaggcctccccccgactccaaaaggaacgagaaggtcagaaagctgtctccgaatctgaagctctgatgcttgtgtgggacgcctccgagaccgagaagttacccggaaccgtcgaacctcccgcttccttcctgtccccggtctcatctaagacccgcgacgctggaagacggcacgtgtcagggaaacctgacacacaggagcggtggcttcccagttctcgtgctagagttaaaacccgcgaccgcacatgtcctgtccatgagtccccgagcgggatcgacacatctgagaccagcccaaaggcacctcgtgggggtctggctaaggattccggaacccaagctaaaggccctgaaggggaacagcagcccaaggcagccgaggccactgtctgtgctaacaacagcaaggtgtcctctactggcgagaaagttgtgttgtggacacgagaagctgacagagtgatccttaccatgtgtcaggaacagggggcacagccacagacttttaacataatctcccaacagctggggaataagacacctgccgaggtgagccacagattccgcgaattaatgcaattgtttcacactgcctgcgaggcttccagtgaagatgaggatgacgccaccagcacctccaatgcagatcagctctctgaccatggtgacctgctctcagaagaagaactagatgaata

SEQ ID NO: 102813 - DNA, 2913 bp, Artificial Sequence
  derived and/or modified sequence
atgctgccctgcaaaaagaggagaacgactgtgactgagagcctgcagcacaagggcaatcaagaggaaaataacgtcgatctggaatctgctgtcaaacccgagtctgaccaggtgaaagacctcagctcagtctcactgtcctgggacccttctcacggacgcgttgcgggatttgaagtacagtcattacaggatgccggaaatcagttgggtatggaggacacctccctgagcagcggaatgttaacccagaatacaaatgtcccaatcctggaaggagtcgacgtagcaatcagccagggtataaccctcccctcattagagagcttccacccgctgaacatccatattgggaagggcaagctgcatgctaccggaagtaaaagaggtaagaagatgactctcagaccgggacctgtgacccaagaggatcgttgtgaccacttgacactcaaggaacctttctctggggagcctagcgaggaagtcaaggaagaaggcggaaagcctcagatgaacagcgaaggtgaaatcccaagtttgccatccggctctcaatcagccaaaccagtgtcacagcccagaaaaagtacccaacctgacgtttgcgcttctccacaggaaaagccgctaagaacccttttccaccagccagaggaggagattgaggatgggggactgtttatacccatggaagaacaggataatgaggaaagtgagaaacgcaggaagaagaagaagggaaccaagcgtaagagggatgggaggggtcaagaaggaactctggcgtatgaccttaaactcgacgacatgcttgatcggaccctggaagacggcgctaaacagcacaatctcacggctgtgaatgtccgaaacatcctgcatgaagtgataacaaatgagcatgtggtggccatgatgaaagccgcaattagcgaaaccgaggatatgcctatgtttgagcccaaaatgactcgctccaagctgaaggaggtcgtcgaaaagggtgtggtgattcccacatggaacatttctcccatcaagaaagcaaatgaaatcaagcccccacaattcgttgatatccatctggaggaggacgactcctcagacgaagaatatcagccagatgatgaggaagaagatgagacagcagaggagagtctgttggagtcagacgtggaatccacagcaagttcacctcgcggtgcaaaaaagtcccggctgcgacagtcctcggagatgactgagaccgatgaggagtcaggcatcctgtcggaggccgagaaggtcactactccggctattcgccacatctcggccgaagtagtacccatggggcctcctccgccaccaaaacctaagcaaaccagggatagcacttttatggaaaaacttcatgctgtggatgaggagctagcctcctctcctgtgtgtatggactcctttcagcctatggacgattctctgatcgcctttaggaccagatctaagatgccccttaaggatgtgccgctgggccagcttgaggccgaattacaggctcctgacattacacctgacatgtacgacccaaataccgcggatgatgaagactggaagatgtggctaggcggattgatgaacgacgacgtcgggaacgaggacgaggcagatgatgacgacgatccagaatacaactttcttgaagacctggatgagcccgacactgaagacttcaggactgatagagctgtacggataaccaagaaagaggtcaatgaactgatggaagagctctttgaaacctttcaggacgagatgggtttcagtaatatggaagacgacggcccagaagaggaagagtgtgtcgcagagcccagaccaaatttcaacacgcctcaagccctccgctttgaggagcccctggcaaatctgcttaatgaacagcaccgcaccgtgaaagaactgttcgagcagcttaaaatgaagaagagctcagctaagcagttgcaagaagttgagaaggttaagccccaatcggagaaagtgcaccagaccctgatccttgatcctgcacagcggaaacgcctccaacagcagatgcagcaacatgtgcaacttctgacacagatacacctcttagccacttgcaatcctaacctcaacccggaagccaccacgacacggatcttcctgaaggagttaggtacttttgctcagtcgagcatcgctttgcaccatcagtacaatccgaaattccagactttgttccagccctgcaacttgatgggggctatgcagttgatcgaggacttttctactcatgtttcaattgactgcagcccgcataaaaccgtaaagaagaccgctaatgagtttccctgcctccctaagcaggtggcatggatccttgccacatccaaagtattcatgtacccagaattacttcctgtgtgtagcctgaaggccaaaaatccgcaggacaaaatcgtgtttacgaaggcagaggacaacctgctggccttaggcctcaaacattttgagggaactgagtttcctaatcccctgatcagcaagtacctcctaacatgcaagactgcacaccagctgacagtccgaatcaagaatctcaatatgaacagggcgcctgataacatcattaaattctataagaagacaaaacaactgcctgtcttgggcaaatgttgcgaggagatccagccgcaccagtggaagcccccaatagaacgggaagaacataggctgcccttctggttgaaagcctcactgcccagtattcaagaggagctgcggcacatggccgatggtgcacgccagagttataggcgaaaacggaggggagtttcccagttaaaaccattgcatttgcttaaatcccccctgatgaaggagccacaggggcaaatgtag

SEQ ID NO: 102814 - DNA, 7640 bp, Artificial Sequence
  derived and/or modified sequence
tttccgtggaatcaggccggctgaatggaacaaaagtgggacttttaaaatgttgccctgtaagaagagaagaactacagtgacagagtccctacagcataaaggcaatcaagaggaaaacaacgtagacctagaatcagccgttaaaccagaatctgaccaggttaaggacttgagttcggtgtcactatcctgggatccaagtcatggcagagtagctggcttcgaagtacagtctttgcaggatgcaggaaatcagcttggtatggaggatacatctctgagctctggaatgctcacccagaacacaaatgtaccaattctagaaggtgttgatgtggccatctctcagggaatcaccctaccttccttggagtcttttcacccccttaatatacacattggtaaaggaaaactccacgctactggctcaaagagagggaaaaaaatgacactcaggcctgggccagttacccaagaagacagatgtgatcatcttaccctaaaggagcctttttcaggagagcctagtgaagaagtcaaggaagaaggagggaaacctcaaatgaattctgaaggggagataccttccctgccatcaggcagccaatctgcaaaaccagtaagccagcccaggaaatcaacccagccagatgtttgtgcctctcctcaagaaaagccactcaggactctgtttcaccaacctgaggaagagatagaagatggtggactcttcattccaatggaagaacaagacaatgaagaaagtgagaaaaggagaaaaaagaaaaagggtaccaagaggaaacgagatggaaggggtcaagaagggaccttggcatatgacctgaaactggatgacatgcttgaccgtaccttggaggatggtgccaagcagcacaatctaacagcagtcaatgtccgaaacatccttcatgaagtaatcacaaatgaacacgtggtagctatgatgaaagcagccatcagtgagacggaagatatgccaatgtttgagcctaaaatgacacgctctaaactgaaggaagtagtggaaaaaggagtggtaattccaacatggaatatttcaccaattaagaaggccaatgaaattaagcctcctcagtttgtggatatccaccttgaagaagatgattcctcagatgaagaataccagccggatgatgaagaagaagatgaaactgctgaagagagcttattggaaagtgatgttgaaagcactgcttcatctccacgtggggcaaagaaatccagattgaggcagtcttctgagatgactgaaacagatgaggagagtggcatattatcagaggctgagaaagtcaccacaccagccatcaggcacatcagtgctgaggtagtgcccatggggcccccgccccctccaaagccgaaacagaccagagatagtactttcatggagaagttacatgcggtagatgaggagctggcttccagtccagtctgcatggattctttccagcccatggatgacagtctcattgcatttcgaacgcgttctaagatgcccctgaaagatgttcccctgggccaattagaggcagagctccaagctccagacatcactccagatatgtatgaccccaatacggcagatgatgaggactggaagatgtggctggggggacttatgaatgatgatgtggggaatgaagatgaagcagatgatgatgatgatccagaatataatttcctggaagacctcgatgaaccagacacagaggatttccggactgaccgggcagtgagaatcaccaaaaaggaagtaaatgagctgatggaagagctgtttgaaactttccaagatgagatgggattctccaacatggaagatgatggcccagaagaggaggagtgtgtagctgagcctcgtcctaactttaacacccctcaagctctacggtttgaggaaccactggccaacctgttaaatgaacaacatcggacagtgaaggagctatttgaacagctgaagatgaagaaatcttcagccaaacagctgcaggaagtagagaaggttaaaccccagagtgagaaagttcatcagactctgattctggacccagcacagaggaagagactccagcagcagatgcagcagcacgttcagctcttgacccaaatccaccttcttgccacctgcaaccccaacctcaatccggaggccactaccaccaggatatttcttaaagagctgggaacctttgctcaaagctccatcgcccttcaccatcagtacaaccccaagtttcagaccctgttccaaccctgtaacttgatgggagctatgcagctgattgaagacttcagcacacatgtcagcattgactgcagccctcataaaactgtcaagaagactgcgaatgaatttccctgtttgccaaagcaagtggcttggattctggccacaagcaaggttttcatgtatccagagttacttccagtgtgttccctgaaggcaaagaatccccaggataagatcgtcttcaccaaggctgaggacaatttgttagctttaggactgaagcattttgaaggaactgagtttcctaatcctctaatcagcaagtaccttctaacctgcaaaactgcccaccaactgacagtgagaatcaagaacctcaacatgaacagagctcctgacaacatcattaaattttataagaagaccaaacagctgccagtcctaggaaaatgctgtgaagagatccagccacatcagtggaagccacctatagagagagaagaacaccggctcccattctggttaaaggccagtctgccatccatccaggaagaactgcggcacatggctgatggtgctagagaggtaggaaatatgactggaaccactgagatcaactcagatcgaagcctagaaaaagacaatttggagttggggagtgaatctcggtacccactgctattgcctaagggtgtagtcctgaaactgaagccagttgccacccgtttccccaggaaggcttggagacagaagcgttcatcagtcctgaagcccctccttatccaacccagcccctctctccagcccagcttcaaccctgggaaaacaccagcccgatcaactcattcagaagcccctccgagcaaaatggtgctccggattcctcacccaatacagccagccactgttttacagacagttccaggtgtccctccactgggggtcagtggaggtgagagttttgagtctcctgcagcactgcctgctgtgccccctgaggccaggacaagcttccctctgtctgagtcccagactttgctctcttctgcccctgtgcccaaggtaatgctgccctcccttgccccttctaagtttcgaaagccatatgtgagacggagaccctcaaagagaagaggagtcaaggcctctccctgtatgaaacctgcccctgttatccaccaccctgcatctgttatcttcactgttcctgctaccactgtgaagattgtgagccttggcggtggctgtaacatgatccagcctgtcaatgcggctgtggcccagagtccccagactattcccatcactaccctcttggttaaccctacttccttcccctgtccattgaaccagtcccttgtggcctcctctgtctcacccttaattgtttctggcaattctgtgaatcttcctataccatccacccctgaagataaggcccacgtgaatgtggacattgcttgtgctgtggctgatggggaaaatgcctttcagggcctagaacccaaattagagccccaggaactatctcctctctctgctactgttttcccgaaagtggaacatagcccagggcctccactagcagatgcagagtgccaagaaggattgtcagagaatagtgcctgtcgctggaccgttgtgaaaacagaggaggggaggcaagctctggagccgctccctcagggcatccaggagtctctaaacaaccctacccctggggatttagaggaaattgtcaagatggaacctgaagaagctagagaggaaatcagtggatcccctgagcgtgatatttgtgatgacatcaaagtggaacatgctgtggaattggacactggtgccccaagcgaggagttgagcagtgctggagaagtaacgaaacagacagtcttacagaaggaagaggagaggagtcagccaactaaaaccccttcatcttctcaagagccccctgatgaaggaacctcagggacagatgtgaacaaaggatcatcaaagaatgctttgtcctcaatggatcctgaagtgaggcttagtagccccccagggaagccagaagattcatccagtgttgatggtcagtcagtggggactccagttgggccagaaactggaggagagaagaatgggccagaagaagaggaagaagaggactttgatgacctcacccaagatgaggaagatgaaatgtcatcagcttctgaggaatctgtgctttctgtcccagaactccaggaaacaatggagaaactgacttggctggcatctgaaaggcgcatgagtcaggagggtgagtctgaagaagagaattctcaggaggagaactctgagccagaagaagaggaggaagaagaagcagaaggaatggaaagcctgcagaaagaggatgaaatgacggatgaagcagttggagactctgctgagaagcctcctacttttgcttcacctgagactgctccagaagtggagaccagcagaactccaccaggagagagcatcaaagctgctggaaaaggccggaacaatcatcgagctcgcaacaagcggggaagtcgggctcgggccagcaaggacacctccaagctgctgttgctgtatgatgaggacattctcgagcgagatccactcagggagcagaaggacttggcctttgcccaagcttatctgaccagggtgcgagaagccctacaacatatccctggcaagtatgaagacttccttcaagtcatctatgaatttgagtcaagtacccagagacggacggctgtagatctctacaaaagcctgcaaattctgctccaagactggcctcagctgttgaaagactttgctgctttcctgttacctgagcaagctctggcctgtggattatttgaggagcagcaggcttttgagaagagccgcaagttccttcggcagctggagatttgctttgcagagaacccctcacaccaccagaagattatcaaggtcctccaaggctgtgcagactgccttccccaggagatcaccgagctcaagacacagatgtggcagctcctcaagggccacgaccacctgcaggatgagttttctatcttctttgaccacttgcgcccagcagctagccggatgggtgactttgaagagatcaattggactgaggaaaaggagtatgagtttgatggctttgaagaagtggccctgcctgatgtggaagaagaggaggagcctcccaagatacccacagcctcaaagaacaagaggaaaaaagagatcggggtccaaaatcatgataaggagactgaatggccagatggggccaaggactgtgcctgctcctgccatgaaggaggtccagattccaagctgaagaagagcaaaaggcggagctgtagccactgtagcagcaaggtctgtgacagcaaatcctacaagagcaaggagccccatgagttggtgggcagcagcccccaccgagaggctagtcctatgcctggtgctaaggaagctgggcagggcaaggatatgatggaagaggaagccccagaggagcgggagagcactgaggccacccagagcaggactgtcaggaccaccagaaagggagagatgcctgtttcagcaggattggcagtggggagcactttgccatcccctcgagaagtgactgttacagaacggctcctcctggatggcccaccacctcattcaccagagactcctcaatttccccccacaactggagctgtactgtacactgttaagagaaaccaggttgggcctgaggttcgctcctgccccaaggcatcccccagacttcagaaagagagggagggccaaaaggcagtgagtgagtcagaggctttgatgctggtctgggatgcatcagaaactgagaaattgcctggtaccgtggaaccccctgcttccttcctgagtcctgtttcctcaaagaccagagatgcagggagaagacatgtgtccgggaaaccagacactcaagagagatggctgccctcaagcagagctcgggtgaagacaagagacaggacgtgccctgtccatgaatctccatcaggaattgacacctcagagacttctcccaaagcccctagagggggtttggctaaagacagtggaacacaggccaagggtccagagggggagcagcagccaaaggccgcagaagctacggtgtgtgccaacaacagcaaggtcagctccactggggaaaaggttgtcctgtggacaagggaagctgaccgtgtgatcctcaccatgtgccaggagcaaggggcacagccacagaccttcaacatcatctcccagcagctgggaaataagacccctgctgaggtttcccaccgttttcgagaactcatgcagctcttccacactgcctgtgaagccagctctgaggatgaggatgatgcaaccagtaccagcaatgcagaccagctgtctgaccatggggaccttctgtctgaagaggagctggatgaatgagactctgggaatcatctacacaggaccaaacccaacaggcgccctggcaccggggagggggtagttgtactctgcttgtacagtccttgagcccagtttacagatctggagagcaggaggccaggacaaggacaaaggctggaggatggagtaggacccaggggctctgccatcctaggcatcattcaaggtcttttatgaagactttacagatgtcctctgtaaatagcatcgagagtggagttcagctcctttctctacttttttttggtctgatggcacatatttattgttctgtggtctaatcacagtgtttctaaatgtaaaaagtgcatatgttggtgtagctagtcccgcgacattgagctcctctgcatgaagacactgggctcctgcatccagctgtttttattgcaaactagctcctttctcccacactgggaactttagtccacgaggctgtcaccaccctggtagcactgggccaggctttgtagctcctgcagcagctctgctacgtcatcgtgctccactccagcatccatgaagctggcccagcgccgcaagtcgagtttggtgaggtctctggccaaggcttccagggtctggtgcagggacgaagaggaacacagtgccccaaacactgggatgctctccactgctgtggagggagaggaaacagagacctgtagatggatgattattctgccctgggactcgccaaactgataaggaagtccaaccttagtagacttgattgtaaactcaacaaatttggtgtattgtccccttagtacaccagtactccagaggaagaatgcttttcttgggagccatagggtgaataaaggaatgtttaactgtg

SEQ ID NO: 102815 - DNA, 5506 bp, Artificial Sequence
  derived and/or modified sequence
tggcgcatagtgttaggcgcatgctccttgatgcactgcggcgcggcgctccgaggctcggggacgcgcacgcaattcgctgttgttggctgacttccggtggtgccaaagccgtttccgtggaatcaggccggctgaatggaacaaaagtgggacttttaaaatgttgccctgtaagaagagaagaactacagtgacagagtccctacagcataaaggcaatcaagaggaaaacaacgtagacctagaatcagccgttaaaccagaatctgaccaggttaaggacttgagttcggtgtcactatcctgggatccaagtcatggcagagtagctggcttcgaagtacagtctttgcaggatgcaggaaatcagcttggtatggaggatacatctctgagctctggaatgctcacccagaacacaaatgtaccaattctagaaggtgttgatgtggccatctctcagggaatcaccctaccttccttggagtcttttcacccccttaatatacacattggtaaaggaaaactccacgctactggctcaaagagagggaaaaaaatgacactcaggcctgggccagttacccaagaagacagatgtgatcatcttaccctaaaggagcctttttcaggagagcctagtgaagaagtcaaggaagaaggagggaaacctcaaatgaattctgaaggggagataccttccctgccatcaggcagccaatctgcaaaaccagtaagccagcccaggaaatcaacccagccagatgtttgtgcctctcctcaagaaaagccactcaggactctgtttcaccaacctgaggaagagatagaagatggtggactcttcattccaatggaagaacaagacaatgaagaaagtgagaaaaggagaaaaaagaaaaagggtaccaagaggaaacgagatggaaggggtcaagaagggaccttggcatatgacctgaaactggatgacatgcttgaccgtaccttggaggatggtgccaagcagcacaatctaacagcagtcaatgtccgaaacatccttcatgaagtaatcacaaatgaacacgtggtagctatgatgaaagcagccatcagtgagacggaagatatgccaatgtttgagcctaaaatgacacgctctaaactgaaggaagtagtggaaaaaggagtggtaattccaacatggaatatttcaccaattaagaaggccaatgaaattaagcctcctcagtttgtggatatccaccttgaagaagatgattcctcagatgaagaataccagccggatgatgaagaagaagatgaaactgctgaagagagcttattggaaagtgatgttgaaagcactgcttcatctccacgtggggcaaagaaatccagattgaggcagtcttctgagatgactgaaacagatgaggagagtggcatattatcagaggctgagaaagtcaccacaccagccatcaggcacatcagtgctgaggtagtgcccatggggcccccgccccctccaaagccgaaacagaccagagatagtactttcatggagaagttacatgcggtagatgaggagctggcttccagtccagtctgcatggattctttccagcccatggatgacagtctcattgcatttcgaacgcgttctaagatgcccctgaaagatgttcccctgggccaattagaggcagagctccaagctccagacatcactccagatatgtatgaccccaatacggcagatgatgaggactggaagatgtggctggggggacttatgaatgatgatgtggggaatgaagatgaagcagatgatgatgatgatccagaatataatttcctggaagacctcgatgaaccagacacagaggatttccggactgaccgggcagtgagaatcaccaaaaaggaagtaaatgagctgatggaagagctgtttgaaactttccaagatgagatgggattctccaacatggaagatgatggcccagaagaggaggagtgtgtagctgagcctcgtcctaactttaacacccctcaagctctacggtttgaggaaccactggccaacctgttaaatgaacaacatcggacagtgaaggagctatttgaacagctgaagatgaagaaatcttcagccaaacagctgcaggaagtagagaaggttaaaccccagagtgagaaagttcatcagactctgattctggacccagcacagaggaagagactccagcagcagatgcagcagcacgttcagctcttgacccaaatccaccttcttgccacctgcaaccccaacctcaatccggaggccactaccaccaggatatttcttaaagagctgggaacctttgctcaaagctccatcgcccttcaccatcagtacaaccccaagtttcagaccctgttccaaccctgtaacttgatgggagctatgcagctgattgaagacttcagcacacatgtcagcattgactgcagccctcataaaactgtcaagaagactgcgaatgaatttccctgtttgccaaagcaagtggcttggattctggccacaagcaaggttttcatgtatccagagttacttccagtgtgttccctgaaggcaaagaatccccaggataagatcgtcttcaccaaggctgaggacaatttgttagctttaggactgaagcattttgaaggaactgagtttcctaatcctctaatcagcaagtaccttctaacctgcaaaactgcccaccaactgacagtgagaatcaagaacctcaacatgaacagagctcctgacaacatcattaaattttataagaagaccaaacagctgccagtcctaggaaaatgctgtgaagagatccagccacatcagtggaagccacctatagagagagaagaacaccggctcccattctggttaaaggccagtctgccatccatccaggaagaactgcggcacatggctgatggtgctagacagtcttacagaaggaagaggagaggagtcagccaactaaaaccccttcatcttctcaagagccccctgatgaaggaacctcagggacagatgtgaacaaaggatcatcaaagaatgctttgtcctcaatggatcctgaagtgaggcttagtagccccccagggaagccagaagattcatccagtgttgatggtcagtcagtggggactccagttgggccagaaactggaggagagaagaatgggccagaagaagaggaagaagaggactttgatgacctcacccaagatgaggaagatgaaatgtcatcagcttctgaggaatctgtgctttctgtcccagaactccaggaaacaatggagaaactgacttggctggcatctgaaaggcgcatgagtcaggagggtgagtctgaagaagagaattctcaggaggagaactctgagccagaagaagaggaggaagaagaagcagaaggaatggaaagcctgcagaaagaggatgaaatgacggatgaagcagttggagactctgctgagaagcctcctacttttgcttcacctgagactgctccagaagtggagaccagcagaactccaccaggagagagcatcaaagctgctggaaaaggccggaacaatcatcgagctcgcaacaagcggggaagtcgggctcgggccagcaaggacacctccaagctgctgttgctgtatgatgaggacattctcgagcgagatccactcagggagcagaaggacttggcctttgcccaagcttatctgaccagggtgcgagaagccctacaacatatccctggcaagtatgaagacttccttcaagtcatctatgaatttgagtcaagtacccagagacggacggctgtagatctctacaaaagcctgcaaattctgctccaagactggcctcagctgttgaaagactttgctgctttcctgttacctgagcaagctctggcctgtggattatttgaggagcagcaggcttttgagaagagccgcaagttccttcggcagctggagatttgctttgcagagaacccctcacaccaccagaagattatcaaggtcctccaaggctgtgcagactgccttccccaggagatcaccgagctcaagacacagatgtggcagctcctcaagggccacgaccacctgcaggatgagttttctatcttctttgaccacttgcgcccagcagctagccggatgggtgactttgaagagatcaattggactgaggaaaaggagtatgagtttgatggctttgaagaagtggccctgcctgatgtggaagaagaggaggagcctcccaagatacccacagcctcaaagaacaagaggaaaaaagagatcggggtccaaaatcatgataagattggcagtggggagcactttgccatcccctcgagaagtgactgttacagaacggctcctcctggatggcccaccacctcattcaccagagactcctcaatttccccccacaactggagctgtactgtacactgttaagagaaaccaggttgggcctgaggttcgctcctgccccaaggcatcccccagacttcagaaagagagggagggccaaaaggcagtgagtgagtcagaggctttgatgctggtctgggatgcatcagaaactgagaaattgcctggtaccgtggaaccccctgcttccttcctgagtcctgtttcctcaaagaccagagatgcagggagaagacatgtgtccgggaaaccagacactcaagagagatggctgccctcaagcagagctcgggtgaagacaagagacaggacgtgccctgtccatgaatctccatcaggaattgacacctcagagacttctcccaaagcccctagagggggtttggctaaagacagtggaacacaggccaagggtccagagggggagcagcagccaaaggccgcagaagctacggtgtgtgccaacaacagcaaggtcagctccactggggaaaaggttgtcctgtggacaagggaagctgaccgtgtgatcctcaccatgtgccaggagcaaggggcacagccacagaccttcaacatcatctcccagcagctgggaaataagacccctgctgaggtttcccaccgttttcgagaactcatgcagctcttccacactgcctgtgaagccagctctgaggatgaggatgatgcaaccagtaccagcaatgcagaccagctgtctgaccatggggaccttctgtctgaagaggagctggatgaatgagactctgggaatcatctacacaggaccaaacccaacaggcgccctggcaccggggagggggtagttgtactctgcttgtacagtccttgagcccagtttacagatctggagagcaggaggccaggacaaggacaaaggctggaggatggagtaggacccaggggctctgccatcctaggcatcattcaaggtcttttatgaagactttacagatgtcctctgtaaatagcatcgagagtggagttcagctcc

SEQ ID NO: 102816 - DNA, 6726 bp, Artificial Sequence
  derived and/or modified sequence
atgctgccctgcaagaagagaagaaccaccgtgaccgagagcctgcagcacaagggcaaccaggaggagaacaacgtggacctggagagcgccgtgaagcccgagagcgaccaggtgaaggacctgagcagcgtgagcctgagctgggaccccagccacggcagagtggccggcttcgaggtgcagagcctgcaggacgccggcaaccagctgggcatggaggacaccagcctgagcagcggcatgctgacccagaacaccaacgtgcccatcctggagggcgtggacgtggccatcagccagggcatcaccctgcccagcctggagagcttccaccccctgaacatccacatcggcaagggcaagctgcacgccaccggcagcaagagaggcaagaagatgaccctgagacccggccccgtgacccaggaggacagatgcgaccacctgaccctgaaggagcccttcagcggcgagcccagcgaggaggtgaaggaggagggcggcaagccccagatgaacagcgagggcgagatccccagcctgcccagcggcagccagagcgccaagcccgtgagccagcccagaaagagcacccagcccgacgtgtgcgccagcccccaggagaagcccctgagaaccctgttccaccagcccgaggaggagatcgaggacggcggcctgttcatccccatggaggagcaggacaacgaggagagcgagaagagaagaaagaagaagaagggcaccaagagaaagagagacggcagaggccaggagggcaccctggcctacgacctgaagctggacgacatgctggacagaaccctggaggacggcgccaagcagcacaacctgaccgccgtgaacgtgagaaacatcctgcacgaggtgatcaccaacgagcacgtggtggccatgatgaaggccgccatcagcgagaccgaggacatgcccatgttcgagcccaagatgaccagaagcaagctgaaggaggtggtggagaagggcgtggtgatccccacctggaacatcagccccatcaagaaggccaacgagatcaagcccccccagttcgtggacatccacctggaggaggacgacagcagcgacgaggagtaccagcccgacgacgaggaggaggacgagaccgccgaggagagcctgctggagagcgacgtggagagcaccgccagcagccccagaggcgccaagaagagcagactgagacagagcagcgagatgaccgagaccgacgaggagagcggcatcctgagcgaggccgagaaggtgaccacccccgccatcagacacatcagcgccgaggtggtgcccatgggccccccccccccccccaagcccaagcagaccagagacagcaccttcatggagaagctgcacgccgtggacgaggagctggccagcagccccgtgtgcatggacagcttccagcccatggacgacagcctgatcgccttcagaaccagaagcaagatgcccctgaaggacgtgcccctgggccagctggaggccgagctgcaggcccccgacatcacccccgacatgtacgaccccaacaccgccgacgacgaggactggaagatgtggctgggcggcctgatgaacgacgacgtgggcaacgaggacgaggccgacgacgacgacgaccccgagtacaacttcctggaggacctggacgagcccgacaccgaggacttcagaaccgacagagccgtgagaatcaccaagaaggaggtgaacgagctgatggaggagctgttcgagaccttccaggacgagatgggcttcagcaacatggaggacgacggccccgaggaggaggagtgcgtggccgagcccagacccaacttcaacaccccccaggccctgagattcgaggagcccctggccaacctgctgaacgagcagcacagaaccgtgaaggagctgttcgagcagctgaagatgaagaagagcagcgccaagcagctgcaggaggtggagaaggtgaagccccagagcgagaaggtgcaccagaccctgatcctggaccccgcccagagaaagagactgcagcagcagatgcagcagcacgtgcagctgctgacccagatccacctgctggccacctgcaaccccaacctgaaccccgaggccaccaccaccagaatcttcctgaaggagctgggcaccttcgcccagagcagcatcgccctgcaccaccagtacaaccccaagttccagaccctgttccagccctgcaacctgatgggcgccatgcagctgatcgaggacttcagcacccacgtgagcatcgactgcagcccccacaagaccgtgaagaagaccgccaacgagttcccctgcctgcccaagcaggtggcctggatcctggccaccagcaaggtgttcatgtaccccgagctgctgcccgtgtgcagcctgaaggccaagaacccccaggacaagatcgtgttcaccaaggccgaggacaacctgctggccctgggcctgaagcacttcgagggcaccgagttccccaaccccctgatcagcaagtacctgctgacctgcaagaccgcccaccagctgaccgtgagaatcaagaacctgaacatgaacagagcccccgacaacatcatcaagttctacaagaagaccaagcagctgcccgtgctgggcaagtgctgcgaggagatccagccccaccagtggaagccccccatcgagagagaggagcacagactgcccttctggctgaaggccagcctgcccagcatccaggaggagctgagacacatggccgacggcgccagagaggtgggcaacatgaccggcaccaccgagatcaacagcgacagaagcctggagaaggacaacctggagctgggcagcgagagcagataccccctgctgctgcccaagggcgtggtgctgaagctgaagcccgtggccaccagattccccagaaaggcctggagacagaagagaagcagcgtgctgaagcccctgctgatccagcccagccccagcctgcagcccagcttcaaccccggcaagacccccgccagaagcacccacagcgaggccccccccagcaagatggtgctgagaatcccccaccccatccagcccgccaccgtgctgcagaccgtgcccggcgtgccccccctgggcgtgagcggcggcgagagcttcgagagccccgccgccctgcccgccgtgccccccgaggccagaaccagcttccccctgagcgagagccagaccctgctgagcagcgcccccgtgcccaaggtgatgctgcccagcctggcccccagcaagttcagaaagccctacgtgagaagaagacccagcaagagaagaggcgtgaaggccagcccctgcatgaagcccgcccccgtgatccaccaccccgccagcgtgatcttcaccgtgcccgccaccaccgtgaagatcgtgagcctgggcggcggctgcaacatgatccagcccgtgaacgccgccgtggcccagagcccccagaccatccccatcaccaccctgctggtgaaccccaccagcttcccctgccccctgaaccagagcctggtggccagcagcgtgagccccctgatcgtgagcggcaacagcgtgaacctgcccatccccagcacccccgaggacaaggcccacgtgaacgtggacatcgcctgcgccgtggccgacggcgagaacgccttccagggcctggagcccaagctggagccccaggagctgagccccctgagcgccaccgtgttccccaaggtggagcacagccccggcccccccctggccgacgccgagtgccaggagggcctgagcgagaacagcgcctgcagatggaccgtggtgaagaccgaggagggcagacaggccctggagcccctgccccagggcatccaggagagcctgaacaaccccacccccggcgacctggaggagatcgtgaagatggagcccgaggaggccagagaggagatcagcggcagccccgagagagacatctgcgacgacatcaaggtggagcacgccgtggagctggacaccggcgcccccagcgaggagctgagcagcgccggcgaggtgaccaagcagaccgtgctgcagaaggaggaggagagaagccagcccaccaagacccccagcagcagccaggagccccccgacgagggcaccagcggcaccgacgtgaacaagggcagcagcaagaacgccctgagcagcatggaccccgaggtgagactgagcagcccccccggcaagcccgaggacagcagcagcgtggacggccagagcgtgggcacccccgtgggccccgagaccggcggcgagaagaacggccccgaggaggaggaggaggaggacttcgacgacctgacccaggacgaggaggacgagatgagcagcgccagcgaggagagcgtgctgagcgtgcccgagctgcaggagaccatggagaagctgacctggctggccagcgagagaagaatgagccaggagggcgagagcgaggaggagaacagccaggaggagaacagcgagcccgaggaggaggaggaggaggaggccgagggcatggagagcctgcagaaggaggacgagatgaccgacgaggccgtgggcgacagcgccgagaagccccccaccttcgccagccccgagaccgcccccgaggtggagaccagcagaaccccccccggcgagagcatcaaggccgccggcaagggcagaaacaaccacagagccagaaacaagagaggcagcagagccagagccagcaaggacaccagcaagctgctgctgctgtacgacgaggacatcctggagagagaccccctgagagagcagaaggacctggccttcgcccaggcctacctgaccagagtgagagaggccctgcagcacatccccggcaagtacgaggacttcctgcaggtgatctacgagttcgagagcagcacccagagaagaaccgccgtggacctgtacaagagcctgcagatcctgctgcaggactggccccagctgctgaaggacttcgccgccttcctgctgcccgagcaggccctggcctgcggcctgttcgaggagcagcaggccttcgagaagagcagaaagttcctgagacagctggagatctgcttcgccgagaaccccagccaccaccagaagatcatcaaggtgctgcagggctgcgccgactgcctgccccaggagatcaccgagctgaagacccagatgtggcagctgctgaagggccacgaccacctgcaggacgagttcagcatcttcttcgaccacctgagacccgccgccagcagaatgggcgacttcgaggagatcaactggaccgaggagaaggagtacgagttcgacggcttcgaggaggtggccctgcccgacgtggaggaggaggaggagccccccaagatccccaccgccagcaagaacaagagaaagaaggagatcggcgtgcagaaccacgacaaggagaccgagtggcccgacggcgccaaggactgcgcctgcagctgccacgagggcggccccgacagcaagctgaagaagagcaagagaagaagctgcagccactgcagcagcaaggtgtgcgacagcaagagctacaagagcaaggagccccacgagctggtgggcagcagcccccacagagaggccagccccatgcccggcgccaaggaggccggccagggcaaggacatgatggaggaggaggcccccgaggagagagagagcaccgaggccacccagagcagaaccgtgagaaccaccagaaagggcgagatgcccgtgagcgccggcctggccgtgggcagcaccctgcccagccccagagaggtgaccgtgaccgagagactgctgctggacggcccccccccccacagccccgagaccccccagttcccccccaccaccggcgccgtgctgtacaccgtgaagagaaaccaggtgggccccgaggtgagaagctgccccaaggccagccccagactgcagaaggagagagagggccagaaggccgtgagcgagagcgaggccctgatgctggtgtgggacgccagcgagaccgagaagctgcccggcaccgtggagccccccgccagcttcctgagccccgtgagcagcaagaccagagacgccggcagaagacacgtgagcggcaagcccgacacccaggagagatggctgcccagcagcagagccagagtgaagaccagagacagaacctgccccgtgcacgagagccccagcggcatcgacaccagcgagaccagccccaaggcccccagaggcggcctggccaaggacagcggcacccaggccaagggccccgagggcgagcagcagcccaaggccgccgaggccaccgtgtgcgccaacaacagcaaggtgagcagcaccggcgagaaggtggtgctgtggaccagagaggccgacagagtgatcctgaccatgtgccaggagcagggcgcccagccccagaccttcaacatcatcagccagcagctgggcaacaagacccccgccgaggtgagccacagattcagagagctgatgcagctgttccacaccgcctgcgaggccagcagcgaggacgaggacgacgccaccagcaccagcaacgccgaccagctgagcgaccacggcgacctgctgagcgaggaggagctggacgagtag

SEQ ID NO: 102817 - DNA, 2913 bp, Artificial Sequence
  derived and/or modified sequence
atgctgccctgcaagaagagaagaaccaccgtgaccgagagcctgcagcacaagggcaaccaggaggagaacaacgtggacctggagagcgccgtgaagcccgagagcgaccaggtgaaggacctgagcagcgtgagcctgagctgggaccccagccacggcagagtggccggcttcgaggtgcagagcctgcaggacgccggcaaccagctgggcatggaggacaccagcctgagcagcggcatgctgacccagaacaccaacgtgcccatcctggagggcgtggacgtggccatcagccagggcatcaccctgcccagcctggagagcttccaccccctgaacatccacatcggcaagggcaagctgcacgccaccggcagcaagagaggcaagaagatgaccctgagacccggccccgtgacccaggaggacagatgcgaccacctgaccctgaaggagcccttcagcggcgagcccagcgaggaggtgaaggaggagggcggcaagccccagatgaacagcgagggcgagatccccagcctgcccagcggcagccagagcgccaagcccgtgagccagcccagaaagagcacccagcccgacgtgtgcgccagcccccaggagaagcccctgagaaccctgttccaccagcccgaggaggagatcgaggacggcggcctgttcatccccatggaggagcaggacaacgaggagagcgagaagagaagaaagaagaagaagggcaccaagagaaagagagacggcagaggccaggagggcaccctggcctacgacctgaagctggacgacatgctggacagaaccctggaggacggcgccaagcagcacaacctgaccgccgtgaacgtgagaaacatcctgcacgaggtgatcaccaacgagcacgtggtggccatgatgaaggccgccatcagcgagaccgaggacatgcccatgttcgagcccaagatgaccagaagcaagctgaaggaggtggtggagaagggcgtggtgatccccacctggaacatcagccccatcaagaaggccaacgagatcaagcccccccagttcgtggacatccacctggaggaggacgacagcagcgacgaggagtaccagcccgacgacgaggaggaggacgagaccgccgaggagagcctgctggagagcgacgtggagagcaccgccagcagccccagaggcgccaagaagagcagactgagacagagcagcgagatgaccgagaccgacgaggagagcggcatcctgagcgaggccgagaaggtgaccacccccgccatcagacacatcagcgccgaggtggtgcccatgggccccccccccccccccaagcccaagcagaccagagacagcaccttcatggagaagctgcacgccgtggacgaggagctggccagcagccccgtgtgcatggacagcttccagcccatggacgacagcctgatcgccttcagaaccagaagcaagatgcccctgaaggacgtgcccctgggccagctggaggccgagctgcaggcccccgacatcacccccgacatgtacgaccccaacaccgccgacgacgaggactggaagatgtggctgggcggcctgatgaacgacgacgtgggcaacgaggacgaggccgacgacgacgacgaccccgagtacaacttcctggaggacctggacgagcccgacaccgaggacttcagaaccgacagagccgtgagaatcaccaagaaggaggtgaacgagctgatggaggagctgttcgagaccttccaggacgagatgggcttcagcaacatggaggacgacggccccgaggaggaggagtgcgtggccgagcccagacccaacttcaacaccccccaggccctgagattcgaggagcccctggccaacctgctgaacgagcagcacagaaccgtgaaggagctgttcgagcagctgaagatgaagaagagcagcgccaagcagctgcaggaggtggagaaggtgaagccccagagcgagaaggtgcaccagaccctgatcctggaccccgcccagagaaagagactgcagcagcagatgcagcagcacgtgcagctgctgacccagatccacctgctggccacctgcaaccccaacctgaaccccgaggccaccaccaccagaatcttcctgaaggagctgggcaccttcgcccagagcagcatcgccctgcaccaccagtacaaccccaagttccagaccctgttccagccctgcaacctgatgggcgccatgcagctgatcgaggacttcagcacccacgtgagcatcgactgcagcccccacaagaccgtgaagaagaccgccaacgagttcccctgcctgcccaagcaggtggcctggatcctggccaccagcaaggtgttcatgtaccccgagctgctgcccgtgtgcagcctgaaggccaagaacccccaggacaagatcgtgttcaccaaggccgaggacaacctgctggccctgggcctgaagcacttcgagggcaccgagttccccaaccccctgatcagcaagtacctgctgacctgcaagaccgcccaccagctgaccgtgagaatcaagaacctgaacatgaacagagcccccgacaacatcatcaagttctacaagaagaccaagcagctgcccgtgctgggcaagtgctgcgaggagatccagccccaccagtggaagccccccatcgagagagaggagcacagactgcccttctggctgaaggccagcctgcccagcatccaggaggagctgagacacatggccgacggcgccagacagagctacagaagaaagagaagaggcgtgagccagctgaagcccctgcacctgctgaagagccccctgatgaaggagccccagggccagatgtag

SEQ ID NO: 102818 - protein, 489 aa, Artificial Sequence
  derived and/or modified sequence
MFLEPQETMPQTSVVFSSILGPSCSGQVQPGMGERGGGAGGGSGDLIFQDGHLISGSLEALMEHLVPTVDYYPDRTYIFTFLLSSRVFMPPHDLLARVGQICVEQKQQLEAGPEKAKLKSFSAKIVQLLKEWTEAFPYDFQDEKAMAELKAITHRVTQCDEENGTVKKAIAQMTQSLLLSLAARSQLQELREKLRPPAVDKGPILKTKPPAAQKDILGVCCDPLVLAQQLTHIELDRVSSIYPEDLMQIVSHMDSLDNHRCRGDLTKTYSLEAYDNWFNCLSMLVATEVCRVVKKKHRTRMLEFFIDVARECFNIGNFNSMMAIISGMNLSPVARLKKTWSKVKTAKFDVLEHHMDPSSNFCNYRTALQGATQRSQMANSSREKIVIPVFNLFVKDIYFLHKIHTNHLPNGHINFKKFWEISRQIHEFMTWTQVECPFEKDKKIQSYLLTAPIYSEEALFVASFESEGPENHMEKDSWKTLRTTLLNRA

SEQ ID NO: 102819 - DNA, 1470 bp, Artificial Sequence
  derived and/or modified sequence
atgttcctggagccccaggagaccatgccccagaccagcgtggtgttcagcagcatcctgggccccagctgcagcggccaggtgcagcccggcatgggcgagagaggcggcggcgccggcggcggcagcggcgacctgatcttccaggacggccacctgatcagcggcagcctggaggccctgatggagcacctggtgcccaccgtggactactaccccgacagaacctacatcttcaccttcctgctgagcagcagagtgttcatgcccccccacgacctgctggccagagtgggccagatctgcgtggagcagaagcagcagctggaggccggccccgagaaggccaagctgaagagcttcagcgccaagatcgtgcagctgctgaaggagtggaccgaggccttcccctacgacttccaggacgagaaggccatggccgagctgaaggccatcacccacagagtgacccagtgcgacgaggagaacggcaccgtgaagaaggccatcgcccagatgacccagagcctgctgctgagcctggccgccagaagccagctgcaggagctgagagagaagctgagaccccccgccgtggacaagggccccatcctgaagaccaagccccccgccgcccagaaggacatcctgggcgtgtgctgcgaccccctggtgctggcccagcagctgacccacatcgagctggacagagtgagcagcatctaccccgaggacctgatgcagatcgtgagccacatggacagcctggacaaccacagatgcagaggcgacctgaccaagacctacagcctggaggcctacgacaactggttcaactgcctgagcatgctggtggccaccgaggtgtgcagagtggtgaagaagaagcacagaaccagaatgctggagttcttcatcgacgtggccagagagtgcttcaacatcggcaacttcaacagcatgatggccatcatcagcggcatgaacctgagccccgtggccagactgaagaagacctggagcaaggtgaagaccgccaagttcgacgtgctggagcaccacatggaccccagcagcaacttctgcaactacagaaccgccctgcagggcgccacccagagaagccagatggccaacagcagcagagagaagatcgtgatccccgtgttcaacctgttcgtgaaggacatctacttcctgcacaagatccacaccaaccacctgcccaacggccacatcaacttcaagaagttctgggagatcagcagacagatccacgagttcatgacctggacccaggtggagtgccccttcgagaaggacaagaagatccagagctacctgctgaccgcccccatctacagcgaggaggccctgttcgtggccagcttcgagagcgagggccccgagaaccacatggagaaggacagctggaagaccctgagaaccaccctgctgaacagagcctag

SEQ ID NO: 102820 - DNA, 1470 bp, Artificial Sequence
  derived and/or modified sequence
atgtttctggagcctcaggagacaatgccacagaccagcgttgtgttctcctcaatactgggaccgagttgctctggtcaggtccaacccggcatgggggaaaggggcggaggcgctggcgggggatccggagatttgatttttcaagatggtcatctcatctctggcagtcttgaggcattaatggagcatcttgtgccgacagtggattattatcccgataggacttacatttttactttcctcctgtcctccagggtgtttatgccccctcacgacctcctggcgcgtgtgggtcagatctgcgtagagcaaaagcagcaactggaagcgggaccagaaaaggctaagttgaaaagttttagtgccaaaatagtgcagctgttgaaagaatggaccgaagccttcccctacgatttccaggatgagaaagcaatggctgagctgaaggccatcactcacagggttactcaatgtgacgaggagaatggcaccgtgaagaaggctattgcccagatgactcagagtctgctcttgtcactcgccgctcggtctcaattgcaagaactgcgggaaaaattgaggccacctgcagtggataaagggcccatcctgaaaacgaaacctcctgctgcgcagaaggacatcctgggggtgtgttgcgaccccttggttctggctcagcaactcactcacattgaacttgatcgcgtctccagtatatatcctgaagacctgatgcagattgtgagccatatggatagcctagataatcatagatgtaggggcgacctgaccaagacttactcgcttgaggcctacgacaactggttcaattgtttgtccatgttggtggccactgaagtctgccgcgtggtaaagaagaaacaccggacccgaatgcttgagttctttatcgatgtagcccgagagtgtttcaatattgggaatttcaattctatgatggctatcatatctggcatgaacctgtcccctgtggctcgcctgaagaagacatggtcaaaggtcaagacggctaaatttgacgtcttagagcaccacatggacccatcttcaaatttttgcaattaccggacagcgctgcagggagctacacagcggagccagatggctaacagtagcagagaaaaaatagtgatccccgtgttcaacctgtttgtgaaagatatttactttctccacaagattcacaccaaccatctgcccaatggacacatcaatttcaagaagttctgggagatttccaggcaaattcacgagtttatgacctggacccaggtggaatgccccttcgagaaagacaaaaaaatccagtcgtatctcctgaccgctccaatctacagcgaggaggccctgttcgtggcctcctttgaatccgaagggccggagaaccacatggaaaaagactcttggaagacccttcggaccacacttctgaatagagcctag

SEQ ID NO: 102821 - DNA, 1470 bp, Artificial Sequence
  derived and/or modified sequence
atgttcctggagccccaggagaccatgccccagacctctgtggtgttcagcagcatcctgggccccagctgcagcggccaggtgcagcccggcatgggagagcggggcggcggggccggcggcggcagcggggacctgatcttccaggacggccacctgatcagcggcagcctggaggccctgatggagcacctggtgcccaccgtggactactacccagacaggacctacatcttcaccttcctgctgagcagcagggtcttcatgcctcctcatgacctgctggcccgggtgggccagatctgtgtggagcagaagcagcagctggaggccggccctgagaaggccaagctgaagagcttcagcgccaagatcgtgcagctgctgaaggagtggacagaggccttcccctatgacttccaggatgagaaggccatggccgagctgaaggccatcacccaccgggtgacccagtgtgatgaggagaatggaacagtgaagaaggccatcgcccagatgacccagagcctgctgctgagcctggccgcccggagccagctgcaggagctgcgggagaagctgcggcccccagctgtggacaagggccccatcctgaagaccaagcccccagctgcccagaaggacatcctgggcgtgtgctgtgaccccctggtgctggcccagcagctgacccacatcgagctggacagagtgagcagcatctacccagaggacctgatgcagatcgtgagccacatggacagcctggacaaccaccgctgccgcggggacctgaccaagacctacagcctggaggcctatgacaactggttcaactgcctgtccatgctggtggccacagaggtgtgccgggtggtgaagaagaagcacaggaccaggatgctggagttcttcattgatgtggcccgggagtgcttcaacatcggcaacttcaacagcatgatggccatcatcagcggcatgaacctgagccctgtggcccggctgaagaagacctggagcaaggtgaagacagccaagtttgatgtgctggagcaccacatggaccccagcagcaacttctgcaactacagaacagccctgcagggcgccacccagaggagccagatggccaacagcagccgggagaagatcgtcatccctgtgttcaacctgtttgtgaaggacatctacttcctgcacaagatccacaccaaccacctgcccaacggccacatcaacttcaagaagttctgggagatcagccggcagatccacgagttcatgacctggacccaggtggagtgcccctttgagaaggacaagaagatccagagctacctgctgacagcccccatctacagcgaggaggccctgtttgtggccagctttgagagcgagggccctgagaaccacatggagaaggacagctggaagaccctgcggaccaccctgctgaacagagcctag

SEQ ID NO: 102822 - DNA, 1470 bp, Artificial Sequence
  derived and/or modified sequence
atgttcctggagccccaggagaccatgccccagaccagcgtggtgttctcctccattttaggaccgtcttgctctgggcaagtgcagccaggaatgggagagaggggtggaggagccggggggggcagcggcgatcttatcttccaggatggccacctgattagcgggtcacttgaggctctgatggagcatctagtcccgacggtagattattatcccgacagaacctacatttttacattcctgctgagtagccgcgtattcatgccgccacacgatctgctggcgagagtgggccagatctgtgtggaacagaaacagcagcttgaggccggtcccgagaaagctaaattgaagagtttttcagctaagattgtacagctgcttaaagaatggactgaagcatttccctatgactttcaggacgagaaagctatggcagagctcaaggctatcacacatagggtgacgcaatgcgacgaggagaatggcaccgtcaaaaaagctattgctcagatgactcagtcgctgctcctgagtcttgccgctcgctcgcagttgcaggagctgcgagagaaactgcgtccccctgctgtggacaagggccccatactcaagactaaacctcccgctgcacagaaggatatcctcggagtatgttgcgatccattagtgttggcccaacaactgacgcacatcgagctcgatcgtgtttcatccatctatccagaagacctcatgcagatcgtttcacacatggattccttagacaaccaccggtgtagaggggatctgacaaaaacatattcactggaggcatacgataattggttcaactgcctgagtatgctggtagcgacagaagtctgccgggtggtgaagaagaaacataggacacggatgttggaattttttatagatgtggccagagagtgttttaacatcgggaacttcaactctatgatggcaattatctctgggatgaacctgtccccggtggcaagactcaagaagacatggtccaaagtgaagaccgctaaatttgatgttctcgaacatcatatggatccatcatctaacttttgtaactaccggaccgctctacaaggagcgacccagcggtcacaaatggctaactcctcccgcgagaaaatagtgattccagtcttcaacctgttcgtgaaggatatctattttctgcacaagatacacacaaatcatttgcccaatgggcacattaattttaaaaagttttgggaaatatctcgccagattcatgagtttatgacatggacacaggttgaatgcccgttcgagaaagacaagaagatccaatcttacctacttacagctcctatttactcggaagaggcactgtttgttgcaagttttgaatcagagggccccgagaaccatatggagaaagacagttggaaaaccctgcgcactacactgttgaatagagcctag

SEQ ID NO: 102823 - DNA, 1470 bp, Artificial Sequence
  derived and/or modified sequence
atgtttctggagcctcaggaaacaatgccccagacttccgtagtgttctccagtatactagggccatcctgttctggacaggtgcaaccgggaatgggagagagaggtggtggagcaggaggcggtagtggcgatctcatctttcaagacgggcatctgatctccggaagcttggaggcattgatggagcatctggtgcccacagtggactactaccccgaccggacatatatttttacctttctgctcagctctcgagtgtttatgcctccacatgatctcttagcgcgagtcggacagatttgtgtcgagcagaaacaacagctcgaagccggacccgagaaagccaaactgaagtcctttagtgccaaaatcgtgcaacttctgaaggaatggaccgaagcctttccttatgactttcaggatgagaaggccatggcagagctgaaggcaattacccatcgcgtgacacagtgcgacgaggagaatggcaccgtcaaaaaggctattgcccagatgacacagtcccttctgctttctctcgcagccaggtcccagctgcaggagctccgcgaaaaacttagaccccctgccgtcgataagggcccaattcttaagacaaagcccccagctgcccaaaaagatatcttaggggtttgctgtgatccactcgtgctggcccaacaactgacccacatcgaactggatagagtgtcctcaatttacccagaagacttaatgcaaatcgtctctcacatggactcgctggacaaccatcgctgtcgcggagatttaaccaaaacctattctctggaggcttatgataattggttcaattgtcttagtatgctcgttgcaactgaggtttgtcgcgttgtgaaaaagaagcacagaacgcggatgctcgagtttttcatcgatgtggctcgcgaatgcttcaatattggcaactttaacagtatgatggcaatcatttcagggatgaatctgtcccccgtggcaagattgaaaaaaacctggagtaaggttaaaacagcaaagttcgatgtcctcgaacatcacatggaccctagcagcaatttctgtaattacaggaccgcactgcaaggcgcaacgcaacggtcccagatggccaatagtagtcgtgagaaaatcgttattcccgtgttcaatctgttcgtgaaagacatttacttcttgcacaaaatccacaccaatcatttgcccaatgggcacatcaacttcaagaaattctgggaaattagtaggcagattcacgagtttatgacctggacacaggtggaatgcccgttcgaaaaagacaaaaagatacagtcatatcttctaaccgctcctatctacagcgaagaggccctctttgtggccagttttgagtctgagggtccagaaaatcacatggagaaggactcttggaaaaccctccgcaccactctactcaatagggcctag

SEQ ID NO: 102824 - DNA, 3264 bp, Artificial Sequence
  derived and/or modified sequence
ggtgcttgcttggctcgcgggcagaggagccgccgctcgctggacgccggaccgggcaggacggcgcggggagccggcggccagaatgttcctggagccccaggaaactatgccccagacgtccgttgtcttctccagcatccttgggcccagctgtagcggacaggtgcagcctggcatgggggagcgtggaggcggggccggtggcggctccggggacctcatcttccaagatggacacctcatctctgggtccctggaggccctgatggagcaccttgttcccacggtggactattaccccgataggacgtacatcttcacctttctcctgagctcccgggtctttatgccccctcatgacctgctggcccgcgtggggcagatctgcgtggagcagaagcagcagctggaagccgggcctgaaaaggccaagctgaagtctttctcagccaagatcgtgcagctcctgaaggagtggaccgaggccttcccctatgacttccaggatgagaaggccatggccgagctgaaagccatcacacaccgtgtcacccagtgtgatgaggagaatggcacagtgaagaaggccattgcccagatgacacagagcctgttgctgtccttggctgcccggagccagctccaggaactgcgagagaagctccggccaccggctgtagacaaggggcccatcctcaagaccaagccaccagccgcccagaaggacatcctgggcgtgtgctgcgaccccctggtgctggcccagcagctgactcacattgagctggacagggtcagcagcatttaccctgaggacttgatgcagatcgtcagccacatggactccttggacaaccacaggtgccgaggggacctgaccaagacctacagcctggaggcctatgacaactggttcaactgcctgagcatgctggtggccactgaggtgtgccgggtggtgaagaagaaacaccggacccgcatgttggagttcttcattgatgtggcccgggagtgcttcaacatcgggaacttcaactccatgatggccatcatctctggcatgaacctcagtcctgtggcaaggctgaagaaaacttggtccaaggtcaagacagccaagtttgatgtcttggagcatcacatggacccgtccagcaacttctgcaactaccgtacagccctgcagggggccacgcagaggtcccagatggccaacagcagccgtgaaaagatcgtcatccctgtgttcaacctcttcgttaaggacatctacttcctgcacaaaatccataccaaccacctgcccaacgggcacattaactttaagaaattctgggagatctccagacagatccatgagttcatgacatggacacaggtagagtgtcctttcgagaaggacaagaagattcagagttacctgctcacggcgcccatctacagcgaggaagctctcttcgtcgcctcctttgaaagtgagggtcccgagaaccacatggaaaaagacagctggaagaccctcaggaccacccttctgaacagagcctgaggcggatgcagcccgcgacgccagaggaagcacgtgcactaactgggtttaaattttgactgatgtgggttgagatgaggaggcctcactggttggggtccattttgtatataacttttatgagaaaaaaatggtaattatttcacgcatcaacctttggcacttacaaagttttttttgtttattttaaataacagggcagggccctgctttggggagggggaggggagagtatcatgggagatggtatccatgataacatcttattctaatgaaatgtagatttttattttctacttttgattattaacatcttatgaaaaaaatattttaaaaaacccagccaaaaccaacgtgagccctgcctgctcggacgcctttccagccagtgtctctgacgtcggggttagtgccttagagggtactggggtctggtcttcctgctctgtggtttgggctgcggtgagtcccactccacctgggcgcctgccctcaggagcctgggctgcgaggctccataggagggctggtggctgggaggtcgcgtccgcacacttctggaagtgagcctttgagtacgggctgtccaaagtttacattttcattttcctttcagggatttgtggggtcagggaggggcagggggcacctggcagcatattttctgtgacaatgtgtccagcaaatcattcttcaactacattttagaaaggaggaaatctaaaataaggtaagggagggaagcatggagttgtcagttttctgggctgtgactgaaagacacactgagctgtgatgaagaaaaatacatggccgactccagggtggtgacatttagagctagtcttgaaacctatcatctacagaggggagggcagccaacagccctcttcccacctgggtaggcagcgccctaattggaattggaaacagaaaattcgccaggccatactgctggagcccattcagataaaactgcccaatactgagaggtgttttctacacccagctagaggagcacactccattttcccatgtctgacttcgtggtgtgagccctgggccctactgaccatggcgcaggacagctgtccttcagaaagcacacggtcaatccacgtggaccgtctccctcgcaggaactccgcatccttgtccctctgcattcccagtttccgcaggagccttgatcaatggggaagcctgggtgaggatgggccaggtcccaattcccaaagctcctggaagagcctgaagacattgggaaaggctgggcctggggaggaggcagccctgggcccgctgcccatgcctctggtcctgggtggagcaggaatagttccactgtattgtcacagtgtgtttgcactttctgaggttctagctagtacagattgtatattgatagtacatattgctttgtttatgtctttgagatgagaaaggcttaaaacttgagaatatatatttggaatacagccttagaacggtttctgtacacacccacgtgcacttcacgggtgatcagttctagtacctacttgaaacagtgtctgtctgctactttattttcccaatttgatacataccctgatttgatgttttggtatttgagatgaactctgagtatgaagctgtaccataatgcaggacgtcagttttggtgtgactggacatacttgcttcaataaaagaatacatcactcccc

SEQ ID NO: 102825 - DNA, 4104 bp, Artificial Sequence
  derived and/or modified sequence
tcatgatggctattgctgtgactggagccaagagcccagtgtgcaattcttccttgggaaggggctgcctggtggtggacacagctgttcagatacacaggtttgcagctgcctgtcgaagtgcctgcccctgctgttggggcaaggaggaagcaggtgcaagaacaagcgacctcagggctgggtgggggtggccggcaggggaccccgcagtggaagtgctgtcatcatcaccatttcacagctgggaaggtggagggctggccagatgcacccaggaacaaggagtgggcctgctgcagggccggcattcctgcccgggaaaagccatgtagggaacctgcctctccacttggcactgagccctggagaccctcctcgaagtgctccgtggctgggcagggtgggccctgctaggtttgagctttcgggggtaggggctcatggggcatcccccagacctgcagggtcttggtttgttggatgcaggagacctagccctgggccgtgtccccaggtgggtctccaggtaggcaggacagaaggaacccagagcaccccacctctcaggtcagtgcggctccacacggtccccctcaggctctgctgactccccaaagggattctgagcatgtgcagaacctctgcttgcctgggacacccctgcatgctcctcctccaggcccccaccctcgaaggcgtggccttcccagcccctctctggctgctgaccagtgggctgggtccccaggatggctcctcaactcctaggcaggcctcctagcactgaggcaggtctctctgcaggctggacatggagtggccttgccctgtgggggatcggctggggctgagtttgtggggtgtcagagtgcatcccccacatactacctcctgaccagagcagcctgcagtgggagaggccagtggctcggcaaatgccctctctgatgaccccaagagcttggggtgaggaggcccaactgaccaaggttaccacctgctggtcgccttttgaacccagaactgtgtgatcttggggaggttgtcccacagtgcattggcctcagatgcctgagacagtgctgagcagctgtgggcaacaaggggtttgtgagcccgccttcgtgacttcattgcacaaatggtcactgagtgccaccctgggccagcgataggatacacaggtgaatgatacagccacttctggctttgtgggtcaacagtctaggttaaacccagggaggcttcctggaggtggtgacacctaggctggacttggaactcctggggtttccttagttgagttccttcccactgggcctcagtttcaccatctgaaaaatgaaggattggctcacatcagtggttcctgggctggagtggagagcgcgttggggtacagaagcagtccaccccagagtttctgaccagcaggtctggggctaggcctgagaatgtgcattctaacttgtgtgaggcaccgctgctggcctgagtttgaagggagcattgtatgagtctgagccatgacctccctgtcctggagtgggggcagcactgagcctgggggcctggacattccacccagcgtcatcgtggggcctttggttgcgttcttgctctccttgccaaagactttctaagaattccaaggaaacctttaggtgtttggtgggaaaaccagtgacgtctgggccagatgctcttttttccctggtgggagggacagggacgtgctgtgtgtgtgtgtgtgtgtgtgtgtgtgtgtgtgtgtgtgtgtgtgtgtgtgttgacgtggggggtgtgggcaggtggtccgctctctccttgtaaggcccctacagggcagaggcccacggtcctgtcatggcactgaagtaatcatggcaacaatttgctctgtgcagtggggaaactaaggccaaaatggcaggagggtctcgcttctccacctgacctcagccgctggcacctgtgctgccttcccttgagggccaggaggttgaggctggctctgtgtgcaggcaaggccacaggcaggccacctctggccctcaggctggcagttgctgcatcgtccagtccccacttggctcctcccaggcatggctggctgtctggggcactggggaaacaggcccagagggcttcagactcccctaggcttcacaagaactcccagctgcagggtgtggtgagaccctgagccccatcacagcgggccatgctgtggaggacagtcccagtgtgggcaccgaggcctccaggaggcccagctgctcagacatctgcagctcaggggcactcagactcacaggccccaaagccagttccagatctctctctagccctgcccacagccctgcctcatactggtcagccacttggcccaagaccttcaccatgtggagtggccctgctcgccactcctgctaccgcctgcctgagcaagctctccttgggctgtggcaagacccaccatccacgtggcagccaccgaaactatgccccagacgtccgttgtcttctccagcatccttgggcccagctgtagcggacaggtgcagcctggcatgggggagcgtggaggcggggccggtggcggctccggggacctcatcttccaagatggacacctcatctctgggtccctggaggccctgatggagcaccttgttcccacggtggactattaccccgataggacgtacatcttcacctttctcctgagctcccgggtctttatgccccctcatgacctgctggcccgcgtggggcagatctgcgtggagcagaagcagcagctggaagccgggcctgaaaaggccaagctgaagtctttctcagccaagatcgtgcagctcctgaaggagtggaccgaggccttcccctatgacttccaggatgagaaggccatggccgagctgaaagccatcacacaccgtgtcacccagtgtgatgaggagaatggcacagtgaagaaggccattgcccagatgacacagagcctgttgctgtccttggctgcccggagccagctccaggaactgcgagagaagctccggccaccggctgtagacaaggggcccatcctcaagaccaagccaccagccgcccagaaggacatcctgggcgtgtgctgcgaccccctggtgctggcccagcagctgactcacattgagctggacagggtcagcagcatttaccctgaggacttgatgcagatcgtcagccacatggactccttggacaaccacaggtgccgaggggacctgaccaagacctacagcctggaggcctatgacaactggttcaactgcctgagcatgctggtggccactgaggtgtgccgggtggtgaagaagaaacaccggacccgcatgttggagttcttcattgatgtggcccgggagtgcttcaacatcgggaacttcaactccatgatggccatcatctctggcatgaacctcagtcctgtggcaaggctgaagaaaacttggtccaaggtcaagacagccaagtttgatgtcttggagcatcacatggacccgtccagcaacttctgcaactaccgtacagccctgcagggggccacgcagaggtcccagatggccaacagcagccgtgaaaagatcgtcatccctgtgttcaacctcttcgttaaggacatctacttcctgcacaaaatccataccaaccacctgcccaacgggcacattaactttaagaaattctgggagatctccagacagatccatgagttcatgacatggacacaggtagagtgtcctttcgagaaggacaagaagattcagagttacctgctcacggcgcccatctacagcgaggaagctctcttcgtcgcctcctttgaaagtgagggtcccgagaaccacatggaaaaagacagctggaagaccctcaggaccacccttctgaacagagcctgaggcggatgcagcccgcgacgccagaggaagcacgtgcactaactgggtttaaattttgactgatgtgggttgagatgaggaggcctcactggttggggtccattttgtatataacttttatgagaaaaaaatggtaattatttcacgcatc

SEQ ID NO: 102826 - protein, 179 aa, Artificial Sequence
  derived and/or modified sequence
MQFRLFSFALIILNCMDYSHCQGNRWRRSKRGCRIENCDSCFSKDFCTKCKVGFYLHRGRCFDECPDGFAPLEETMECVGCEVGHWSEWGTCSRNNRTCGFKWGLETRTRQIVKKPVKDTILCPTIAESRRCKMTMRHCPGGKRTPKAKEKRNKKKKRKLIERAQEQHSVFLATDRANQ

SEQ ID NO: 102827 - DNA, 540 bp, Artificial Sequence
  derived and/or modified sequence
atgcagtttcgtctgttttcatttgccctgataatcctcaactgtatggactacagccattgtcaggggaacagatggcgccggagtaaaagggggtgccggatagagaactgcgatagctgttttagcaaggatttttgcactaaatgcaaagtaggattttatctgcacagaggaagatgtttcgatgaatgcccggatggctttgcccctctggaggaaaccatggaatgtgtggggtgcgaagttggacactggtctgagtggggcacatgcagcagaaacaaccgcacctgtggctttaagtggggcctcgaaacaagaacaagacagatcgtgaaaaaacccgtgaaggataccatcttatgccccacgatcgcagaatctcgtagatgtaaaatgaccatgcgccattgtcccggcggaaagcggacacccaaagcgaaggagaagcgaaacaaaaaaaagaaacggaagttaattgagcgggcccaggagcaacactccgtgttcctggctacagatagggcaaaccagtag

SEQ ID NO: 102828 - DNA, 540 bp, Artificial Sequence
  derived and/or modified sequence
atgcagttccggttgttcagcttcgccttaatcatcctgaattgcatggattattctcactgccagggcaatcgctggcgtcggagtaagcgcggttgcaggatagagaactgcgacagctgcttttcaaaagacttttgtacaaagtgcaaagttgggttctatctccatagaggcaggtgctttgatgaatgcccagatggcttcgcacccttagaagaaacaatggaatgtgtggggtgtgaagtcgggcattggtccgagtgggggacttgttcgaggaataaccgcacctgcgggttcaaatggggtctggaaacccgaactagacaaatcgtcaagaagccggtcaaagatacaatcctgtgccccacaattgctgagtcccgaagatgcaaaatgacaatgaggcattgtcccggcggtaagagaacgcccaaggccaaggaaaaacgaaacaaaaagaagaagagaaagcttattgaacgagcccaggagcaacacagcgtgtttttagccaccgatcgagccaatcagtag

SEQ ID NO: 102829 - DNA, 540 bp, Artificial Sequence
  derived and/or modified sequence
atgcagttccgcctcttctcctttgccctgatcatcctgaactgcatggactacagccactgccagggcaaccgctggaggaggagcaagaggggctgcagaattgagaactgtgacagctgcttcagcaaggacttctgcaccaagtgcaaggtgggcttctacctgcaccggggccgctgctttgatgagtgcccagatggctttgcccccctggaggagaccatggagtgtgtgggctgtgaggtgggccactggagcgagtggggcacctgcagcaggaacaacagaacctgtggcttcaagtggggcctggagaccaggacccggcagatcgtgaagaagcctgtgaaggacaccatcctgtgccccaccatcgccgagagccgccgctgcaagatgaccatgaggcactgccctgggggcaagaggacccccaaggccaaggagaagaggaacaagaagaagaagaggaagctgattgagcgggcccaggagcagcacagcgtcttcctggccacagaccgggccaaccagtag

SEQ ID NO: 102830 - DNA, 540 bp, Artificial Sequence
  derived and/or modified sequence
atgcagttccggctgttcagcttcgccctgatcatcctgaactgcatggactattcacactgtcagggaaaccgatggcgtagatcgaaacgaggttgtcgaatcgaaaattgtgattcatgctttagcaaagatttttgtactaagtgtaaagtggggttctacctgcacagagggagatgctttgatgaatgcccagatggttttgcacctttggaagagaccatggagtgcgtaggctgtgaggttgggcattggagtgagtgggggacctgctctcgaaacaatcggacgtgtgggtttaagtggggattagaaacccggacacggcagatagtaaaaaagcccgtgaaggatactatcctgtgtccaacgattgcagaatctcgacggtgcaaaatgacaatgcgccattgcccaggagggaagagaactcctaaagccaaagagaagcgaaacaagaaaaaaaaaagaaagctgatcgagagggcacaggagcagcactcagtctttcttgccactgatagggcaaaccagtag

SEQ ID NO: 102831 - DNA, 540 bp, Artificial Sequence
  derived and/or modified sequence
atgcagttccggctgttcagcttcgccctgatcatcctgaactgcatggactactctcactgccagggcaaccgctggcgccgaagcaaaagaggttgccgcatcgaaaactgcgacagctgtttttcaaaagatttttgcactaagtgcaaagtgggtttctatctccatcgaggaaggtgctttgatgagtgcccagatgggttcgccccactcgaagaaactatggaatgcgtaggttgtgaagttggacactggagtgagtgggggacatgctcaaggaataaccggacatgcgggtttaaatggggactcgaaactcggaccaggcaaatcgtgaagaagcctgtgaaagataccattctgtgccccacaatcgccgaatcaaggaggtgcaaaatgactatgcggcattgtccagggggcaaacgcacccccaaggctaaggagaaacgtaataaaaaaaaaaagcgaaaactgatcgaaagagcacaagaacagcactcggtgttcctagctaccgacagagccaaccaatag

SEQ ID NO: 102832 - DNA, 540 bp, Artificial Sequence
  derived and/or modified sequence
atgcaattcagactgttcagcttcgcattgattatactaaattgtatggactattctcactgtcagggaaatcgctggcgcaggagcaagcgaggctgtcgcatcgagaattgcgatagttgcttcagcaaagacttctgcacgaaatgcaaggtgggtttttacctgcaccggggtcgatgtttcgacgaatgcccggatggatttgcccctctggaggaaacaatggagtgcgtagggtgtgaggtcggtcattggagtgagtggggcacctgttcccgaaacaatcggacgtgcgggttcaagtggggacttgaaacgcgcacgcggcaaattgttaaaaagcctgttaaagatacaatcctgtgccccactattgcagaatcaaggcgatgcaagatgacgatgcgacattgccccggaggaaagcgcacaccaaaggctaaagagaagaggaataagaaaaaaaaacgaaagttgattgagagagcccaagaacagcactcggtattcttggctactgatcgggctaatcagtag

SEQ ID NO: 102833 - DNA, 540 bp, Artificial Sequence
  derived and/or modified sequence
atgcagtttagactcttctctttcgctcttattattctgaattgtatggattattcccattgtcagggtaacagatggaggcgtagtaagcgtggctgtagaatcgagaattgcgattcatgtttttccaaagatttctgcaccaagtgtaaagtcgggttttacctccaccgcggaagatgttttgatgagtgtcccgatgggttcgcccctctggaagagaccatggaatgcgtaggctgcgaggtgggacactggagcgagtgggggacctgttcccgcaataaccggacatgcggattcaagtgggggctcgaaactcggactagacagattgtgaaaaagccggtgaaagataccattctgtgtccaactatcgccgagagccggagatgtaagatgactatgcgccattgcccaggtggcaagcgcactcccaaagcaaaggagaagcgaaacaaaaaaaagaagcgcaaactcatcgaacgcgctcaggaacagcacagcgtgttccttgcaacagaccgcgctaaccagtag

SEQ ID NO: 102834 - DNA, 2957 bp, Artificial Sequence
  derived and/or modified sequence
agcctagacttagatgccttggaccacagcaccacctacttatagaagcatcccaagcctcagccggtctgcatctccatcggaaagtgcgcttgccacatcccttcggatcacttcgtcctcccgagagcgttctgccttctacagctcggaaagaaagaaatcttagctgtgaagtgaccgtggagaaagcgcaggaagcgacacaattggttagggaggcagagagtgtgagcgggcgcaccccttgcctggggaccgcgctcgcgggcggggacggagcatcccagtggctgcacccgccgctccgcgctcctgcctggcgtcgccaaccccgcggcggccgctggaattccagagctgccaggcgctcccagccggtctcggcaaacttttccccagcccacgtgctaaccaagcggctcgcttcccgagcccgggatggagcaccgcgcctagggaggccgcgccgcccgagacgtgcgcacggttcgtggcggagagatgctgatcgcgctgaactgaccggtgcggcccgggggtgagtggcgagtctccctctgagtcctccccagcagcgcggccggcgccggctctttgggcgaaccctccagttcctagactttgagaggcgtctctcccccgcccgaccgcccagatgcagtttcgccttttctcctttgccctcatcattctgaactgcatggattacagccactgccaaggcaaccgatggagacgcagtaagcgaggatgcagaatagaaaactgtgattcttgctttagcaaagacttttgtaccaagtgcaaagtaggcttttatttgcatagaggccgttgctttgatgaatgtccagatggttttgcaccattagaagaaaccatggaatgtgtgggatgtgaagttggtcattggagcgaatggggaacttgtagcagaaataatcgcacatgtggatttaaatggggtctggaaaccagaacacggcaaattgttaaaaagccagtgaaagacacaatactgtgtccaaccattgctgaatccaggagatgcaagatgacaatgaggcattgtccaggagggaagagaacaccaaaggcgaaggagaagaggaacaagaaaaagaaaaggaagctgatagaaagggcccaggagcaacacagcgtcttcctagctacagacagagctaaccaataaaacaagagatccggtagatttttaggggtttttgtttttgcaaatgtgcacaaagctactctccactcctgcacactggtgtgcagcctttgtgctgctctgcccagtatctgttcccagtaacatggtgaaaggaagcaccaccagcatggcccctgtgttatttatgctttgatttgaatctggagactgtgaaggcaggagtaagtgcacagcccgtgacttggctcagtgtgtgctgagagaatccgtccccggcaccatggacatgctagaggtgtgaggctgcagaacaccgctggaggacggacttgtgcctatttatgtgaaagaagatgcttggcaggcaatgcgctactcactcgtgacctttatttctcacattgtgcattttcaaggatatgtttgtgtggatatctgcttagtgttaccacatggtattctcagcatgttaccttcacactgttgtgcgatgaaactgcttttagctgaggatatgctctggaaattcctgctcagtttcactgcagccctaatatgtacatatactgcaggagctacatataaagctcttatttactgtatatttatgctttcttgtgggtaacaagtcatacctgattaatatgatgccactttgtttctagtggttcctaacccattgtctgataaatgacttttctagtttggggaattgacacttgttttgttgcctcttgaaactttttttttttcccctcattgtgggcttatttctcattgtaagggtaggataaactagtttttgtatatagagtcaaatgaccagtgtcaaagagtttgcatattgggtagaccttctccactccacatgtcccacacatatagataaagcagcaggcggcatctggcaatcagaagcccaaactgcctttgagtctaagatgtgatgactttgatgaaacacaactgaaaacatgagggactatatccagtcacttgtagccagtttcacaggccagctacagaattgtccaaacaaacattatttctgactgcaatttttttcccccaaatttaaagcaatccctggctttaaatgacaaggcacctaccaatgttcttgggtcactgaagaagctactaccatgagcctgggcatagaattttaggagataaaaggatgaatttctgtgactgccagtcagatcttaacaggtttctgttgagccagaatctgtttcagatccaagatggagaggaacactatggaaacttcccaggtgactttcagagcagttgtttcaaacacatcattgtccttttaggggaaccagtttttagaaggttgtgaattggctttttcacaaagcatgattatcttcctggctgatccaggagaaaattagaacagaaaaataatggttgtggattttgaaacaaagcaaggtaaagccttttttttttcaccttgcattggcaaaactacctcttcagtgtttttaacttttgattcaaaagcatcttaccaataaggataaatatcatatacatcgttatgaaaatattgctatgagataataagccacatatgaatgttgtatacaactttagggtttacatttaatcctgaagtgttacctcctttcatgtctatttacactattttcccatttactaagtggggagggggtctccttatatagtgcttcatcgttaataagtcaatacctgttgttcctgggatgttcttttttgtgcattaaaaacttcaaaatta

SEQ ID NO: 102835 - DNA, 2748 bp, Artificial Sequence
  derived and/or modified sequence
gcgcacggtaggcaacccacaccaaggcagccgcagctgcggcgcttgggtacaccgccgtggactccaaatggcctaagagcgttcttttagccctgcgctctcagtgcctttagagttctttcctttccccggagcgccggcacaacgcattatgccgctgggtcggagcttagggctcggcagaggttgctaattcactgattataatcaccttcctctccaactcgtccgcagctgcccgctctggattaagccgctccgcggctcgtgctaggcagttcgtggcggagagatgctgatcgcgctgaactgaccggtgcggcccgggggtgagtggcgagtctccctctgagtcctccccagcagcgcggccggcgccggctctttgggcgaaccctccagttcctagactttgagaggcgtctctcccccgcccgaccgcccagatgcagtttcgccttttctcctttgccctcatcattctgaactgcatggattacagccactgccaaggcaaccgatggagacgcagtaagcgaggatgcagaatagaaaactgtgattcttgctttagcaaagacttttgtaccaagtgcaaagtaggcttttatttgcatagaggccgttgctttgatgaatgtccagatggttttgcaccattagaagaaaccatggaatgtgtgggatgtgaagttggtcattggagcgaatggggaacttgtagcagaaataatcgcacatgtggatttaaatggggtctggaaaccagaacacggcaaattgttaaaaagccagtgaaagacacaatactgtgtccaaccattgctgaatccaggagatgcaagatgacaatgaggcattgtccaggagggaagagaacaccaaaggcgaaggagaagaggaacaagaaaaagaaaaggaagctgatagaaagggcccaggagcaacacagcgtcttcctagctacagacagagctaaccaataaaacaagagatccggtagatttttaggggtttttgtttttgcaaatgtgcacaaagctactctccactcctgcacactggtgtgcagcctttgtgctgctctgcccagtatctgttcccagtaacatggtgaaaggaagcaccaccagcatggcccctgtgttatttatgctttgatttgaatctggagactgtgaaggcaggagtaagtgcacagcccgtgacttggctcagtgtgtgctgagagaatccgtccccggcaccatggacatgctagaggtgtgaggctgcagaacaccgctggaggacggacttgtgcctatttatgtgaaagaagatgcttggcaggcaatgcgctactcactcgtgacctttatttctcacattgtgcattttcaaggatatgtttgtgtggatatctgcttagtgttaccacatggtattctcagcatgttaccttcacactgttgtgcgatgaaactgcttttagctgaggatatgctctggaaattcctgctcagtttcactgcagccctaatatgtacatatactgcaggagctacatataaagctcttatttactgtatatttatgctttcttgtgggtaacaagtcatacctgattaatatgatgccactttgtttctagtggttcctaacccattgtctgataaatgacttttctagtttggggaattgacacttgttttgttgcctcttgaaactttttttttttcccctcattgtgggcttatttctcattgtaagggtaggataaactagtttttgtatatagagtcaaatgaccagtgtcaaagagtttgcatattgggtagaccttctccactccacatgtcccacacatatagataaagcagcaggcggcatctggcaatcagaagcccaaactgcctttgagtctaagatgtgatgactttgatgaaacacaactgaaaacatgagggactatatccagtcacttgtagccagtttcacaggccagctacagaattgtccaaacaaacattatttctgactgcaatttttttcccccaaatttaaagcaatccctggctttaaatgacaaggcacctaccaatgttcttgggtcactgaagaagctactaccatgagcctgggcatagaattttaggagataaaaggatgaatttctgtgactgccagtcagatcttaacaggtttctgttgagccagaatctgtttcagatccaagatggagaggaacactatggaaacttcccaggtgactttcagagcagttgtttcaaacacatcattgtccttttaggggaaccagtttttagaaggttgtgaattggctttttcacaaagcatgattatcttcctggctgatccaggagaaaattagaacagaaaaataatggttgtggattttgaaacaaagcaaggtaaagccttttttttttcaccttgcattggcaaaactacctcttcagtgtttttaacttttgattcaaaagcatcttaccaataaggataaatatcatatacatcgttatgaaaatattgctatgagataataagccacatatgaatgttgtatacaactttagggtttacatttaatcctgaagtgttacctcctttcatgtctatttacactattttcccatttactaagtggggagggggtctccttatatagtgcttcatcgttaataagtcaatacctgttgttcctgggatgttcttttttgtgcattaaaaacttcaaaatta

SEQ ID NO: 102836 - DNA, 540 bp, Artificial Sequence
  derived and/or modified sequence
atgcagttcagactgttcagcttcgccctgatcatcctgaactgcatggactacagccactgccagggcaacagatggagaagaagcaagagaggctgcagaatcgagaactgcgacagctgcttcagcaaggacttctgcaccaagtgcaaggtgggcttctacctgcacagaggcagatgcttcgacgagtgccccgacggcttcgcccccctggaggagaccatggagtgcgtgggctgcgaggtgggccactggagcgagtggggcacctgcagcagaaacaacagaacctgcggcttcaagtggggcctggagaccagaaccagacagatcgtgaagaagcccgtgaaggacaccatcctgtgccccaccatcgccgagagcagaagatgcaagatgaccatgagacactgccccggcggcaagagaacccccaaggccaaggagaagagaaacaagaagaagaagagaaagctgatcgagagagcccaggagcagcacagcgtgttcctggccaccgacagagccaaccagtag

SEQ ID NO: 102837 - protein, 367 aa, Artificial Sequence
  derived and/or modified sequence
MEDELEPSLRPRTQIQGRILLLTICAAGIGGTFQFGYNLSIINAPTLHIQEFTNETWQARTGEPLPDHLVLLMWSLIVSLYPLGGLFGALLAGPLAITLGRKKSLLVNNIFVVSAAILFGFSRKAGSFEMIMLGRLLVGVNAGVSMNIQPMYLGESAPKELRGAVAMSSAIFTALGIVMGQVVGLRELLGGPQAWPLLLASCLVPGALQLASLPLLPESPRYLLIDCGDTEACLAALRRLRGSGDLAGELEELEEERAACQGCRARRPWELFQHRALRRQVTSLVVLGSAMELCGNDSVYAYASSVFRKAGVPEAKIQYAIIGTGSCELLTAVVSVSLEGALPPPALWGGTPRSSALNQFTLQKKKK

SEQ ID NO: 102838 - protein, 463 aa, Artificial Sequence
  derived and/or modified sequence
MEDELEPSLRPRTQIQGRILLLTICAAGIGGTFQFGYNLSIINAPTLHIQEFTNETWQARTGEPLPDHLVLLMWSLIVSLYPLGGLFGALLAGPLAITLGRKKSLLVNNIFVVSAAILFGFSRKAGSFEMIMLGRLLVGVNAGVSMNIQPMYLGESAPKELRGAVAMSSAIFTALGIVMGQVVGLRELLGGPQAWPLLLASCLVPGALQLASLPLLPESPRYLLIDCGDTEACLAALRRLRGSGDLAGELEELEEERAACQGCRARRPWELFQHRALRRQVTSLVVLGSAMELCGNDSVYAYASSVFRKAGVPEAKIQYAIIGTGSCELLTAVVSVAGVDEGWGVQAGLTSTSPPPRPRQSSFPWTLYLAMACIFAFILSFGIGPAGVTGILATELFDQMARPAACMVCGALMWIMLILVGLGFPFIMVLGSFLIAGGLVPLPLCPFPWCLCLWGHLHWPVPS

SEQ ID NO: 102839 - DNA, 1104 bp, Artificial Sequence
  derived and/or modified sequence
atggaggacgagctggagcccagcctgagacccagaacccagatccagggcagaatcctgctgctgaccatctgcgccgccggcatcggcggcaccttccagttcggctacaacctgagcatcatcaacgcccccaccctgcacatccaggagttcaccaacgagacctggcaggccagaaccggcgagcccctgcccgaccacctggtgctgctgatgtggagcctgatcgtgagcctgtaccccctgggcggcctgttcggcgccctgctggccggccccctggccatcaccctgggcagaaagaagagcctgctggtgaacaacatcttcgtggtgagcgccgccatcctgttcggcttcagcagaaaggccggcagcttcgagatgatcatgctgggcagactgctggtgggcgtgaacgccggcgtgagcatgaacatccagcccatgtacctgggcgagagcgcccccaaggagctgagaggcgccgtggccatgagcagcgccatcttcaccgccctgggcatcgtgatgggccaggtggtgggcctgagagagctgctgggcggcccccaggcctggcccctgctgctggccagctgcctggtgcccggcgccctgcagctggccagcctgcccctgctgcccgagagccccagatacctgctgatcgactgcggcgacaccgaggcctgcctggccgccctgagaagactgagaggcagcggcgacctggccggcgagctggaggagctggaggaggagagagccgcctgccagggctgcagagccagaagaccctgggagctgttccagcacagagccctgagaagacaggtgaccagcctggtggtgctgggcagcgccatggagctgtgcggcaacgacagcgtgtacgcctacgccagcagcgtgttcagaaaggccggcgtgcccgaggccaagatccagtacgccatcatcggcaccggcagctgcgagctgctgaccgccgtggtgagcgtgagcctggagggcgccctgcccccccccgccctgtggggcggcacccccagaagcagcgccctgaaccagttcaccctgcagaagaagaagaagtag

SEQ ID NO: 102840 - DNA, 1392 bp, Artificial Sequence
  derived and/or modified sequence
atggaggacgagctggagcccagcctgagacccagaacccagatccagggcagaatcctgctgctgaccatctgcgccgccggcatcggcggcaccttccagttcggctacaacctgagcatcatcaacgcccccaccctgcacatccaggagttcaccaacgagacctggcaggccagaaccggcgagcccctgcccgaccacctggtgctgctgatgtggagcctgatcgtgagcctgtaccccctgggcggcctgttcggcgccctgctggccggccccctggccatcaccctgggcagaaagaagagcctgctggtgaacaacatcttcgtggtgagcgccgccatcctgttcggcttcagcagaaaggccggcagcttcgagatgatcatgctgggcagactgctggtgggcgtgaacgccggcgtgagcatgaacatccagcccatgtacctgggcgagagcgcccccaaggagctgagaggcgccgtggccatgagcagcgccatcttcaccgccctgggcatcgtgatgggccaggtggtgggcctgagagagctgctgggcggcccccaggcctggcccctgctgctggccagctgcctggtgcccggcgccctgcagctggccagcctgcccctgctgcccgagagccccagatacctgctgatcgactgcggcgacaccgaggcctgcctggccgccctgagaagactgagaggcagcggcgacctggccggcgagctggaggagctggaggaggagagagccgcctgccagggctgcagagccagaagaccctgggagctgttccagcacagagccctgagaagacaggtgaccagcctggtggtgctgggcagcgccatggagctgtgcggcaacgacagcgtgtacgcctacgccagcagcgtgttcagaaaggccggcgtgcccgaggccaagatccagtacgccatcatcggcaccggcagctgcgagctgctgaccgccgtggtgagcgtggccggcgtggacgagggctggggcgtgcaggccggcctgaccagcaccagccccccccccagacccagacagagcagcttcccctggaccctgtacctggccatggcctgcatcttcgccttcatcctgagcttcggcatcggccccgccggcgtgaccggcatcctggccaccgagctgttcgaccagatggccagacccgccgcctgcatggtgtgcggcgccctgatgtggatcatgctgatcctggtgggcctgggcttccccttcatcatggtgctgggcagcttcctgatcgccggcggcctggtgcccctgcccctgtgccccttcccctggtgcctgtgcctgtggggccacctgcactggcccgtgcccagctag

SEQ ID NO: 102841 - DNA, 1104 bp, Artificial Sequence
  derived and/or modified sequence
atggaggatgagttggagccttcactgcgccccagaacacagattcagggaagaatcctgctgctgacaatctgcgctgctgggatcggcggcaccttccaatttggctataacctgtctatcattaacgcccctaccctccatatccaggagtttaccaacgaaacatggcaagccagaacaggcgagcccctgccagatcatttagtgctcctgatgtggagcctgatcgtgtccctgtatccgctgggcgggcttttcggcgcactgttggctgggcccttagcaatcacccttggtcgaaagaagagtctactggtcaacaacatcttcgtggtcagcgctgctattctgtttggattttccaggaaagcagggtcatttgaaatgattatgttaggacggctgctcgtgggcgtgaacgctggagtgagcatgaacatccagcctatgtatctgggagaaagtgcccctaaggagctccgcggggccgttgccatgtcttccgccattttcacagcgctcggtatagtgatgggccaggttgtgggactgcgcgaactgttgggagggcctcaagcctggccacttctgctggccagctgcctggtgcctggcgcgttgcaactggccagccttcccctcctgcccgagtccccacggtatttgctgatagattgcggtgataccgaagcctgtctggctgcacttcgccggttacgggggagcggagacctggccggggagctcgaggagcttgaggaagagcgagcggcttgccaaggatgtagagcccggaggccttgggagctgttccagcaccgcgccctccgccgacaggttaccagtctggttgtcctgggctcggcaatggagctttgcggtaatgatagcgtgtatgcatacgcatcatccgtcttccgcaaagcaggcgtgccggaagccaagatacaatacgccattatcgggacaggcagttgtgaattacttactgccgtggtgtctgtaagcctggagggcgcactgccaccccccgccctgtgggggggcacacccaggtcttctgccctgaatcagttcacccttcagaagaaaaagaagtag

SEQ ID NO: 102842 - DNA, 1392 bp, Artificial Sequence
  derived and/or modified sequence
atggaagatgaattggagccctccttaaggccaagaactcagatccaaggccggatcctgctcctgacgatctgtgccgcaggcatcgggggtaccttccaatttggatacaatctgtctatcattaacgccccaacactgcacatccaggagttcaccaacgaaacctggcaggccagaactggagaaccattaccagaccatctagtgctcctgatgtggtctttaatagtcagcctgtatccactgggcgggctttttggcgccctcttggccggtcctcttgcaatcactctgggtaggaagaagagccttctggtgaacaacatcttcgtcgttagcgccgcaatcctgtttgggttcagcaggaaggctggcagtttcgagatgattatgcttggcagactccttgttggcgtgaatgctggggtgtccatgaacatacaaccaatgtacctcggcgaaagtgcccccaaggaactgagaggagctgtggcgatgtcctccgccatctttacagcccttggcatcgtgatgggacaggtggtgggattgagagaactgttgggtggccctcaggcctggcccctgttactagccagctgcctcgttccgggagccctgcagcttgcctcactgcccctgctgcctgaaagtccaaggtatctcttgattgactgcggtgatactgaagcctgcctggcggctttacgccgcctgcgagggtctggtgacctggccggagagcttgaagagctggaagaggagcgagcagcctgtcaagggtgtagggcccggagaccttgggagctcttccaacaccgagccctccgccggcaggtcacatccctagtagtcctcggcagtgccatggaactctgcgggaacgattctgtctacgcctacgccagtagtgtgttcagaaaagctggggtcccggaagcaaaaatccagtatgcaatcatcggaactggttcttgcgaattattaacagcggtcgtgtccgtggccggggtcgacgaaggttggggggtccaggcaggactgacgagtacgtccccaccgccgagaccacgtcaatcctcctttccatggacactgtatttggctatggcctgcatatttgcctttatattaagctttgggatcgggccagccggggtcaccggtatacttgctactgagttgtttgaccagatggcccgcccggcagcctgcatggtttgtggggccctcatgtggatcatgcttatcttggttggactagggttccccttcattatggttcttggttctttcctgatcgcgggaggactggtgcctctacctttgtgtccctttccatggtgcctatgcctgtggggacatctccactggccagtcccttcctag

SEQ ID NO: 102843 - DNA, 1104 bp, Artificial Sequence
  derived and/or modified sequence
atggaggatgagctggagcccagcctgcggcccaggacccagatccagggccgcatcctgctgctgaccatctgtgccgccggcattggaggcaccttccagtttggctacaacctgagcatcatcaatgcccccaccctgcacatccaggagttcaccaatgagacctggcaggccaggactggagagcccctgcctgaccacctggtgctgctgatgtggagcctgattgtgtccctgtaccccctgggcggcctgtttggagccctgctggccggccccctggccatcaccctgggcaggaagaagagcctgctggtgaacaacatctttgtggtgtctgctgccatcctgtttggcttcagcaggaaggccggcagctttgagatgatcatgctgggccgcctgctggtgggcgtgaatgctggggtgtccatgaacatccagcccatgtacctgggggagagcgcccccaaggagctgcggggagctgtggccatgagcagcgccatcttcaccgccctgggcatcgtgatgggccaggtggtgggcctgcgggagctgctgggcggcccccaggcctggcccctgctgctggccagctgcctggtgcctggggccctgcagctggccagcctgcccctgctgcctgagagcccccgctacctgctgattgactgtggggacacagaggcctgcctggccgccctgcggcggctgcggggcagcggggacctggccggggagctggaggagctggaggaggagcgggccgcctgccagggctgccgggcccggcggccctgggagctgttccagcaccgggccctgcggcggcaggtgaccagcctggtggtgctgggcagcgccatggagctgtgtggaaatgacagcgtgtatgcctatgccagctctgtgttcaggaaggccggcgtgcctgaggccaagatccagtatgccatcatcggcaccggcagctgtgagctgctgacagctgtggtgtctgtgtccctggagggcgccctgcccccaccagccctgtggggcggcacccccaggagcagcgccctgaaccagttcaccctgcagaagaagaagaagtag

SEQ ID NO: 102844 - DNA, 1392 bp, Artificial Sequence
  derived and/or modified sequence
atggaggatgagctggagcccagcctgcggcccaggacccagatccagggccgcatcctgctgctgaccatctgtgccgccggcattggaggcaccttccagtttggctacaacctgagcatcatcaatgcccccaccctgcacatccaggagttcaccaatgagacctggcaggccaggactggagagcccctgcctgaccacctggtgctgctgatgtggagcctgattgtgtccctgtaccccctgggcggcctgtttggagccctgctggccggccccctggccatcaccctgggcaggaagaagagcctgctggtgaacaacatctttgtggtgtctgctgccatcctgtttggcttcagcaggaaggccggcagctttgagatgatcatgctgggccgcctgctggtgggcgtgaatgctggggtgtccatgaacatccagcccatgtacctgggggagagcgcccccaaggagctgcggggagctgtggccatgagcagcgccatcttcaccgccctgggcatcgtgatgggccaggtggtgggcctgcgggagctgctgggcggcccccaggcctggcccctgctgctggccagctgcctggtgcctggggccctgcagctggccagcctgcccctgctgcctgagagcccccgctacctgctgattgactgtggggacacagaggcctgcctggccgccctgcggcggctgcggggcagcggggacctggccggggagctggaggagctggaggaggagcgggccgcctgccagggctgccgggcccggcggccctgggagctgttccagcaccgggccctgcggcggcaggtgaccagcctggtggtgctgggcagcgccatggagctgtgtggaaatgacagcgtgtatgcctatgccagctctgtgttcaggaaggccggcgtgcctgaggccaagatccagtatgccatcatcggcaccggcagctgtgagctgctgacagctgtggtgtctgtggccggcgtggatgagggctggggcgtgcaggccggcctgaccagcaccagccccccaccccggccccggcagagcagcttcccctggaccctgtacctggccatggcctgcatctttgccttcatcctgagctttggaattggccctgctggggtgacaggcatcctggccacagagctgtttgaccagatggcccggcctgctgcctgcatggtgtgtggggccctgatgtggatcatgctgatcctggtgggcctgggcttccccttcatcatggtgctgggcagcttcctgattgctgggggcctggtgcccctgcccctgtgccccttcccctggtgcctgtgcctgtggggccacctgcactggcctgtgcccagctag

SEQ ID NO: 102845 - DNA, 1104 bp, Artificial Sequence
  derived and/or modified sequence
atggaggacgagctggagcccagcctgcggccccggacccagatccagggacggatcctcctgttgactatttgcgccgctggcatcggcggaacctttcagttcggatacaatctctcgatcatcaatgccccgaccctgcatattcaggaattcaccaatgagacctggcaggcacgcacaggcgaaccgctgcctgaccacctcgttctcctcatgtggtccttgattgtgagcctgtatcccctgggggggctgttcggcgcactcctggctggtccactcgctatcactctgggacggaaaaagagtctcctggtgaacaacatctttgtcgtgagtgccgcaattctgttcggcttctctcggaaggcgggctctttcgagatgatcatgcttggaagattgctggtgggagtgaacgcaggcgtgagcatgaatattcagcctatgtacctgggggaatcagcgcctaaggagctaaggggagctgtcgctatgagttcagctatcttcacagctctgggtatagtaatggggcaggtagtggggctgcgagaattgctgggaggcccgcaggcatggccgttgctgcttgcctcatgccttgtaccaggagccttgcagctggcctctctgccactgctccccgagagtccaagatatctgctcattgattgcggcgataccgaagcttgtctcgcagccctgaggcggctgagaggcagcggcgacctcgccggagagctggaggaattggaagaagagcgcgccgcttgtcaaggatgtagagctagacggccatgggaactcttccagcaccgggctctgagacgccaagtgacaagcctagtggtattaggaagtgccatggagctctgtgggaacgattcagtttacgcctatgcaagctctgtatttcgcaaagcgggagtgcctgaagccaagatccagtacgcaatcatcgggaccggttcttgcgaacttctgacggcggtggtatcggtgtctctggaaggcgctctgccaccgcctgctttatgggggggcactccccggtcatccgcattaaaccaatttacactccaaaagaaaaaaaagtag

SEQ ID NO: 102846 - DNA, 1392 bp, Artificial Sequence
  derived and/or modified sequence
atggaggacgagctggagcccagcctgcggccccggacccagatccagggacggatattactgctgaccatttgcgccgctggaatcggaggcacattccaatttggatataaccttagcataatcaatgcacccactttacatattcaggagtttacaaacgaaacttggcaagcacgaaccggcgagcccctgccagatcacctggtacttctgatgtggagcctgatcgtatcactttatcccctgggtggactcttcggggcgttactagctggcccccttgctattaccctaggaaggaaaaagagccttctcgtaaataatattttcgtcgtctctgccgctatacttttcggtttcagccggaaggccggatccttcgagatgataatgctcgggcggctgctggtgggtgtcaatgccggcgtctcaatgaatatccagcccatgtacctcggcgaatctgccccaaaggaactgaggggagccgttgccatgtcctccgcaatcttcacagccctgggcatcgtcatgggacaggtggtaggattgagagaactgctcggaggcccacaggcttggccattgcttctggcatcctgcctagttccgggcgcactccagctggcaagtctgcccttactccccgaaagtccacgctatctgctgattgattgcggcgatacagaagcgtgtctggctgccctgcgaagactgcgcggatctggtgatctggccggagagctcgaagaactagaagaggaaagagccgcctgccaggggtgccgagccagacgtccttgggagctgtttcagcaccgtgcactgcgccgccaggtcacctctctggttgtgttgggaagcgcgatggagctgtgcggcaacgacagtgtttatgcgtatgcctcctccgtgttccgcaaagcaggcgtgcctgaagcaaaaattcagtacgcgataatcggcacgggcagttgtgaactgctgacagcagtcgtcagtgttgccggtgtggatgagggatggggggttcaagcgggcctgactagcacatctcctcccccacggccccggcaatcgagctttccctggacattgtaccttgccatggcgtgcatcttcgcctttatattgtcatttggcatcggcccagccggcgttactgggatcttggcaaccgaactattcgatcagatggctcgccccgctgcctgcatggtatgtggagcactcatgtggatcatgctcatactcgttggattaggcttcccatttattatggtcttaggaagttttttgatcgctggcggactggttcccctaccactatgcccgttcccatggtgtctgtgcctctggggccacttgcactggccggtcccaagctag

SEQ ID NO: 102847 - DNA, 1104 bp, Artificial Sequence
  derived and/or modified sequence
atggaggacgagctggagcccagccttcgtccacgaacacagatccaaggccgaattctgttgctgactatttgtgcagccggaatagggggaacatttcagttcgggtataatctaagcattatcaacgcccctacactgcatattcaagagttcacaaacgagacttggcaagctaggacgggagagccgctgcctgatcacctggttctgctgatgtggagcctcatcgtgagcttgtatccgctcggcggtcttttcggagcccttctcgctggcccattagctatcacccttggcaggaaaaagagcctgctcgtcaataacatctttgttgtcagcgccgcaatcttgtttggctttagcaggaaagccggatcctttgagatgatcatgctgggcaggctactggtgggcgttaacgcaggggtgtctatgaatatccagccgatgtatctcggcgaatccgcccctaaggagctaagaggcgctgtggctatgtcctcagctatctttacagctttgggtattgttatgggccaggtcgtcggactgcgcgagttgctcgggggaccccaagcgtggcctttgctgcttgccagttgtcttgtacccggtgcccttcagctggcaagcctgcccctgttaccggaatcacctaggtacctcctcattgactgcggtgataccgaggcttgcctggctgccctccgacgactgcgcggatctggcgatctggcaggggaactggaggagcttgaggaagaaagggcagcttgccagggctgtcgggctcgaagaccgtgggagctgtttcaacaccgggctttacggagacaggttacatctctcgtggtcctggggtccgcaatggagctctgtggcaacgactccgtgtacgcctacgctagtagtgtgtttagaaaggctggcgtcccggaggcaaagattcaatacgcgatcataggtacgggaagctgtgagctgctgactgccgtcgtgtcagtgagtcttgaaggggcactgccaccgccagcgctatggggaggcacccctcgaagttccgccctgaaccagtttactcttcagaagaaaaagaagtag

SEQ ID NO: 102848 - DNA, 1392 bp, Artificial Sequence
  derived and/or modified sequence
atggaggatgaactggagccaagtctaaggccacgaacccagattcagggcaggatcttgttacttactatctgtgctgctggaatcggcggtaccttccaatttggctacaacttgagcataataaacgcccctacactgcatatacaggaatttaccaatgagacatggcaggcccgaaccggtgagccactcccagaccacctggtactcctcatgtggtcactgatcgtgtccctgtaccctctcggcggtctcttcggcgctctactggcagggccactcgccataacgcttggacgtaaaaagtcactgctggtgaacaacattttcgtggtctccgcagctattttattcggcttcagtcgcaaggcaggaagctttgaaatgatcatgcttggcagactcctggtaggggtcaatgcaggcgtttccatgaatatccaacccatgtaccttggggaaagtgccccaaaggagctgcgaggagctgttgccatgtcatccgccatatttactgctctagggattgtcatgggccaggtggtgggactgagggagctgctgggtgggccacaggcctggccgctgttgctggcctcctgtctagtcccgggagccttacaattagcatccctgcctttgctcccagagtcgcctagatacctgctgattgattgcggggacaccgaggcatgtctagctgcactccgcagactgagaggtagtggcgatctggccggagagctcgaagaactggaggaagagcgggctgcctgtcagggatgcagggcacggaggccttgggaactgtttcagcacagggcacttaggcggcaggtcacttctctcgtggtgctgggcagcgcaatggagctgtgtggcaacgactctgtctacgcctatgcaagctccgttttccgcaaggcaggtgtgcccgaggctaaaattcagtatgccatcatcggaacaggcagctgcgagctgctcaccgcggtggtgagcgtggctggggtagacgaggggtggggcgtgcaggcaggacttacatccacctctcctcctccaaggccacgtcaatcctccttcccctggaccttgtatctagctatggcatgcatcttcgccttcattctcagctttggcattgggcctgctggggtgactgggattctggctaccgaactgtttgatcagatggccagaccagctgcgtgtatggtgtgcggagccctgatgtggatcatgttgatcttagtcgggctagggttccccttcatcatggtgctgggttcttttctcattgcgggtggcctggtgccccttccgctgtgccccttcccttggtgtctgtgtctgtggggacacctgcattggccagtcccatcttag

SEQ ID NO: 102849 - DNA, 1290 bp, Artificial Sequence
  derived and/or modified sequence
cggacctgcctctcacgcaatggatcccctggcggcaacccgagaccggttctcctacccgcattccgccaagtctctcgctctgcccaggacgcacagatgagagcgctccgaagactgagatgagcttggggcttagccgagtaaggagtgagcggcttttcagcctcagtgctgcggcagaggcggatggaggatgaactggagccgtccttacggcctcggacgcagattcagggcaggatcctgctcctgaccatctgcgctgccggcattggtgggacttttcagtttggctataacctctctatcatcaatgccccgaccttgcacattcaggaattcaccaatgagacatggcaggcgcgtactggagagccactgcccgatcacctagtcctgcttatgtggtccctcatcgtgtctctgtatcccctgggaggcctctttggagcactgcttgcaggtcccttggccatcacgctgggaaggaagaagtccctcctggtgaataacatctttgtggtgtcagcagcaatcctgtttggattcagccgcaaagcaggctcctttgagatgatcatgctgggaagactgctcgtgggagtcaatgcaggtgtgagcatgaacatccagcccatgtacctgggggagagcgcccctaaggagctccgaggagctgtggccatgagctcagccatctttacggctctggggatcgtgatgggacaggtggtcggactcagggagctcctaggtggccctcaggcctggcccctgctgctggccagctgcctggtgcccggggcgctccagctcgcctccctgcctctgctccctgaaagcccgcgctacctcctcattgactgtggagacaccgaggcctgcctggcagcactacggcggctccggggctccggggacttggcaggggagctggaggagctggaggaggagcgcgctgcctgccagggctgccgtgcccggcgcccatgggagctgttccagcatcgggccctgaggagacaggtgacaagcctcgtggttctgggcagtgccatggagctctgcgggaatgactcggtgtacgcctacgcctcctccgtgttccggaaggcaggagtgccggaagcgaagatccagtacgcgatcatcgggactgggagctgcgagctgctcacggcggttgttagtgtgagtctggagggtgcccttcctccaccagccctgtggggagggacccccaggtcctctgcattaaaccagtttacactccagaaaaagaaaaaa

SEQ ID NO: 102850 - DNA, 2143 bp, Artificial Sequence
  derived and/or modified sequence
atctttcggtctttcctaattttcccgtcctctggggaaaggtcggggatacctgaaccaaagtgtgtgtgtgtgggggggggggggtgtaggtggggcgtgcatagatgtgcacaaccaagggcttggccctccggagaacgcccaggggcagtggcctccgaggttctggcggccggcagtggcgaccggcgcagggaatcgcgcagggttgcggctgaggtcagaccagcgagagacagagacccgcagacatttagtccagagactgtagcaaaggagggggacgaggggccagagccggaatttcgggggaggacttgggagcgcggcgaccagagtcgcttgctggcacttgcgagggcgaatgcaggggcttggccgagatgaccttggaccagagctcccttccggcctgcagagatgagcttggggcttagccgagtaaggagtgagcggcttttcagcctcagtgctgcggcagaggcggatggaggatgaactggagccgtccttacggcctcggacgcagattcagggcaggatcctgctcctgaccatctgcgctgccggcattggtgggacttttcagtttggctataacctctctatcatcaatgccccgaccttgcacattcaggaattcaccaatgagacatggcaggcgcgtactggagagccactgcccgatcacctagtcctgcttatgtggtccctcatcgtgtctctgtatcccctgggaggcctctttggagcactgcttgcaggtcccttggccatcacgctgggaaggaagaagtccctcctggtgaataacatctttgtggtgtcagcagcaatcctgtttggattcagccgcaaagcaggctcctttgagatgatcatgctgggaagactgctcgtgggagtcaatgcaggtgtgagcatgaacatccagcccatgtacctgggggagagcgcccctaaggagctccgaggagctgtggccatgagctcagccatctttacggctctggggatcgtgatgggacaggtggtcggactcagggagctcctaggtggccctcaggcctggcccctgctgctggccagctgcctggtgcccggggcgctccagctcgcctccctgcctctgctccctgaaagcccgcgctacctcctcattgactgtggagacaccgaggcctgcctggcagcactacggcggctccggggctccggggacttggcaggggagctggaggagctggaggaggagcgcgctgcctgccagggctgccgtgcccggcgcccatgggagctgttccagcatcgggccctgaggagacaggtgacaagcctcgtggttctgggcagtgccatggagctctgcgggaatgactcggtgtacgcctacgcctcctccgtgttccggaaggcaggagtgccggaagcgaagatccagtacgcgatcatcgggactgggagctgcgagctgctcacggcggttgttagtgtagctggggtggatgagggctggggggtccaggccgggctgacttccacctcacccccgccccgtccacggcagagctccttcccctggacactctacctggccatggcctgcatctttgccttcatcctcagctttggcattggccctgccggagtgacggggatcctggccacagagctgtttgaccagatggccaggcctgctgcctgcatggtctgcggggcgctcatgtggatcatgctcatcctggtcggcctgggatttccctttatcatggtcttggggtcttttttaatcgcaggaggccttgtcccacttcctctatgtccctttccttggtgtctgtgtctgtggggccatctacactggcctgttccttcctgagaccaaaggcaagaccttccaagagatctccaaggaattacacagactcaacttccccaggcgggcccagggccccacgtggaggagcctggaggttatccagtcaacagaactctagtcccaaaggggtggccagagccaaagccagctactgtcctgtcctctgcttcctgccagggccctggtcctcactccctcctgcattcctcatttaaggagtgtttattgagcaccctttgtgtgcagacatggctccaggtg

SEQ ID NO: 102851 - protein, 105 aa, Artificial Sequence
  derived and/or modified sequence
MKRSLQALYCQLLTVLLTVCCMKRKKKTANPENNLSYWNNTITMDYFNRHAVELPREIQSLETSEDQLSEPRSPANGDYRDTGMVLVNPFCQETLFVGNDQVSEI

SEQ ID NO: 102852 - DNA, 318 bp, Artificial Sequence
  derived and/or modified sequence
atgaagagaagcctgcaggccctgtactgccagctgctgaccgtgctgctgaccgtgtgctgcatgaagagaaagaagaagaccgccaaccccgagaacaacctgagctactggaacaacaccatcaccatggactacttcaacagacacgccgtggagctgcccagagagatccagagcctggagaccagcgaggaccagctgagcgagcccagaagccccgccaacggcgactacagagacaccggcatggtgctggtgaaccccttctgccaggagaccctgttcgtgggcaacgaccaggtgagcgagatctag

SEQ ID NO: 102853 - DNA, 318 bp, Artificial Sequence
  derived and/or modified sequence
atgaagagatcacttcaggctctctactgccagctgctaactgtgctactcactgtgtgttgtatgaaaaggaagaagaaaacggcaaaccctgagaataatctgagctattggaataacacgatcacaatggactacttcaaccgccatgccgttgagctgccccgcgagatccagagcctggaaacctccgaggatcaattgtctgagccaagatcccctgccaacggagactaccgcgataccggcatggtgctcgtgaaccccttttgccaggaaactttattcgtaggtaatgaccaggtgtcagagatttag

SEQ ID NO: 102854 - DNA, 318 bp, Artificial Sequence
  derived and/or modified sequence
atgaagaggagcctgcaggccctgtactgccagctgctgactgtgctgctgactgtgtgctgcatgaagaggaagaagaagacagccaaccctgagaacaacctgagctactggaacaacaccatcaccatggactacttcaacagacatgctgtggagctgccccgggagatccagagcctggagaccagcgaggaccagctgtctgagcccaggagccctgccaacggggactacagagacaccggcatggtgctggtgaaccccttctgccaggagaccctgtttgtgggcaatgaccaggtgtctgagatctag

SEQ ID NO: 102855 - DNA, 318 bp, Artificial Sequence
  derived and/or modified sequence
atgaagcggagcctgcaggccctgtactgccagctgctgaccgtgctgctcactgtgtgttgtatgaagaggaaaaagaagaccgccaacccagaaaacaatctgtcctattggaacaacaccatcacaatggattacttcaaccgccacgctgtcgagctgccgagggaaattcagagcctcgagacctccgaggatcaactgtctgaaccccgcagccccgctaatggtgattaccgagacactggaatggttttagtgaatcctttctgtcaagagactttgtttgttggcaatgatcaggtttctgaaatatag

SEQ ID NO: 102856 - DNA, 318 bp, Artificial Sequence
  derived and/or modified sequence
atgaagcggagcctgcaggctctgtattgtcagctcctgaccgtgcttctgaccgtgtgttgtatgaaaagaaaaaaaaagaccgctaaccccgagaataatctcagctactggaataacaccattacaatggactatttcaacagacacgcggtggagctcccgagggagatccagagtctggaaaccagtgaggatcagctgtccgagccccgttcccctgccaacggcgactaccgagatactggcatggtcttagtgaacccattctgtcaagagacactcttcgtcgggaacgaccaggtgtccgaaatctag

SEQ ID NO: 102857 - DNA, 2470 bp, Artificial Sequence
  derived and/or modified sequence
gagagcaagacggcagcatctacggttctttctgctcaggaatgggaacccagagtgggcagtagagcggaggcaagccatgcagaggcaggagcagatgagaccctagatgccacgagaagctaaacatgtggggaaaataaagagcagattaactcaggaaaattatatggggagctcttatgctactctgaagatctgagactcgttggagaatttacaatcccaaattaactcagggagaattccaactagactctgaaatgaattagatggagatttaaaatagggcaatttagtgggaagagatacttaatttgaagacagaatcatgaataaactggaggataagcaggaccagatgataccatgaagagaagtttacaggccctctattgccaactgttaactgtcctgctgacggtgtgctgcatgaagaggaagaagaagaccgccaacccggagaacaacctgagctactggaacaacaccatcaccatggactacttcaacaggcatgctgtggagctgcccagggagatccagtcccttgaaacctctgaggaccagctctcagagccccgctccccagccaatggcgactatagagacactgggatggtccttgttaaccccttctgtcaagaaacactgtttgtgggaaacgatcaagtatctgagatctaactacagcaggcatcactttgccattccgtatttttcgtctctaaattataaatatacaaatacatatattataaatataacctttgtgtaaccctgacttaatgagaaacattttcagctttttttcctatgaattgtcaacatcttttttacaagtgtggtttaaaaaaaaaaaaaactttacagaatgatctgtggctttataaaataaaggtatttctaagcaaagcagttgcattgattgcttctcttaataactattcttgagcacctggggatcccaggaaccctggtcaggtgaggtaagagactgacctcctgtagaagctgaatgttacagtgcaagcgcacgattctttgagtgattcttaaagctctggttcctcttgatttggtgtgaccccatttcctcccttctcatacgcacacctgtaaagggaactggaccgcctcaggggaagacggcagactcatgcacagagaaggaaaagggaacatctcatcacctctgaggatgagtaccctggagccttatgacggcaccattggatgtcatgtttaattccatccaagttgtggatggcaggcaggagcatggagccctcaggaatccatggaggacatcaaggcatcccaaggccatattcccctaacattacttccactgctaacaacaggactgcctttccctggtgggaaaatgctccctttatgcccattcctgtatcccctccaacacccacatctgcattaaacacccgtgcctttctcttggagagggtttagatgcagatcccggccctggagctttaaaatgcttgcccttccttcttcaaggatcaaatgtttattggggttcagctttgttttctcaaaaggccatggtatcgtgcccctgaggaacatgtttatctaagaagctttgaggtagtagagcgataatttttgaaaccttcctcctgcaatctttaaaaaagaaaaaaaagattgcccaaacaaatcatttgggagaagacatcattatactcctacttggcactgcaaacctgctcgcagcaccagccggtggacttgccatccagctctcagcttccactgctccccttgttcccggccggctggctgcctccccgtgctgtgtccagcacggccaacaacgtcagaccctcagagacgcccaaggggcttccagaggtggccgcttctctattttttcctgattgtggctgagagagatgattactgctttgacacttcctttctctaaaagaaaaatagtttgatagtatattttgaatatagatgctcttatagtcagattgggaattgaacttgaatattgggtcatatgtttgtgttgttgctgtagtctatcatgacttttttctttctgcattttccttaaaaaaaaaaaaaagatggccttcaaaagtgtgttctcaatgttgtatgaacctccttcacatgagttcggttgttgtctctcttcaaagactcttcaacccacaaagaagcaactaaatgtttctctaagtttaattttctagcgtgttgttgtcttacctttttaaccttaccataatatttctgttaactgttacatttaatataccaatgtgtgtaagtatacagagaaaaatctgtttgtaaagtaaaatttatatataatatatgtaatcaaagatacatatgttatatatacatatgtggatgtatgacttatttttccttatccacagatttcagctaccatgtatatataaataaacttattttattagcc

SEQ ID NO: 102858 - protein, 456 aa, Artificial Sequence
  derived and/or modified sequence
  misc_feature (1)..(1): Xaa can be any naturally occurring amino acid
XICKDTLQASKRNSFGSEWAQALKPAKNTKARRTLKFSRSLNDVGEKAQDTSESFAYVERTCSEGKLILPQDTCLRTNRFHHKEKRTLNHKPLGNSKHSCVSCLSAGRSTASEVEAGKGGRPGLLLEEKADGEATSRSRQLLQYLFSLSHGLSASSLHRFHELESCAARLHTAKSSSGLAGSMGFCSDEMGDDDVFEDSTSAKLKSRVLRAPLCSTEKDSDLDCPSPFSEKLPPISPVSTSGDVCRICHCEGDDESPLITPCHCTGSLHFVHQACLQQWIKSSDTRCCELCKYEFIMETKLKPLRKWEKLQMTSSERRKIMCSVTFHVIAITCVVWSLYVLIDRTAEEIKQGQATGILEWPFWTKLVVVAIGFTGGLLFMYVQCKVYVQLWKRLKAYNRVIYVQNCPETSKKNIFEKSPLTEPNFENKHGYGICHSDTNSSCCTEPEDTGAEIIHV

SEQ ID NO: 102859 - DNA, 1371 bp, Artificial Sequence
  derived and/or modified sequence
tgaatatgtaaggacacactgcaggcttctaaaagaaacagcttcgggagcgagtgggcccaggctctaaaacctgcaaaaaacactaaggcacgtcggacgctgaaattcagccggtctcttaacgacgtcggggagaaggctcaggatacgtcagagtctttcgcatacgttgagaggacgtgttcagaagggaagttgatcctcccacaggatacctgcttaaggactaataggttccaccacaaggagaagcgtacactgaaccacaaacccttaggcaattcaaagcattcatgcgtgtcctgtctgagtgctggaaggagtacggctagtgaggtcgaggccgggaaagggggcagaccgggcctacttctcgaggagaaggctgacggggaagcgacttctcggtcccggcagctgcttcaatacctctttagtctgagtcacgggctttctgcttcctccctccatcggttccatgagctcgagagctgcgcggctcgactgcacaccgccaagagcagcagcgggcttgctggttctatgggattctgtagcgatgaaatgggggacgacgacgtctttgaggactccacgagtgccaagttgaagtcccgcgtcctccgggcccctctctgcagcacggagaaagacagcgacctagactgtcccagccccttctccgagaagctgcctcctatttctcccgtttcgactagcggggatgtctgccggatatgtcactgcgagggcgacgatgaatctccattaatcactccctgccactgtacaggatcccttcactttgtgcaccaggcatgccttcaacagtggattaagagctctgacacgcgttgctgcgagctgtgcaaatatgagttcatcatggagacgaaactgaagcctcttagaaaatgggaaaagttgcagatgacctcaagcgaaagacggaagatcatgtgctccgttaccttccacgtcattgcaatcacctgcgtcgtttggagcctgtatgtccttatcgacaggacagcagaggagataaaacaaggccaagcgacaggaatcctggagtggcccttttggactaaattagtggtggtcgctattggcttcactggcggcctgctattcatgtatgttcaatgcaaggtatacgtgcagctttggaagcgtctgaaagcttataaccgtgtgatttatgtccaaaattgtccagaaactagcaaaaagaacatcttcgaaaaatcccccctcactgagcccaatttcgaaaataaacatgggtacgggatttgtcacagtgatacgaatagctcctgctgcaccgagcccgaggacaccggagccgagatcattcatgtttag

SEQ ID NO: 102860 - DNA, 1371 bp, Artificial Sequence
  derived and/or modified sequence
tgaatctgcaaggacaccctgcaggccagcaagaggaacagctttggaagtgagtgggcccaggccctgaagccagccaagaacaccaaggcccggaggaccctgaagttcagccgcagcctgaatgatgtgggggagaaggcccaggacaccagcgagagctttgcctacgtggagaggacctgcagcgagggcaagctgatcctgccccaggacacctgcctgcggaccaaccgcttccaccacaaggagaagaggaccctgaaccacaagcccctgggcaacagcaagcacagctgtgtgtcctgcctgtctgctggccgcagcacagccagcgaggtggaggccggcaagggcggccggcccggcctgctgctggaggagaaggcagatggagaggccaccagccgcagccggcagctgctgcagtacctgttcagcctgagccacggcctgagcgccagcagcctgcaccgcttccacgagctggagagctgtgccgcccggctgcacacagccaagagcagcagcggcctggccggctccatgggcttctgcagtgatgagatgggagatgatgatgtgtttgaggacagcaccagcgccaagctgaagagccgggtgctgcgggcccccctgtgcagcacagagaaggacagcgacctggactgccccagccccttcagcgagaagctgccccccatcagccctgtgtccaccagcggagatgtgtgccgcatctgccactgtgaaggagatgatgagagccccctcatcaccccctgccactgcaccggcagcctgcactttgtgcaccaggcctgcctgcagcagtggatcaagagcagtgacacccgctgctgtgagctgtgcaagtatgagttcatcatggagaccaagctgaagcccctgaggaagtgggagaagctgcagatgaccagcagcgagaggaggaagatcatgtgcagcgtgaccttccacgtgattgccatcacctgtgtggtgtggagcctgtatgtgctgattgacagaacagctgaggagatcaagcagggccaggccaccggcatcctggagtggcccttctggaccaagctggtggtggtggccatcggcttcaccggcggcctgctcttcatgtatgtgcagtgcaaggtgtatgtgcagctgtggaagaggctgaaggcctacaacagagtcatctacgtgcagaactgcccagagaccagcaagaagaacatctttgagaagagccccctgacagagcccaactttgagaacaagcacggctacggcatctgccacagcgacaccaacagcagctgctgcacagagccagaagatactggagctgagatcatccacgtgtag

SEQ ID NO: 102861 - DNA, 5021 bp, Artificial Sequence
  derived and/or modified sequence
tatctgtaaggacacattacaggcgtcaaagagaaattcctttggttcagaatgggcccaggccttgaagcctgctaagaataccaaagccagaagaacactaaagttctcaaggtccctcaatgatgtgggtgagaaggcgcaggatacttcagaaagttttgcctatgtggaaagaacttgttctgaagggaaattaatactccctcaagatacgtgtctcagaactaacaggtttcatcataaagaaaaaagaaccctgaaccacaaacctcttggcaattccaaacattcttgtgtttcatgcctttctgccggtcgctcaactgcctcagaggtggaagctggcaaggggggcaggcccggcctgctgctggaagagaaggcggatggtgaggccacgtcccgaagccggcaactgctccagtacctgttctcactctcgcacggcttgagcgccagcagcctgcacaggttccatgagctggagagctgcgctgctcgcctgcacactgccaagtcctccagcgggctggcagggagtatgggcttctgctctgacgagatgggagacgacgatgtctttgaggacagcacatctgcaaaactgaagagtagggttctgcgggcgcccctctgctccacggaaaaggacagcgacctggattgtccttctcccttctctgaaaaattaccccccatatctcccgtgtccacgtcaggggatgtctgcaggatctgccactgtgaaggagatgatgagagccccctgatcaccccctgccactgcacaggaagcctccacttcgtgcaccaggcctgcctgcagcagtggatcaagagctccgacacgcgctgctgcgagctctgcaagtatgagttcatcatggagaccaagctgaagccactgagaaaatgggagaagttgcagatgacgtccagcgagcgcaggaagatcatgtgctcagtgacattccacgtcattgccatcacatgtgtggtctggtccttgtatgtgctcattgaccgtactgctgaggagatcaagcaggggcaggcaacaggaatcctagaatggcccttttggactaaattggtggttgtggccatcggcttcaccggaggacttctttttatgtatgttcagtgtaaagtgtatgtgcaattgtggaagagactcaaggcctataatagagtgatctatgttcaaaactgtccagaaacaagcaaaaagaatatttttgaaaaatctccactaacagagcccaactttgaaaataaacatggatatggaatctgtcattccgacacaaactcttcttgttgcacagagcctgaagacactggagcagaaatcattcacgtctgattgtgtgcgggttgtcattttcctggacatccatgaagagctgaaggaaattgtttactgccaattgtatacctttcttatgtcctttaatagcatagactggacaggtgactatttatagtggcttctctttttctaaaccctccttagtctcctagaaaaccttcctgtgggccaggcatgcctgggtcctgcctctgcctggcagctctgtgggaaagtggaagaccccatgatgacatcatggggagccagcagagttcctgcccatggtcttgagctgaatgagagaataaaatgccaatcccaagggaagaggaggagcaggggtgcccaggccctgatacccagccgcctccagcttgcagtggtccccagcctggagcagagcattggggagtgtctagccatgacgagaagattccctctgcatcacggcgaaccccaggagatggtattgaaacagacccccaaacacagactcctgcctgccctctgccgatgctgcctcctccatgctcttgagcaggtggagccatggtgctctgtggtggcgcatgattcactgagcaaacagcactttacagaagaaaatctttattttgtaatatgtgtgtccagcgggattgacactcaaaaaaagtctcacttagaaatcttcccttccttacctttgtatctcctttacatcatgagagatcaaaaatccattttgccttacatatgctaagaagcgtggcattctttctgttcataaaacagactcatgacttttaagacaggacaagcaggccagaggctttttttttaatcacagatctcatgggaattagtggatgctaaatggcaattaaagcatgattcctatgcttttgagcctgttttatgacaaggtgttactttgtagacctggcccatacatttcttttttgtcaacactgaaaaagaacagtttctgagatcgaaatggaaggaaaggaagtgagtaatgacaacaaaactgaatatttaaaaaatattcctttatagttaaatctctccagttggtgttggcttcacattgaaagagcagccatgtgccaccctggccggggtgtgtgcactgcatgcaggttctcccttgcatgcaagatgggtgctggcccactgtgaggcttctgctcggggaagttctgtggagtcactaccagggccaagaggcaggtgggctggctctgggacgagggccaggtgtgagcaaactgccagggtccgctgtgccactgctccccggccacatgcccgcccagctgtcgccttaaccagactgaacagacaggatccttcagggcccttggccccactctcagtgcattctgtcatcagggattaccacctgtaccattttcataaaacaaaaccaaaatcactaccatcaaatggccttgtccctctaaaaagtctgcttaaaattctgtttttaaaacccagtttcctagttttccaggcaaatagttacctccgggaaagttgctgggggggcctgaagcacaatgtagcgcagatgcttcctttccaggccattctctcacccagcctgcacggaggagatgggagatgctgggggtcctgccctcagtctttttgggccttaggcgtttcgttcatcctgctaaggggatgaagcaaacacgaggtgattcctttgcctttcagagtggaagccctggagtttgttttgaaggccaggaggctgaaggatctctaagctacggtgtgggcttaatagcagcaggctttgtcctcctgtctcctccaagccagtgtctgattccttggcaacacaggtcttagtctgtggagtggctctgctgtggccttcctctggccgggcaggcactgtccagccatagccagctcctgagaataggtcagcctctcctttctgtctcccagggcacatccagcccgtgcctgtgttcactgtgccccgaagtgcaattacccataccccttctcagcctggggaccccaggcaaccacagactgtccactcaggggagctgaatcccaggtcagccctgccaatgtcccttaggaactgcccaggcaaggcccctggttttgtatacttgttcctgccacccagcagtagatgagtgtttcaggtgaagaccaggatagattttctaagtgtgaatccccacttcacatatggaaccccttatgctgaacttgaaaagcaccaagacttcctgtagacaagaaagtgcttaggtagggacagcccctgggcatcccacccaatgtagctggcaccccactatggcaaaggtgccttgataactgagccctgtatccctcccatgcccagccagattctcatgggaagccctctcccttcttttctgcctaacaccatctcatcgtttctggcctcactgtggacaatccacacacattcttctttcctctcctggcggggcacagagccacccccttgccttttcttttcttgaaggttctagttcagctcctgattcatcagacccttctagccccctgcatctagcagtgaagcatgaagcctggtggggatgtggtactcccatctggtgtggccaccagctctgccaatgttcctgtagccttggaaaacttgctctctcggttcttttgggtgctgtgtactccccagcttccccccttccccccccattttgcacctgggtttagtgaaaggatggcatttggttgacccatatagaaacccagaatgaggtctcagggccaggaggcctggtatttgtaggccagggaaggggaagaggcaagtggtctggggtatcaccagccagccctctctgatttggcctctactccccataagtcacagtaccataagcaggcttctggcctcagcaatttggtctttgtgcccaagtttattgtgagaatttcctgaaaactctataaaaggtctcttcctactgtaggcctctaatgtttctcccctttttgcttcagtccactcttcagtcttgtaggcctagttttcaaacctgcacatgtgtcctacctggccacaggcatgcaggcctcaggcagctgggccagtttgggagcctcgggtgatgtctgcacgatctggggctgcctctgcacccctgctgtgggcttcagggttggagaagggctgggaccaaccgggtgagatccacaagtctctggatgtggctgaaggcaaatacacaattgaagtactttctgttttgaagtgctttcccttttgaatctggtttgaaacatgcagcttctgtctctagcccaaggaaagaccaaaacatagggaaataaaagcatttatctttgtcttggaagtaattgttgaagttgtgcagttgatcagtgcacagttagatgcaatgtttatagaaattgattgttaaaccaaatttacactggcatgtgtggtgtagtttctaaaaggcacttcacatttgaaatttttcttaccttagaaagtttctagtgatctaaatgtctagttttgtattcttttgtgtgtgttcactgtttctcagtattaccacttgaataattctctgtacaggggggtttgtgctatacactgggatgtctaattgcagcaataaagcctttctttaaaaag

SEQ ID NO: 102862 - DNA, 1371 bp, Artificial Sequence
  derived and/or modified sequence
tgaatctgcaaggacaccctgcaggccagcaagcggaacagcttcgggtctgagtgggcacaggcactcaaaccagcgaaaaacaccaaagctaggcgtacattgaaatttagcaggtcactcaacgacgtaggggaaaaggcccaagataccagtgagtccttcgcctacgttgagcggacttgtagtgaggggaaactgatcctgccccaagatacatgtttgagaacgaaccgatttcaccataaagaaaagcggacattgaaccacaaacccctggggaattctaagcactcctgtgtgtcctgtctgtccgcgggccgtagtacagccagtgaggtagaagcaggaaagggcggaaggcccggactgctcctcgaggagaaagcagacggagaggctacctctagaagccggcagctgctgcagtatctgttttctctcagccacgggcttagcgcttcttctctgcatcgattccacgagctggaatcctgcgccgcccgtctgcataccgcaaagtccagctctggcctcgctgggtccatgggattctgtagcgatgagatgggcgatgacgacgtctttgaagactctacatcagccaagctgaaatctagagtgttgagagctcccttgtgttccaccgagaaagactctgatctagattgcccaagccctttctccgagaaactaccgcctatctcccccgtgtccacatcaggtgatgtctgtcgcatctgtcattgcgagggggacgatgagtcaccactcatcacaccttgccactgcaccggcagcctacactttgtccaccaggcctgccttcagcaatggatcaaatcctccgataccagatgctgcgaattgtgtaagtacgagttcataatggaaaccaagctgaagcctctgcggaagtgggagaaattacagatgacaagctcagaaagacgaaagataatgtgctcagttaccttccacgtgattgcaatcacctgtgtggtttggtcactttatgtcttgattgaccggaccgccgaagaaatcaaacagggccaggctacgggaattctagaatggccgttctggacaaagctagtggtggtggcaattggttttaccgggggtctgctgtttatgtacgtgcagtgtaaggtgtacgtccaactgtggaaacggctgaaggcctataaccgggtgatttacgttcagaattgtcccgaaacatctaaaaagaatatctttgagaagtcacccttgacagagccaaacttcgaaaacaagcatggatacggtatttgtcactctgacaccaattccagctgttgtaccgaacctgaggacactggggctgagattatccatgtctag

SEQ ID NO: 102863 - DNA, 1371 bp, Artificial Sequence
  derived and/or modified sequence
taaatctgtaaggacacattgcaggcaagtaagaggaactcctttggaagcgagtgggcccaggcgctcaagcccgcaaaaaacaccaaagcccgacgaacactaaaatttagcaggtcactaaatgatgttggcgaaaaggctcaggacactagcgagtcttttgcttatgtcgagagaacctgctctgagggcaagctgattctgccacaggacacctgcctccgaactaaccggttccaccacaaagagaagcggaccctgaaccacaagcctctgggcaactctaagcattcgtgtgtgagctgcctgagcgctgggagaagcaccgctagcgaggtggaggcaggaaaaggcggaaggcctggactgttattggaggagaaggctgatggggaggccacctccagatcacgacagctgctccagtacttgttcagcctgagccacggcctttcagctagcagccttcaccggtttcacgaactggagagctgcgctgcacgattgcataccgcgaagagctcgtcagggctagcaggctcgatgggcttctgctctgatgaaatgggagatgacgacgttttcgaggacagcacctcggcgaagctgaagtcaagggttctgagggctccactctgctcaaccgagaaggattcagatcttgactgcccttctcccttttcagagaagttgccaccaatcagtcctgtaagcacatcaggcgacgtatgtcggatttgccactgtgaaggtgacgatgagagtccactcatcactccatgtcattgtaccgggtctctgcactttgtccatcaggcctgcctacagcagtggattaagtcttctgatacgcggtgctgtgaactttgcaagtatgagttcataatggagactaaactcaaaccactgcggaagtgggaaaaacttcagatgaccagttcggaaaggcggaagattatgtgcagcgtgacatttcacgtcattgctatcacctgtgtagtgtggtccctatatgtgttgatcgatcggacagcagaggagatcaagcagggacaagctacaggcatcctggagtggccgttctggaccaagcttgtagtggtggccatcggatttactggcggactcctttttatgtacgtgcagtgcaaggtgtacgtgcagctctggaagagactcaaagcatataaccgcgtcatctacgtacaaaactgcccagaaacatcgaaaaagaacatctttgagaagagccccctgacagaaccgaactttgagaacaaacatggctatggtatctgccactccgatacaaacagttcctgctgtacggagcccgaggacacaggagctgagatcatccatgtgtag

SEQ ID NO: 102864 - DNA, 1371 bp, Artificial Sequence
  derived and/or modified sequence
tgaatctgcaaggacaccctgcaggccagcaagagaaacagcttcggcagcgagtgggcccaggccctgaagcccgccaagaacaccaaggccagaagaaccctgaagttcagcagaagcctgaacgacgtgggcgagaaggcccaggacaccagcgagagcttcgcctacgtggagagaacctgcagcgagggcaagctgatcctgccccaggacacctgcctgagaaccaacagattccaccacaaggagaagagaaccctgaaccacaagcccctgggcaacagcaagcacagctgcgtgagctgcctgagcgccggcagaagcaccgccagcgaggtggaggccggcaagggcggcagacccggcctgctgctggaggagaaggccgacggcgaggccaccagcagaagcagacagctgctgcagtacctgttcagcctgagccacggcctgagcgccagcagcctgcacagattccacgagctggagagctgcgccgccagactgcacaccgccaagagcagcagcggcctggccggcagcatgggcttctgcagcgacgagatgggcgacgacgacgtgttcgaggacagcaccagcgccaagctgaagagcagagtgctgagagcccccctgtgcagcaccgagaaggacagcgacctggactgccccagccccttcagcgagaagctgccccccatcagccccgtgagcaccagcggcgacgtgtgcagaatctgccactgcgagggcgacgacgagagccccctgatcaccccctgccactgcaccggcagcctgcacttcgtgcaccaggcctgcctgcagcagtggatcaagagcagcgacaccagatgctgcgagctgtgcaagtacgagttcatcatggagaccaagctgaagcccctgagaaagtgggagaagctgcagatgaccagcagcgagagaagaaagatcatgtgcagcgtgaccttccacgtgatcgccatcacctgcgtggtgtggagcctgtacgtgctgatcgacagaaccgccgaggagatcaagcagggccaggccaccggcatcctggagtggcccttctggaccaagctggtggtggtggccatcggcttcaccggcggcctgctgttcatgtacgtgcagtgcaaggtgtacgtgcagctgtggaagagactgaaggcctacaacagagtgatctacgtgcagaactgccccgagaccagcaagaagaacatcttcgagaagagccccctgaccgagcccaacttcgagaacaagcacggctacggcatctgccacagcgacaccaacagcagctgctgcaccgagcccgaggacaccggcgccgagatcatccacgtgtag

SEQ ID NO: 102865 - protein, 2798 aa, Artificial Sequence
  derived and/or modified sequence
MTSIHFVVHPLPGTEDQLNDRLREVSEKLNKYNLNSHPPLNVLEQATIKQCVVGPNHAAFLLEDGRVCRIGFSVQPDRLELGKPDNNDGSKLNSNSGAGRTSRPGRTSDSPWFLSGSETLGRLAGNTLGSRWSSGVGGSGGGSSGRSSAGARDSRRQTRVIRTGRDRGSGLLGSQPQPVIPASVIPEELISQAQVVLQGKSRSVIIRELQRTNLDVNLAVNNLLSRDDEDGDDGDDTASESYLPGEDLMSLLDADIHSAHPSVIIDADAMFSEDISYFGYPSFRRSSLSRLGSSRVLLLPLERDSELLRERESVLRLRERRWLDGASFDNERGSTSKEGEPNLDKKNTPVQSPVSLGEDLQWWPDKDGTKFICIGALYSELLAVSSKGELYQWKWSESEPYRNAQNPSLHHPRATFLGLTNEKIVLLSANSIRATVATENNKVATWVDETLSSVASKLEHTAQTYSELQGERIVSLHCCALYTCAQLENSLYWWGVVPFSQRKKMLEKARAKNKKPKSSAGISSMPNITVGTQVCLRNNPLYHAGAVAFSISAGIPKVGVLMESVWNMNDSCRFQLRSPESLKNMEKASKTTEAKPESKQEPVKTEMGPPPSPASTCSDASSIASSASMPYKRRRSTPAPKEEEKVNEEQWSLREVVFVEDVKNVPVGKVLKVDGAYVAVKFPGTSSNTNCQNSSGPDADPSSLLQDCRLLRIDELQVVKTGGTPKVPDCFQRTPKKLCIPEKTEILAVNVDSKGVHAVLKTGNWVRYCIFDLATGKAEQENNFPTSSIAFLGQNERNVAIFTAGQESPIILRDGNGTIYPMAKDCMGGIRDPDWLDLPPISSLGMGVHSLINLPANSTIKKKAAVIIMAVEKQTLMQHILRCDYEACRQYLMNLEQAVVLEQNLQMLQTFISHRCDGNRNILHACVSVCFPTSNKETKEEEEAERSERNTFAERLSAVEAIANAISVVSSNGPGNRAGSSSSRSLRLREMMRRSLRAAGLGRHEAGASSSDHQDPVSPPIAPPSWVPDPPAMDPDGDIDFILAPAVGSLTTAATGTGQGPSTSTIPGPSTEPSVVESKDRKANAHFILKLLCDSVVLQPYLRELLSAKDARGMTPFMSAVSGRAYPAAITILETAQKIAKAEISSSEKEEDVFMGMVCPSGTNPDDSPLYVLCCNDTCSFTWTGAEHINQDIFECRTCGLLESLCCCTECARVCHKGHDCKLKRTSPTAYCDCWEKCKCKTLIAGQKSARLDLLYRLLTATNLVTLPNSRGEHLLLFLVQTVARQTVEHCQYRPPRIREDRNRKTASPEDSDMPDHDLEPPRFAQLALERVLQDWNALKSMIMFGSQENKDPLSASSRIGHLLPEEQVYLNQQSGTIRLDCFTHCLIVKCTADILLLDTLLGTLVKELQNKYTPGRREEAIAVTMRFLRSVARVFVILSVEMASSKKKNNFIPQPIGKCKRVFQALLPYAVEELCNVAESLIVPVRMGIARPTAPFTLASTSIDAMQGSEELFSVEPLPPRPSSDQSSSSSQSQSSYIIRNPQQRRISQSQPVRGRDEEQDDIVSADVEEVEVVEGVAGEEDHHDEQEEHGEENAEAEGQHDEHDEDGSDMELDLLAAAETESDSESNHSNQDNASGRRSVVTAATAGSEAGASSVPAFFSEDDSQSNDSSDSDSSSSQSDDIEQETFMLDEPLERTTNSSHANGAAQAPRSMQWAVRNTQHQRAASTAPSSTSTPAASSAGLIYIDPSNLRRSGTISTSAAAAAAALEASNASSYLTSASSLARAYSIVIRQISDLMGLIPKYNHLVYSQIPAAVKLTYQDAVNLQNYVEEKLIPTWNWMVSIMDSTEAQLRYGSALASAGDPGHPNHPLHASQNSARRERMTAREEASLRTLEGRRRATLLSARQGMMSARGDFLNYALSLMRSHNDEHSDVLPVLDVCSLKHVAYVFQALIYWIKAMNQQTTLDTPQLERKRTRELLELGIDNEDSEHENDDDTNQSATLNDKDDDSLPAETGQNHPFFRRSDSMTFLGCIPPNPFEVPLAEAIPLADQPHLLQPNARKEDLFGRPSQGLYSSSASSGKCLMEVTVDRNCLEVLPTKMSYAANLKNVMNMQNRQKKEGEEQPVLPEETESSKPGPSAHDLAAQLKSSLLAEIGLTESEGPPLTSFRPQCSFMGMVISHDMLLGRWRLSLELFGRVFMEDVGAEPGSILTELGGFEVKESKFRREMEKLRNQQSRDLSLEVDRDRDLLIQQTMRQLNNHFGRRCATTPMAVHRVKVTFKDEPGEGSGVARSFYTAIAQAFLSNEKLPNLECIQNANKGTHTSLMQRLRNRGERDREREREREMRRSSGLRAGSRRDRDRDFRRQLSIDTRPFRPASEGNPSDDPEPLPAHRQALGERLYPRVQAMQPAFASKITGMLLELSPAQLLLLLASEDSLRARVDEAMELIIAHGRENGADSILDLGLVDSSEKVQENRKRHGSSRSVVDMDLDDTDDGDDNAPLFYQPGKRGFYTPRPGKNTEARLNCFRNIGRILGLCLLQNELCPITLNRHVIKVLLGRKVNWHDFAFFDPVMYESLRQLILASQSSDADAVFSAMDLAFAIDLCKEEGGGQVELIPNGVNIPVTPQNVYEYVRKYAEHRMLVVAEQPLHAMRKGLLDVLPKNSLEDLTAEDFRLLVNGCGEVNVQMLISFTSFNDESGENAEKLLQFKRWFWSIVEKMSMTERQDLVYFWTSSPSLPASEEGFQPMPSITIRPPDDQHLPTANTCISRLYVPLYSSKQILKQKLLLAIKTKNFGFV

SEQ ID NO: 102866 - protein, 2792 aa, Artificial Sequence
  derived and/or modified sequence
MTSIHFVVHPLPGTEDQLNDRLREVSEKLNKYNLNSHPPLNVLEQATIKQCVVGPNHAAFLLEDGRVCRIGFSVQPDRLELGKPDNNDGSKLNSNSGAGRTSRPGRTSDSPWFLSGSETLGRLAGNTLGSRWSSGVGGSGGGSSGRSSAGARDSRRQTRVIRTGRDRGSGLLGSQPQPVIPASVIPEELISQAQVVLQGKSRSVIIRELQRTNLDVNLAVNNLLSRDDEDGDDGDDTASESYLPGEDLMSLLDADIHSAHPSVIIDADAMFSEDISYFGYPSFRRSSLSRLGSSRERDSELLRERESVLRLRERRWLDGASFDNERGSTSKEGEPNLDKKNTPVQSPVSLGEDLQWWPDKDGTKFICIGALYSELLAVSSKGELYQWKWSESEPYRNAQNPSLHHPRATFLGLTNEKIVLLSANSIRATVATENNKVATWVDETLSSVASKLEHTAQTYSELQGERIVSLHCCALYTCAQLENSLYWWGVVPFSQRKKMLEKARAKNKKPKSSAGISSMPNITVGTQVCLRNNPLYHAGAVAFSISAGIPKVGVLMESVWNMNDSCRFQLRSPESLKNMEKASKTTEAKPESKQEPVKTEMGPPPSPASTCSDASSIASSASMPYKRRRSTPAPKEEEKVNEEQWSLREVVFVEDVKNVPVGKVLKVDGAYVAVKFPGTSSNTNCQNSSGPDADPSSLLQDCRLLRIDELQVVKTGGTPKVPDCFQRTPKKLCIPEKTEILAVNVDSKGVHAVLKTGNWVRYCIFDLATGKAEQENNFPTSSIAFLGQNERNVAIFTAGQESPIILRDGNGTIYPMAKDCMGGIRDPDWLDLPPISSLGMGVHSLINLPANSTIKKKAAVIIMAVEKQTLMQHILRCDYEACRQYLMNLEQAVVLEQNLQMLQTFISHRCDGNRNILHACVSVCFPTSNKETKEEEEAERSERNTFAERLSAVEAIANAISVVSSNGPGNRAGSSSSRSLRLREMMRRSLRAAGLGRHEAGASSSDHQDPVSPPIAPPSWVPDPPAMDPDGDIDFILAPAVGSLTTAATGTGQGPSTSTIPGPSTEPSVVESKDRKANAHFILKLLCDSVVLQPYLRELLSAKDARGMTPFMSAVSGRAYPAAITILETAQKIAKAEISSSEKEEDVFMGMVCPSGTNPDDSPLYVLCCNDTCSFTWTGAEHINQDIFECRTCGLLESLCCCTECARVCHKGHDCKLKRTSPTAYCDCWEKCKCKTLIAGQKSARLDLLYRLLTATNLVTLPNSRGEHLLLFLVQTVARQTVEHCQYRPPRIREDRNRKTASPEDSDMPDHDLEPPRFAQLALERVLQDWNALKSMIMFGSQENKDPLSASSRIGHLLPEEQVYLNQQSGTIRLDCFTHCLIVKCTADILLLDTLLGTLVKELQNKYTPGRREEAIAVTMRFLRSVARVFVILSVEMASSKKKNNFIPQPIGKCKRVFQALLPYAVEELCNVAESLIVPVRMGIARPTAPFTLASTSIDAMQGSEELFSVEPLPPRPSSDQSSSSSQSQSSYIIRNPQQRRISQSQPVRGRDEEQDDIVSADVEEVEVVEGVAGEEDHHDEQEEHGEENAEAEGQHDEHDEDGSDMELDLLAAAETESDSESNHSNQDNASGRRSVVTAATAGSEAGASSVPAFFSEDDSQSNDSSDSDSSSSQSDDIEQETFMLDEPLERTTNSSHANGAAQAPRSMQWAVRNTQHQRAASTAPSSTSTPAASSAGLIYIDPSNLRRSGTISTSAAAAAAALEASNASSYLTSASSLARAYSIVIRQISDLMGLIPKYNHLVYSQIPAAVKLTYQDAVNLQNYVEEKLIPTWNWMVSIMDSTEAQLRYGSALASAGDPGHPNHPLHASQNSARRERMTAREEASLRTLEGRRRATLLSARQGMMSARGDFLNYALSLMRSHNDEHSDVLPVLDVCSLKHVAYVFQALIYWIKAMNQQTTLDTPQLERKRTRELLELGIDNEDSEHENDDDTNQSATLNDKDDDSLPAETGQNHPFFRRSDSMTFLGCIPPNPFEVPLAEAIPLADQPHLLQPNARKEDLFGRPSQGLYSSSASSGKCLMEVTVDRNCLEVLPTKMSYAANLKNVMNMQNRQKKEGEEQPVLPEETESSKPGPSAHDLAAQLKSSLLAEIGLTESEGPPLTSFRPQCSFMGMVISHDMLLGRWRLSLELFGRVFMEDVGAEPGSILTELGGFEVKESKFRREMEKLRNQQSRDLSLEVDRDRDLLIQQTMRQLNNHFGRRCATTPMAVHRVKVTFKDEPGEGSGVARSFYTAIAQAFLSNEKLPNLECIQNANKGTHTSLMQRLRNRGERDREREREREMRRSSGLRAGSRRDRDRDFRRQLSIDTRPFRPASEGNPSDDPEPLPAHRQALGERLYPRVQAMQPAFASKITGMLLELSPAQLLLLLASEDSLRARVDEAMELIIAHGRENGADSILDLGLVDSSEKVQENRKRHGSSRSVVDMDLDDTDDGDDNAPLFYQPGKRGFYTPRPGKNTEARLNCFRNIGRILGLCLLQNELCPITLNRHVIKVLLGRKVNWHDFAFFDPVMYESLRQLILASQSSDADAVFSAMDLAFAIDLCKEEGGGQVELIPNGVNIPVTPQNVYEYVRKYAEHRMLVVAEQPLHAMRKGLLDVLPKNSLEDLTAEDFRLLVNGCGEVNVQMLISFTSFNDESGENAEKLLQFKRWFWSIVEKMSMTERQDLVYFWTSSPSLPASEEGFQPMPSITIRPPDDQHLPTANTCISRLYVPLYSSKQILKQKLLLAIKTKNFGFV

SEQ ID NO: 102867 - DNA, 8379 bp, Artificial Sequence
  derived and/or modified sequence
atgacaagtatccacttcgtcgtccatcctctgccaggaactgaggaccagctgaacgacagactgcgtgaggtcagtgaaaagctcaacaaatataatctgaactcacatccacctctgaacgtgctggaacaagcaacgatcaaacagtgtgtcgtggggcccaatcatgcagcatttctgctagaagacggtagagtgtgccgaataggctttagtgtgcaaccggacagactcgagttgggcaagccagacaataatgacggcagcaaactcaactcaaatagtggcgcagggcgaactagtcgcccagggcggacctccgattccccttggttcctgtccggcagcgaaaccctgggaagactggccgggaacactttaggtagcagatggagtagtggcgtgggggggagcggggggggtagcagtggacgctcatcggctggtgcccgcgactcaaggcgtcagacgagagtgatccggactggaagggatagggggagcggactgttaggtagccaaccacagccggtcatcccggcctcagtgatccccgaagagctaatatcacaagctcaggtcgtgcttcaaggcaagtccagatccgttatcatccgtgagctgcagcgcaccaacttagatgttaacctcgcagtcaataaccttctctccagagatgatgaagacggagatgacggcgacgacactgcaagtgagtcctatttgcccggtgaggatttgatgtcactcctggacgcagatatccattccgcacacccaagcgtcattatagatgcagacgcaatgttcagcgaggatatatcatacttcggttacccgtcttttaggagaagttcactctccaggctcggatcaagtagagagcgcgattctgagcttctgagagaaagggaaagtgtgttgagattgagggaaaggcgatggctcgatggcgcttcctttgacaatgaacgcggaagcacgagcaaggagggcgaaccaaacctggataagaagaatacaccagtgcagtcacccgtgagtctgggcgaggatcttcaatggtggccagacaaagacggtaccaaattcatctgcattggcgccctgtactccgaactcttagctgtttccagtaagggggagttgtatcagtggaagtggtcggagtccgagccttaccgaaacgcccagaacccctcactgcatcatccccgcgctaccttcctgggtctaaccaacgagaaaattgtgctactatccgccaactcaattcgagcaaccgtggccactgagaataacaaagttgccacctgggtggacgaaacgctctcctcggtggcttctaaactcgagcataccgcccagacatactctgagctccaaggcgaacggattgtctccctgcattgctgtgcgctgtatacgtgcgctcagctggagaatagcctgtactggtggggggtggtaccattctcccagcggaaaaagatgctggagaaggctagggccaagaacaaaaagcccaagagctccgccggcatcagctccatgccaaatataacagtcggtacccaggtgtgcctccgtaataaccctctttaccatgctggggccgtggcatttagtatttccgccggaattccaaaggttggcgttctgatggaatctgtgtggaacatgaacgatagttgccggttccagcttaggagtccggagagcctgaagaacatggaaaaagccagcaagacaaccgaggctaagccagaatccaaacaggaaccggtgaaaacagagatggggccccctccatcccccgcctccacctgtagcgacgcttcctccatcgcatcctctgccagtatgccatacaagagaagacgtagcacccctgcgcccaaggaagaggagaaagttaatgaggaacagtggtccctgcgtgaggtcgtctttgtggaagacgtcaagaacgtccctgtgggtaaggtgctcaaggtggacggcgcctacgtcgcagtgaagtttccggggacctcatccaacacaaactgccaaaactcatctggcccagatgccgatccctcatccctgctgcaagactgcaggctgctgagaatcgacgagttacaggtggtgaaaacgggaggaacacccaaggttccggactgtttccagagaacccccaagaaactgtgcatccctgaaaaaaccgaaattctcgctgtcaacgtcgacagcaaaggcgtacatgccgtgctgaagactggtaattgggtaagatattgcatcttcgatctggccacggggaaggcagagcaagaaaataactttcctacgtcgtctattgcattcctcggacagaacgaacgcaatgtcgcaatcttcacagctggacaggagtcaccaattattttgcgggatggcaatggaactatctacccgatggccaaggactgcatgggtgggatcagggatcccgactggctggacctgcccccgatctccagtctgggcatgggggtccactctctgatcaatctgcccgccaactccacaatcaagaagaaggcagccgttattataatggccgtcgagaaacagaccttgatgcagcatattctgaggtgcgactatgaagcatgccgccagtatcttatgaaccttgaacaagcagtcgttctggagcagaacctacaaatgttgcaaacgtttattagtcatagatgtgacggcaaccgcaatattctgcacgcctgtgtcagcgtctgttttccaaccagcaataaagagaccaaggaagaggaagaagccgagaggtcagagcggaacacctttgctgaaagactatcagccgtcgaagcaatagccaatgccatatctgtggtttccagtaatggccctgggaaccgcgcgggaagttccagtagtagatcactccgtctacgcgagatgatgaggcgatccttgagagctgccgggctggggcgacatgaggcaggcgctagctcctccgaccaccaggacccagtaagcccgcccatcgctcccccaagttgggtacctgatcccccagcgatggaccctgacggagatattgatttcatactggcgcctgcagttggttcgctgacaaccgcggctaccgggacaggccagggtccgagtacgtcaacaatacctggtccttctactgaacccagtgtggtggagtcaaaagatcgcaaggctaacgcacatttcattcttaaactgctatgcgattccgtggtactacagccttatttacgcgaactcctaagtgctaaagacgcaagagggatgacacccttcatgtccgcggtgtctggcagggcttaccccgccgcaatcaccatccttgaaacagcgcagaagatcgcaaaggccgaaatatctagctcagaaaaagaagaagacgtgttcatgggaatggtctgcccaagcggcactaaccccgatgattctccactttacgtgctctgctgtaatgatacttgctcattcacctggacaggcgctgagcacattaatcaggatatattcgaatgtaggacctgcggcctgctggagagcttatgctgctgcaccgagtgtgcccgtgtgtgccacaaggggcacgactgcaaactgaaaagaacaagccctaccgcgtactgcgactgttgggaaaaatgcaaatgtaagacactgattgcaggacagaagagcgcaaggttagacttactttacagacttctgacagcaacaaacctcgtgaccctacccaacagtaggggggagcaccttctgctgtttttggtccagactgtcgccaggcagactgtggaacactgccaataccgtcctcctcgaatccgcgaagaccgaaatcggaagaccgcctctcccgaggattccgacatgcccgaccacgatctagagcccccccgtttcgcccagctggcgctcgaaagggttctgcaggactggaatgcattgaagagtatgatcatgttcggttcgcaggagaacaaagatccactctctgcttcgagcagaatcggccatttactgccagaagagcaggtttacttgaatcaacagagcggcaccatccggcttgattgtttcacccactgcctaatcgtgaagtgcactgccgatatattgttactggacacactcctggggaccctggtcaaagagcttcagaataagtacactcctggccgcagggaggaggcgatagctgtgacgatgcggttcttacgcagtgtcgcgcgagtgtttgtgattctctctgtggagatggcaagctccaaaaagaagaataactttatcccacagcctatcggcaagtgtaagcgggtgtttcaggctctgctgccctatgcagtagaggaactttgtaacgtggctgagagtctcatagtacccgtgcgcatgggcatcgccagacctaccgctccctttacactggcgtccacctcgatagacgcaatgcagggaagcgaagagctcttcagtgtcgagcctctgcctccacgaccaagttctgatcagagctcctcttcatcccagtcccaaagctcctatataatcagaaatccacagcaacgtcgtatctcccagtcgcagccagtgcgggggcgcgacgaggaacaggacgacatcgtcagcgccgatgttgaggaagtcgaagtcgttgagggcgttgctggagaggaagaccaccacgacgagcaggaggagcatggggaggagaacgccgaggcagaggggcagcatgacgagcatgacgaggatggaagcgacatggaattagacttgctggctgccgcagaaactgaatcagacagcgagagcaatcacagtaaccaagacaatgcctcggggcggcgaagcgttgtcacagccgctacagccgggagcgaagcaggggctagctcggtacccgccttcttctccgaggatgattctcaatccaacgatagcagtgattcagatagcagcagctcccaaagcgacgacatagaacaagaaacctttatgctggacgaacccctagaaaggaccacaaactcaagtcatgctaacggcgcagcccaggcacccaggagcatgcagtgggcagtgagaaatacccagcatcaacgtgctgcatccaccgctcccagttcaacatcaactcccgccgcctccagcgcaggccttatttacattgacccttccaatctgcggcgaagtggcacaatcagcacctctgccgccgccgcagcagctgccttggaagcgtctaacgcgagctcttacctcacctctgcctcctctctggccagggcatacagtatcgtaataagacaaatcagcgacttgatgggtctcatccccaagtataaccatttggtctattcacaaattccagctgcggtcaaactgacctatcaggatgccgtgaacctccagaattatgtggaggagaaactgatacccacatggaactggatggtgagcattatggattccactgaagcgcagctgcggtacggttccgctctggcgtccgccggagaccctggccaccccaatcatcccctgcacgcttcccagaactcggctaggcgagagagaatgactgctcgagaagaggcgtctctaagaacactggagggtcggcggagagcaactctgctatctgcaagacagggaatgatgagtgcaaggggtgacttcctgaattacgcgctctctctcatgcggtcccataacgatgagcattcagatgtgctccccgtgctcgatgtgtgctccttgaagcacgttgcttatgtttttcaggcactaatctactggatcaaggctatgaatcaacagacaaccctcgacactccacagcttgagcgcaagagaacccgagagctgctcgaactgggcattgacaacgaggactcagaacatgagaatgacgatgatactaatcaatctgccacgctgaacgacaaggatgacgatagtttaccagcagagactgggcagaaccacccatttttcagacgctccgatagcatgacattcctgggttgcatcccaccaaaccccttcgaggtgcccctcgccgaagcaattcctctggctgatcaacctcatctgctacagccaaatgccagaaaagaggatctatttggccggccctctcagggcttgtactccagttctgcgtctagcgggaagtgcctgatggaagtaacagtggaccgcaactgtctagaggtgcttccaactaagatgagctacgctgctaatctgaagaatgtgatgaatatgcagaaccggcaaaaaaaagagggagaggagcaacccgtgctgccagaggagaccgaatcctctaagcctgggccctccgctcatgacctggcggcgcagctgaagagtagtttgctagccgaaattggactgacagagtcggaagggccacccctgacatcgtttcggccccagtgctccttcatgggcatggtgattagtcatgatatgctgctagggcgctggaggctatcactggagctgttcggcagggtcttcatggaggatgtgggagcggaaccgggtagcatattgacagagctaggaggctttgaggtgaaagaaagcaaatttcgccgcgaaatggagaagctgcgcaatcagcagtcccgggatctctccttagaggtggatagggatcgcgacctcttgatccagcagacaatgcgtcagctcaacaatcattttgggagaagatgcgccaccacacccatggccgttcatcgcgtgaaagtcaccttcaaggatgagcccggggaaggatcaggcgtagctcgcagcttttataccgctatcgcccaggcttttttgagtaacgagaagcttcccaatctggaatgcatccagaatgcgaacaaaggcactcatacctctctcatgcagcggttgcgaaataggggggagcgggatcgagaaagggaaagagaaagggagatgagaagatctagcggcctacgcgctggctcacgcagagatcgcgatcgagacttccggcgccagctgagcatagacacgagaccatttcgccctgcatctgagggaaacccttccgacgaccctgaaccgctgcctgcgcatcggcaggccctgggggagcgcctgtacccccgggttcaagcaatgcaacccgcctttgcctctaagatcaccggcatgctgctggagctgtcccccgctcagctgctcttgctgctggcttctgaggacagtttgcgcgcgcgcgtcgatgaggccatggaactcattattgctcatgggagagaaaatggggccgatagtattctggaccttgggcttgtcgactcttccgagaaagtgcaggaaaacagaaaaaggcacggctcctcccggtctgtcgtggacatggatttggacgacacggacgatggcgatgacaacgccccattattctatcagcctggaaagcgcggattctacacaccacggcccggcaagaacacagaagctagactgaattgcttccgtaatatagggagaatactgggcctatgcctgctgcagaacgaactgtgcccgatcactctgaaccgacatgtcataaaggtacttctcgggaggaaagtaaactggcacgatttcgccttctttgatccggtgatgtacgaatcactccggcaactgatcctggcttctcagagtagcgacgcagatgcagtgtttagtgcaatggacctcgcttttgctattgatctctgcaaggaggaagggggtggccaggttgagctcattcccaacggggtgaatattccagtgactccacagaacgtttacgaatatgtacgtaagtatgccgagcatcgaatgttggtggttgctgagcagccgctgcatgccatgcgtaaaggtctcctggacgtcctccctaaaaatagcctggaagacctgaccgcagaggactttaggcttttggtgaatggttgcggggaagtgaacgtccagatgctcattagcttcacaagctttaacgacgagagcggggagaatgctgaaaagctgctgcaatttaaaagatggttctggtccattgtcgagaagatgagcatgacggaacgccaagatctggtgtacttctggacttcaagcccaagtctgcccgcctccgaggaaggatttcagcctatgccctccatcacgatccgaccaccagatgatcagcacttgcccaccgctaatacctgcatcagcagactgtatgtccccctgtactctagtaagcagatcctgaagcagaagctgctcctggctataaaaacaaaaaactttgggttcgtctag

SEQ ID NO: 102868 - DNA, 8379 bp, Artificial Sequence
  derived and/or modified sequence
atgaccagcatccactttgtggtgcaccccctgcccggcacagaggaccagctgaatgaccggctgcgggaggtgtctgagaagctgaacaagtacaacctgaacagccacccccccctgaatgtgctggagcaggccaccatcaagcagtgtgtggtgggccccaaccacgccgccttcctgctggaggatggccgggtgtgccgcatcggcttctctgtgcagcctgaccggctggagctgggcaagccagacaacaatgatggcagcaagctgaacagcaacagcggggccggccgcaccagccggcccggccgcaccagtgacagcccctggttcctgagcggcagcgagaccctgggccgcctggccggcaacaccctgggcagccgctggagcagcggcgtgggcggcagcggcggcggcagcagcggccgcagcagcgctggggcccgggacagccggcggcagaccagggtcatcagaacaggccgggaccggggcagcggcctgctgggcagccagccccagcccgtcatcccagccagcgtcatccctgaggagctgatcagccaggcccaggtggtgctgcagggcaagagccgcagcgtcatcatccgggagctgcagaggaccaacctggatgtgaacctggccgtgaacaacctgctgagcagagatgatgaagatggagatgatggagatgacacagccagcgagagctacctgcccggggaggacctgatgagcctgctggatgctgacatccacagcgcccaccccagcgtcatcattgatgctgatgccatgttttctgaggacatctcctacttcggctaccccagcttccgccgcagcagcctgagccggctgggcagcagccgggagcgggacagcgagctgctgcgggagcgggagagcgtgctgcggctgcgggagcggcgctggctggatggagccagctttgacaatgaaagaggcagcaccagcaaggagggggagcccaacctggacaagaagaacacccctgtgcagagccctgtgtccctgggggaggacctgcagtggtggccagacaaggatggcaccaagttcatctgcatcggggccctgtacagcgagctgctggccgtgagcagcaaaggagagctgtaccagtggaagtggagcgagagcgagccctacagaaatgcccagaaccccagcctgcaccacccccgggccaccttcctgggcctgaccaatgagaagatcgtgctgctgagcgccaacagcatccgggccaccgtggccacagagaacaacaaggtggccacctgggtggatgagaccctgagctctgtggccagcaagctggagcacacagcccagacctacagcgagctgcagggcgagagaattgtgtccctgcactgctgtgccctgtacacctgtgcccagctggagaacagcctgtactggtggggcgtggtgcccttcagccagaggaagaagatgctggagaaggcccgggccaagaacaagaagcccaagagcagcgctggcatcagctccatgcccaacatcaccgtgggcacccaggtgtgcctgaggaacaaccccctgtaccacgccggggctgtggccttcagcatctctgctggcatccccaaggtgggcgtgctgatggagagcgtgtggaacatgaatgacagctgccgcttccagctgcggagccctgagagcctgaagaacatggagaaggccagcaagaccacagaggccaagccagagagcaagcaggagcctgtgaagacagagatgggccccccacccagccctgccagcacctgcagtgatgccagcagcatcgccagcagcgcctccatgccctacaagagaagaagaagcaccccagcccccaaggaggaggagaaggtgaatgaggagcagtggagcctgcgggaggtggtgtttgtggaggatgtgaagaatgtgcctgtgggcaaggtgctgaaggtggatggagcctacgtggccgtgaagtttcctggcaccagcagcaacaccaactgccagaacagcagcggcccagatgctgaccccagcagcctgctgcaggactgccgcctgctgagaattgatgagctgcaggtggtgaagacaggaggcacccccaaggtgcctgactgcttccagaggacccccaagaagctgtgcatccctgagaagacagagatcctggccgtgaatgtggacagcaagggcgtgcatgctgtgctgaagacaggcaactgggtgcgctactgcatctttgacctggccaccgggaaggccgagcaggagaacaacttccccaccagcagcatcgccttcctgggccagaatgaaagaaatgtggccatcttcaccgctggccaggagagccccatcatcctgagagatggaaatggcaccatctaccccatggccaaggactgcatgggcggcatccgggaccctgactggctggacctgccccccatcagcagcctgggcatgggcgtgcacagcctcatcaacctgcctgccaacagcaccatcaagaagaaggctgctgtgatcatcatggctgtggagaagcagaccctgatgcagcacatcctgcgctgtgactatgaggcctgccggcagtacctgatgaacctggagcaggccgtggtgctggagcagaacctgcagatgctgcagaccttcatcagccaccgctgtgatggcaacagaaacatcctgcacgcctgtgtgtctgtgtgcttccccaccagcaacaaggagaccaaggaggaggaggaggccgagaggagtgaaagaaacacctttgctgagcggctgtctgctgtggaggccatcgccaatgccatctctgtggtgagcagcaatggacctggcaacagagctggcagcagcagcagccgcagcctgcggctgcgggagatgatgagaagaagcctgcgggctgctggcctgggcagacatgaggccggggccagcagcagtgaccaccaggaccctgtgtccccacccatcgcccctccttcctgggtgcctgaccccccagccatggaccctgatggagacatcgacttcatcctggccccagctgtgggcagcctgaccacagctgccactggaacaggccagggccccagcaccagcaccatccctggccccagcacagagcccagcgtggtggagagcaaggacaggaaggccaatgcccacttcatcctgaagctgctgtgtgacagcgtggtgctgcagccctacctgcgggagctgctgagcgccaaggatgcccggggcatgacccccttcatgtctgctgtgtctggccgggcctacccagctgccatcaccatcctggagacagcccagaagatcgccaaggccgagatcagcagcagcgagaaggaggaggatgtgttcatgggcatggtgtgccccagcggcaccaacccagatgacagccccctgtatgtgctgtgctgcaatgacacctgcagcttcacctggacaggagctgagcacatcaaccaggacatctttgaatgtaggacctgtggcctgctggagagcctgtgctgctgcacagaatgtgcccgggtgtgccacaagggccatgactgcaagctgaagaggaccagccccacagcctactgtgactgctgggagaagtgcaagtgcaagaccctgattgctggccagaagagcgcccggctggacctgctgtaccgcctgctgacagccaccaacctggtgaccctgcccaacagcagaggagagcacctgctgctcttcctggtgcagacagtggcccggcagacagtggagcactgccagtacagaccaccccgcatccgggaggacaggaacaggaagacagccagccctgaggacagcgacatgccagaccatgacctggagcccccaagatttgcccagctggccctggagcgggtgctgcaggactggaatgccctgaagtccatgatcatgtttggcagccaggagaacaaggaccccctgagcgccagcagccgcatcggccacctgctgcctgaggagcaggtgtacctgaaccagcagagcggcaccatccggctggactgcttcacccactgcctgattgtgaagtgcacagctgacatcctgctgctggacaccctgctgggcaccctggtgaaggagctgcagaacaagtacaccccaggaagaagagaggaggccatcgctgtgaccatgaggttcctgcggtctgtggcccgggtgtttgtgatcctgtctgtggagatggccagcagcaagaagaagaacaacttcatcccccagcccatcggcaagtgcaagagggtcttccaggccctgctgccctatgctgtggaggagctgtgcaatgtggccgagagcctgattgtgcctgtgaggatgggcatcgcccggcccacagcccccttcaccctggccagcaccagcattgatgccatgcagggcagcgaggagctgttctctgtggagcccctgcccccccggcccagcagtgaccagagcagcagcagcagccagagccagagcagctacatcatccggaacccccagcagaggcgcatcagccagagccagcctgtgcggggcagagatgaggagcaggatgacatcgtgtctgcagatgtggaggaggtggaggtggtggagggcgtggccggggaggaggaccaccatgatgagcaggaggagcacggggaggagaatgctgaggccgagggccagcatgatgaacatgatgaagatggcagtgacatggagctggacctgctggccgctgctgagacagaaagtgacagcgagagcaaccacagcaaccaggacaatgccagcggcagaagatctgtggtgacagctgccacagctggcagcgaggccggggccagctctgtgcctgccttcttctctgaagatgacagccagagcaatgacagcagtgacagcgacagcagcagcagccagagtgatgacatcgagcaggagaccttcatgctggatgagcccctggagaggaccaccaacagcagccacgccaatggagctgcccaggcccccaggtccatgcagtgggccgtgaggaacacccagcaccagagagctgccagcacagcccccagcagcaccagcaccccagctgccagcagcgctggcctcatctacatcgaccccagcaacctgcggcgcagcggcaccatcagcaccagcgctgctgctgctgctgctgccctggaggccagcaatgccagcagctacctgaccagcgccagcagcctggcccgggcctacagcatcgtcatccggcagatcagtgacctgatgggcctcatccccaagtacaaccacctggtgtacagccagatcccagctgctgtgaagctgacctaccaggatgctgtgaacctgcagaactacgtggaggagaagctgatccccacctggaactggatggtgtccatcatggacagcacagaggcccagctgcgctatggcagcgccctggccagcgctggggaccccggccaccccaaccaccccctgcacgccagccagaacagcgcccggcgggagaggatgacagcccgggaggaggccagcctgcggaccctggagggcagaagaagagccaccctgctgagcgcccggcagggcatgatgtctgcccggggggacttcctgaactatgccctgagcctgatgaggagccacaatgatgagcacagtgatgtgctgcctgtgctggatgtgtgcagcctgaagcacgtggcctacgtgttccaggccctgatctactggatcaaggccatgaaccagcagaccaccctggacaccccccagctggagaggaagaggacccgggagctgctggagctgggcatcgacaatgaagacagcgagcatgaaaatgatgatgacaccaaccagagcgccaccctgaatgacaaggatgatgacagcctgcctgctgagaccggccagaaccaccccttcttccgccgcagtgacagcatgaccttcctgggctgcatcccccccaacccctttgaggtgcccctggccgaggccatccccctggccgaccagccccacctgctgcagcccaatgccaggaaggaggacctgtttggccggcccagccagggcctgtacagcagcagcgccagcagcggcaagtgcctgatggaggtgacagtggacaggaactgcctggaggtgctgcccaccaagatgtcctatgctgccaacctgaagaatgtgatgaacatgcagaaccggcagaagaaggagggggaggagcagcctgtgctgcctgaggagacagagagcagcaagccaggccccagcgcccatgacctggccgcccagctgaagagcagcctgctggccgagatcggcctgacagaaagtgagggcccccccctgaccagcttccggccccagtgcagcttcatgggcatggtgatcagccatgacatgctgctgggccgctggaggctgagcctggagctgtttggccgggtcttcatggaggatgtgggcgctgagcccggcagcatcctgacagagctgggcggctttgaggtgaaggagagcaagttccggcgggagatggagaagctgaggaaccagcagagccgggacctgagcctggaggtggaccgggaccgggacctgctgatccagcagaccatgaggcagctgaacaaccactttggaagaagatgtgccaccacccccatggctgtgcaccgggtgaaggtgaccttcaaggatgagcctggagagggcagcggcgtggcccggagcttctacacagccatcgcccaggccttcctgagcaatgagaagctgcccaacctggagtgcatccagaatgccaacaagggcacccacaccagcctgatgcagaggctgaggaacagaggagagcgggaccgggagcgggagcgggagcgggagatgagaagaagcagcggcctgcgggccggcagcagaagagaccgggaccgggacttccggcggcagctgagcattgacacccggcccttccggcctgccagcgagggcaaccccagtgatgatcctgagcccctgcctgcccaccggcaggccctgggggagcggctgtacccccgggtgcaggccatgcagcctgcctttgccagcaagatcaccggcatgctgctggagctgagccctgcccagctgctgctgctgctggccagcgaggacagcctgcgggcccgggtggatgaggccatggagctgatcatcgcccacggcagagaaaatggagctgacagcatcctggacctgggcctggtggacagcagcgagaaggtgcaggagaacaggaagagacatggcagcagccgctctgtggtggacatggacctggatgacacagatgatggagatgacaatgcccccctcttctaccagcccgggaagaggggcttctacacccccaggcctgggaagaacacagaggcccggctgaactgcttcagaaatattggccgcatcctgggcctgtgcctgctgcagaatgagctgtgccccatcaccctgaacagacatgtgatcaaggtgctgctgggcaggaaggtgaactggcatgactttgccttctttgatcctgtgatgtatgagagcctgcggcagctgatcctggccagccagagcagtgatgctgatgctgtgttttctgccatggacctggcctttgccatcgacctgtgcaaggaggagggcggcggccaggtggagctgatccccaatggagtgaacatccctgtgaccccccagaatgtgtatgaatatgtgaggaaatatgcagagcacaggatgctggtggtggccgagcagcccctgcacgccatgaggaagggcctgctggatgtgctgcccaagaacagcctggaggacctgacagctgaggacttccggctgctggtgaatggctgtggggaggtgaatgtgcagatgctgatctccttcaccagcttcaatgatgaaagtggagaaaatgctgagaagctgctgcagttcaagcgctggttctggagcatcgtggagaagatgtccatgacagagcggcaggacctggtgtacttctggaccagcagccccagcctgcctgccagcgaggagggcttccagcccatgcccagcatcaccatccggcccccagatgaccagcacctgcccacagccaacacctgcatcagccggctgtatgtgcccctgtacagcagcaagcagatcctgaagcagaagctgctgctggccatcaagaccaagaactttggatttgtgtag

SEQ ID NO: 102869 - DNA, 8379 bp, Artificial Sequence
  derived and/or modified sequence
atgaccagcatccacttcgtggtgcaccccctgcccggcaccgaggaccaattaaacgataggctgagggaggtgagcgagaagttaaataagtataaccttaattcacaccccccactaaatgtgctcgagcaggcaaccatcaagcagtgcgtcgttgggccaaaccacgccgcgttcctgctggaagacggacgcgtgtgccggatcggctttagcgtgcaaccagaccgactcgagctaggaaagcccgacaacaacgatggttcaaagttaaactctaacagcggagcgggcagaacgagtcgccctggacgcacaagcgatagcccgtggtttctaagtgggagtgaaactttgggtagattagcaggtaatactttaggatctcggtggtctagtggagtgggaggaagcggcggagggtcatcaggccgatcgtcagcaggggctagggatagtaggagacaaacacgcgtgatcaggaccggacgcgatagaggcagcggtctactgggtagtcagccgcaacctgttatcccagctagtgttatacccgaggagctcattagccaagcccaggtggttctgcaggggaaatcgcggtccgtcattataagagaactccaaagaactaacttagacgtcaatctagcggtgaacaacttgctgagtagggatgacgaggacggcgacgatggtgacgatactgcatccgagagttacctcccaggagaggatttgatgagcctgctagatgcagacattcactccgctcacccatccgtcattatcgacgcagacgcgatgttctctgaagatatatcatacttcggctacccctccttcagacggagcagtcttagccggctgggcagcagccgggaaagagacagcgaactgctgagggagcgcgagagtgtgctgcggctgagagagcgcagatggctggacggagctagcttcgacaacgagagaggctccacatccaaggaaggagagcctaacctggataagaagaacactccagtacagagccccgtatccctgggcgaggatctgcaatggtggcccgataaggatggtactaagtttatctgcatcggcgctctttacagcgagctgctggccgtcagctcgaagggagaactctatcaatggaaatggtccgaatcggagccctataggaatgctcagaacccgtcacttcaccatccacgcgctaccttcctaggacttacaaacgagaagattgttctgctttctgcgaactctattcgcgccacagtggccactgagaataacaaagttgcaacctgggtcgatgagaccctgagcagtgtggcctctaagctggaacatactgcccaaacgtatagtgagctccagggagagcgcattgtgtcactgcattgctgtgcattgtacacatgcgcacagctagagaattctctctattggtggggcgtcgtgcctttttcacaacggaaaaaaatgcttgagaaagcccgggccaagaataaaaaaccgaagagttccgctgggatttcttcaatgcctaatatcacggtggggacacaggtgtgtctgcgaaataacccgctgtatcatgccggagctgtggcatttagtatttcagccggcattcccaaggttggagtactgatggagtcagtttggaacatgaacgattcttgcaggtttcagctgcgtagccccgaatccctcaagaacatggagaaggcaagcaaaacaaccgaagcaaagccagaatccaaacaggaacccgtgaaaacggaaatgggacctccaccctctcccgcgtctacctgcagtgatgcaagttcgatagcttccagcgcatcaatgccgtacaagaggcgacggagcacgcccgctccaaaggaggaggaaaaagtgaatgaggagcagtggagcctgagggaggtcgtatttgtcgaggacgttaagaatgtacccgtcggcaaagtccttaaggtggatggcgcatatgtcgcagtaaaattcccaggtacctccagcaacactaactgtcaaaacagttctggtcccgacgcagacccttctagtctcttgcaggactgccggttactcaggatcgatgagctgcaagttgttaaaacaggcggtacccctaaagtgcccgattgtttccaacgtactcctaaaaagctttgtatacccgagaaaaccgagattctggctgtgaacgtggattctaagggagttcatgcagtgttgaaaacaggcaactgggtgcgctattgtatttttgacctggccactggtaaggcagagcaggagaataactttcctacctcaagtatcgccttcttaggccagaacgaacgcaacgtagccatttttactgcaggacaggagagtccaataattttaagggacggcaatggcacgatttacccaatggctaaggattgtatgggaggcattcgcgatccagattggctggatctccctcccattagctcgctgggcatgggtgttcattcgctgatcaatctcccggccaattccacgatcaaaaaaaaagctgcagtgatcatcatggctgtggaaaaacagaccctcatgcagcacatcttaagatgcgattatgaggcttgccggcagtacttgatgaatctggagcaggctgtggttctggaacagaacctccagatgcttcagacattcatttcccatcggtgtgatgggaatagaaacattttgcatgcctgtgtgtctgtttgttttccaacttcgaataaagagacaaaagaagaagaagaggccgaaaggtctgagaggaacacctttgcagaacgacttagtgccgttgaggcgatcgccaacgcaatctccgttgtgtcgagcaatggacctggaaatagagctgggagcagcagcagcagatctttacggcttcgagaaatgatgcggaggtcattgcgcgcagccgggttggggcggcacgaagccggcgccagctcaagtgatcatcaagatccagttagtccccccattgccccccccagttgggtccccgaccccccagcaatggatccagacggggacatagactttatcttagcccccgccgtcggttcactgacaaccgccgctacggggacaggccaaggaccatccacctccaccatccccggcccatctaccgaaccgtccgtcgtcgagagcaaggaccgcaaagccaacgcccacttcatactgaagctcttgtgcgacagcgtagtactgcagccctacttgcgcgagctcctttccgccaaggatgcaagagggatgaccccttttatgtcagccgttagtggtcgcgcttatcctgctgccattacaatactggagacagcacagaagatcgccaaagcagagatcagttctagcgagaaggaggaagacgtgttcatggggatggtctgtccatctggcaccaatccagatgattcaccgttgtatgtattgtgctgtaacgatacatgttcgttcacatggacaggtgccgagcacataaaccaagacatctttgagtgtcggacctgcggcctgctcgaatcactgtgctgttgtacagaatgtgcccgcgtctgccacaaaggccatgattgcaagctcaagcggaccagtcctactgcatactgcgattgctgggaaaagtgcaaatgtaagactctgatcgctggtcaaaagtctgcccgcctggacctgctctatcggctgctgaccgccaccaacctggtgaccctgccaaactcacggggtgagcacctgctgctattcttggtgcagaccgtggccaggcagacagtcgagcactgccaatatcgacctccccgtatccgtgaagaccgtaacagaaagaccgcatctcccgaagactcggacatgcctgatcatgacctggagccacccaggtttgcccagctagctctggagcgagttctgcaggattggaatgctttgaagagtatgatcatgttcggctcacaggagaataaagatcctctctcagcttccagccgtattggtcatttgctcccagaagaacaagtctacctaaaccagcagtccgggacgatccgacttgattgtttcacccactgtctgatagtgaagtgcactgcagacattctgctgcttgacaccctgctgggaacgcttgtcaaagagttgcagaacaaatataccccaggaaggcgtgaagaggccatcgccgtgaccatgcggttccttcgctccgtggcgagggtctttgtgattcttagcgtggaaatggccagcagcaaaaagaagaataacttcatcccccagcctataggcaaatgcaaacgggtcttccaggccctgcttccctacgcagtggaagagctgtgcaatgtggctgagtctttgattgtaccagtaagaatgggtattgctcggcccactgccccctttactttggctagcacatccatcgatgctatgcagggaagtgaagaactgttttctgtggagcctctccccccacggccatccagcgatcagagttcttccagctcccagtctcagtcttcctacatcatacgaaaccctcagcagagacggatctcgcagagccaacccgttagagggagggatgaggagcaggatgacatcgtgagcgccgacgtcgaggaggtggaggtcgttgagggggtggccggcgaagaagaccaccacgacgagcaagaagaacacggggaggagaacgccgaagctgagggccagcacgatgagcatgacgaagacggatctgacatggagctggatctgctggccgcggctgagacagagtcagattctgagagtaaccattcaaatcaggataacgcgtctggaaggcgttccgtagttaccgccgcaaccgcgggtagcgaagcgggtgcttcttccgtcccagcctttttttcagaggatgactcccagtccaacgactcctctgactctgactcttcatcaagccagagcgatgatattgaacaagagacttttatgttagatgaacctcttgagagaacaacaaattcatcccatgccaatggtgccgcccaggccccccggtcaatgcagtgggcggtgaggaacactcagcaccagagggctgcatccactgcgccatcgagcacttctacgccagccgctagttcggctggtctgatttacattgatccttctaatttgaggagatccgggacaatctcaacatccgcagctgcagcagccgcagcacttgaggcctccaatgcctctagttatcttacctccgctagcagcctggctcgggcttatagcattgtcatccgacaaattagcgatttaatggggctgattccgaagtataaccacctcgtttactcacagatccccgctgctgtgaagctgacatatcaagatgccgtgaatcttcaaaattacgtagaagaaaagcttataccaacatggaactggatggtttccattatggattccaccgaggcccagctgaggtacgggagcgcgttagcatccgcaggtgacccgggccatcctaatcatccactccacgcaagccagaactcagccagacgggagcggatgaccgctcgcgaggaagccagcctgcgtacacttgaaggcagaagacgggctacgctgctgagcgcacggcaggggatgatgtccgctcgtggcgatttcctgaactacgcgttaagtctgatgagaagccataacgatgaacacagcgatgtgttgcccgtgctcgacgtgtgctctctgaagcacgttgcatacgtttttcaggccctcatatattggatcaaggcaatgaaccaacagaccactctagatacaccacagctggaaagaaagcggacccgggagcttcttgagctggggatcgataacgaagattccgaacacgaaaatgatgatgacacaaaccagtctgctaccctcaacgataaggatgacgacagcttgcctgcagagaccgggcaaaaccatccgttcttccggagatctgactcgatgacatttctgggctgcattccccctaacccttttgaagtgcccttagccgaggccatcccactagcagaccagcctcacttgttgcagcccaacgcccgcaaggaggacctgttcggacgaccaagccagggtttgtattcttcgtcagccagcagtggcaagtgcttaatggaagtgaccgtcgatcgtaactgtcttgaggtcttacccacgaaaatgtcttacgccgccaacctgaagaacgtgatgaacatgcagaaccggcagaagaaggagggcgaagagcaaccggtcctgcctgaagagaccgagagcagtaaacccggcccaagtgctcacgatctcgctgctcaactgaaaagctccttgcttgcagaaatcggactgaccgagtccgaagggccccccctcactagctttcggccacagtgcagtttcatgggaatggtgatcagccacgacatgttgctgggcaggtggcgactgagcctggagctgttcggaagagtgtttatggaagacgtgggggccgaacccggaagcatcctgactgaactcggagggtttgaggtgaaagaatcaaagtttcggcgcgagatggagaagttgagaaatcagcaaagtagggacctctctcttgaagttgacagagatcgagacctccttattcagcagacaatgcgccagcttaacaaccatttcggccgccgctgtgccacaacccccatggccgtgcaccgggtcaaagtgacttttaaggacgaacctggcgaaggctccggggtggctcgcagtttctacactgccatcgctcaagctttcttatccaacgagaagctccctaatcttgagtgcattcagaatgccaacaaggggactcatacaagcctgatgcaaagactgcggaacagaggggagcgggacagggagagggaacgcgagagggaaatgcgtcgaagctctgggctgcgcgccggcagccgaagggatcgggatagggattttagacggcagttgagcatcgacacgcggccattccggcctgcttctgagggcaacccctcggatgatccagagcccctccccgcccaccgtcaggctctgggcgaaagactttatcctcgtgttcaagccatgcagccagctttcgctagcaagattacaggtatgctcctggagctctctccagctcaactgctcctgttgctcgcttcagaggatagcctgagggcaagggtcgatgaagctatggagttgatcatcgctcatggcagggagaacggcgctgacagtatcttggacttaggccttgtggactcttccgagaaggttcaggaaaaccggaagaggcacggctcaagccgaagcgtcgtcgatatggatctggacgatactgatgatggtgatgataacgctcctttgttctatcagcccggtaagcggggcttttacacgccaaggcctgggaagaataccgaggctcgactgaattgctttcgcaatataggtaggatcttgggcttgtgcctgctgcagaacgagctctgcccaataacattgaatcgacacgtcataaaagtgctgcttggtcgtaaagttaactggcatgattttgcattcttcgacccagttatgtatgagtcgctgaggcagcttatactcgcgagtcaaagttccgacgccgacgctgtgttctctgccatggacttggcatttgccatcgacctttgcaaggaggaagggggcggtcaggtggagctgatcccgaacggagtaaacatacctgtcacacctcagaacgtttacgaatatgtgagaaagtatgccgaacatcggatgctggtggtggccgagcagcctttgcatgccatgagaaagggcttactggacgtgctgcctaaaaattctctggaagacctgactgccgaagattttcggctgcttgttaacgggtgtggggaggtgaatgtgcagatgttaatttcattcacttccttcaatgatgagagtggcgaaaatgctgagaaactcctgcagttcaaacgctggttctggagtatagtggagaagatgagcatgactgagcgccaagatctggtgtacttctggacctctagtccaagtcttcctgcttctgaagaggggttccagcccatgcccagcatcaccatccgacctcctgatgatcagcatctccctaccgcgaacacatgcatctcaagactgtatgtgccgctgtacagcagcaaacagattcttaaacagaagctgctgctggccatcaagaccaagaactttggcttcgtatag

SEQ ID NO: 102870 - DNA, 8378 bp, Artificial Sequence
  derived and/or modified sequence
atgacctcaatccatttcgtcgtgcatcctttacccggtaccgaggaccagttaaatgatcgtctgagggaagtctcagaaaagctgaataagtacaatctcaacagtcatcctccactgaatgtcctggaacaggcaaccattaagcagtgtgtggttggtcccaaccatgccgcttttttgttggaggatggaagagtgtgtcgtattggctttagtgtccagccagacagactggaattagggaagcccgacaataacgatggatccaagctgaactctaattctggggctggaaggaccagccgaccagggcgaacgtcagattcaccttggtttttaagtggttccgagacgttgggaaggcttgccggaaatactctcggtagccgatggtcttctggggttgggggtagcgggggagggtcctctgggagatcctctgcaggggcaagagacagtaggagacagacaagagtcatcagaactggcagggatagagggtctggactgttaggctcccaaccgcaaccggtcatccccgcatctgttatccctgaagagctgatctcacaggcccaggttgttctccaagggaaatcacgctccgtcataataagggagctccaaagaacaaacctggatgtgaacctggccgtgaataatttactctctcgggacgacgaagatggtgatgatggcgatgacactgctagcgagtcatacctgcccggagaggacctcatgagcctcctggacgccgatattcacagtgcccatcctagcgtaattatcgacgcagatgccatgtttagcgaagatatctcctacttcggatatcccagcttccgacgttcttctctatcgcggcttgggagcagtcgggaaagagatagcgagctgctgagggaaagggagagtgtcttgcggctcagagagagacgctggcttgacggcgcttcctttgataatgagcgcggaagtaccagcaaggaaggcgagcctaacttggataaaaaaaacactccagtgcagtcacctgtttccttaggagaggacttacagtggtggcctgacaaagacgggacaaagtttatctgtataggagccctctattccgagctcctcgcagtgagttctaaaggcgaactgtatcagtggaagtggagcgagagcgaaccttaccgaaacgcgcagaatcccagtctgcatcaccctcgcgctacatttctcggcctgacgaatgagaaaatcgtcctgttgtccgcgaacagtatccgtgccacggtggcaaccgaaaacaacaaggtggccacctgggtcgatgaaactctttccagcgtcgctagtaagcttgagcacaccgctcagacctacagtgaactccagggagagagaatcgtttcccttcattgttgtgccctgtatacatgtgcccaactggagaatagtctgtattggtggggcgtggtgccattctcccagcgaaaaaagatgctggaaaaggcaagggcgaaaaacaagaaacccaaaagctccgcgggaattagctctatgccaaacatcacggtaggaacccaggtgtgtttgcggaacaatccgctttaccacgcaggagctgtggcattctcaatctcagccggaattccgaaggtaggcgtacttatggagagcgtatggaacatgaatgatagttgccggtttcaactccgatcgcctgagagcctcaaaaatatggagaaggccagcaagactactgaagccaaacctgaaagcaagcaggaacctgttaagaccgagatggggccacctcctagtccagccagtacgtgttccgacgcatcttccatcgcctcaagtgcatcaatgccctacaagaggcggcgaagtacgcccgcacctaaggaggaggaaaaagtgaatgaggagcaatggagtttgagagaagtcgtgtttgtggaggatgtgaagaacgttcccgtcggcaaagtactgaaagtcgacggcgcttacgttgcagtgaaattccctggcactagcagtaatactaattgccaaaattcgagtgggcctgacgcggaccctagtagtttgctgcaggactgccggctgctacgcatcgacgaacttcaagtggtgaagaccggagggactccaaaagtgccagactgtttccagaggacgcctaagaagctgtgtatccccgagaaaacggagattctcgctgtaaatgttgactctaaaggtgtgcatgccgtgttgaagacaggaaattgggtacgctactgcatcttcgaccttgctacgggcaaggccgaacaggagaacaatttcccaacatcctctattgcctttttgggacagaatgagaggaacgtcgccatctttacggccggacaggagtctcctatcatcctgagagatggaaatgggacgatatatcctatggctaaagactgcatggggggtattcgggatcctgattggctggatctcccaccaatatcatccctcggcatgggcgtgcatagcttgataaatcttcctgccaattctacaatcaaaaagaaagccgctgtgataatcatggcggttgagaagcaaaccctcatgcagcatatactgcgctgtgattacgaagcctgcagacagtatctgatgaatttggagcaagccgtggtgcttgagcagaatcttcagatgctccaaaccttcatatctcacaggtgcgacggaaatcgaaatatactccatgcttgtgtcagtgtctgctttccaactagcaacaaagagactaaggaggaggaggaggcggaacggtcggaaaggaatacctttgctgaacggctgagcgccgtggaggcgatagctaatgctatctctgtggtgagcagtaacggtccaggtaaccgggctggatcctcctctagtcgcagtcttcggctgcgcgaaatgatgagaaggagtctacgcgctgcagggctgggcagacacgaagccggagcgtcttcctctgatcaccaggacccagtttctccccctatcgctcccccaagctgggtgcccgatccgccagcaatggaccctgacggagatatcgactttatcctggctccggcagtgggctcactcaccactgctgccacaggtacgggtcagggaccatcaacgtccaccattcctggacctagcaccgaaccctccgtcgttgaaagcaaggaccgcaaggcaaacgcccattttatcttaaagctgctttgcgactcagtggtacttcaaccctatctgcgcgagctgctctcagcgaaggatgctagaggcatgacaccatttatgtctgctgtttcaggccgtgcctatccagccgcaataacgattctggaaactgcccaaaagatcgcgaaagcagagatctcaagcagcgagaaagaggaagatgtctttatgggcatggtgtgcccatccggcacaaaccctgacgactctcccctatatgtgctctgttgcaatgacacatgctcctttacctggacgggcgcagaacacatcaatcaggacatttttgaatgtcgcacctgtggtctgctcgagtcgctatgttgctgtaccgagtgcgccagggtctgtcacaagggtcacgactgcaagttaaaaaggacatcccccactgcatactgcgattgctgggaaaagtgcaagtgtaaaactcttatagctgggcagaagtccgccagactcgatctcctgtaccgattactgaccgctacaaatttggttactctgccgaacagccgcggagagcatctgctcctattcctcgtgcaaacagttgcgagacaaactgtcgaacactgccagtaccgacctccacggattagagaagaccggaacaggaaaaccgcttcgcccgaggattctgatatgcccgatcacgatctggaacctcccagatttgctcagcttgccctggaaagagttttgcaggactggaatgccttgaaatcaatgatcatgtttggcagtcaggagaataaagaccccttgtccgccagtagccgcattggccacttacttccggaggagcaggtctatctaaatcagcagtctgggacaattcgcttggattgctttacccactgcctgatcgtcaaatgcaccgcggatatcttactcctggatacactacttggaactctggtcaaggaactgcagaataagtatactcccggacgccgtgaggaggccattgccgtgaccatgaggtttctgaggagcgtcgcaagagtttttgtcatactgtccgtggagatggcttcatctaaaaagaagaacaacttcatccctcagccgataggcaagtgcaaacgagtgtttcaggctctgctaccatatgccgttgaagagctgtgcaacgtggctgaatcattaatcgtcccagtacgcatgggtattgcacgcccaaccgccccatttactctagcctccaccagtatcgatgcaatgcaggggagcgaagagttgtttagcgtcgagcccctgccaccacgcccatcgagtgaccaaagcagcagctcttcccagtcccaaagttcttatataattaggaatccgcaacagaggcggatctctcaaagtcagccagtccggggtagggacgaagagcaggacgacatagtatcggcagatgtcgaggaggtcgaggtggtggagggggtggccggagaggaagatcatcatgatgagcaggaagaacacggcgaggaaaatgctgaggcggagggtcagcacgacgaacatgacgaagacgggtccgatatggaactagatctgttggcagcagccgaaactgaatccgacagtgagtctaaccactctaaccaggacaacgctagcgggcgaagaagcgttgtgacagctgcaactgccggtagtgaggccggagcctcatcagtgcccgcattcttcagtgaagacgacagccaatctaatgatagctctgattctgactctagttccagtcaatccgatgacattgaacaagagactttcatgcttgatgagcccctcgaaaggacaaccaacagttcgcacgccaacggggctgcccaggcccctaggtccatgcagtgggccgtgcgcaatactcaacatcaacgggcagcaagcacagcgccatcctcaacctccaccccagcagccagcagtgcaggcttgatatacatagaccctagcaatttgaggaggagtggaaccatatctacatccgcagccgcagctgcggcagcgctagaggcctccaacgcatcatcatacttaaccagcgcaagctctttggcacgggcatattcgatcgtgattcggcagatctccgacctcatgggcctgattcctaagtacaatcatctggtgtatagccagatccctgccgcagtcaaattaacctaccaggacgcagtgaacttacagaactacgtggaggaaaagctaatccccacatggaactggatggtgagcatcatggacagcaccgaggcccagttaagatatggaagcgccttggcaagcgcgggtgatcctggccacccaaaccaccccctgcacgcctcccagaactccgcacggagggagcgtatgaccgccagagaagaggcgagcctgaggacattggaaggacggagaagggctacactactgagtgcccgacaagggatgatgagtgcacgtggggatttcctgaactatgcgctgtcactgatgcgctctcacaacgatgaacactccgatgtactgccggtgcttgatgtgtgctcactgaaacacgtcgcatacgtcttccaggccctaatctattggattaaggctatgaatcaacaaactaccctagacacgccccagttggagcgaaagcgcaccagagagcttcttgaacttggaatcgacaacgaggattccgaacatgagaacgacgatgacaccaatcagtcagcgaccttgaatgacaaggacgatgacagtctccctgctgaaacgggccaaaatcatcctttcttcaggcggtcagacagcatgacatttttaggatgcattcctcccaaccctttcgaagttcccctggcagaggctattccactggcagatcagccccatctgttgcagcctaacgcacggaaagaggacctgttcggtagaccctcccaaggactgtattcatcctcagccagtagcggtaaatgcctgatggaagtaactgttgatagaaattgtctcgaggtcctgcccacaaagatgtcgtacgccgctaaccttaaaaacgtgatgaatatgcagaaccgacagaagaaggagggtgaggaacagcccgtgctgcccgaggaaactgaatcttcaaaacctggccctagcgcccatgacctcgcggctcagttgaaaagctctctgctggcggagattggtctgaccgaaagtgagggtccaccgctcacatcgttccggccacagtgtagctttatgggcatggtgatttcccatgatatgctgctgggcaggtggcgtctatcacttgagcttttcggaagagtgtttatggaggacgtgggtgcagagcctggatcgatcctgactgagctggggggtttcgaggtgaaggaatctaagttccgaagggagatggaaaagctgagaaatcaacagtcaagggacctgtcgctcgaagtcgaccgggatcgggacctcttgattcagcagacgatgagacagttgaacaaccactttggacgcaggtgcgccaccacccctatggccgtccacagggtgaaagtgacattcaaggacgagccgggtgaggggtccggggtagcccgtagtttctacaccgccatcgcacaggcgtttttgtcaaatgagaaactccccaacctggagtgtattcagaatgcaaataagggcacccacacctcgctaatgcagcggctcagaaaccggggtgaacgcgacagagagcgcgagagggagcgtgagatgagacgatcctctgggcttcgcgctgggagtcgaagagaccgggacagagactttagacggcagcttagcatagacacacggccattccgtcctgcctctgaaggtaacccttcggatgaccctgagccactgcctgcccatcgccaagccctgggggagagattgtatccaagggttcaggccatgcagccagcatttgcctctaaaatcactggcatgttgctggaactgtccccagcacagttgctcttactactggctagcgaggattcactccgcgcaagagtggatgaagccatggaactgatcattgctcacgggagggagaatggcgcagattctatcctggacttgggattagtagattcttctgagaaagtccaggagaatagaaagcgccacggatcttcccggtctgttgtagacatggatttagacgacacagacgatggcgacgataatgcccctctgttttatcagcccggtaagagaggattctacacaccacgtccgggtaagaacactgaggcaagactgaactgtttcagaaacatcggtagaatcttaggcctgtgcttgctgcaaaacgaactgtgtcctataacactgaaccgccacgttatcaaagttctgcttggcagaaaggttaactggcacgattttgcattcttcgaccctgtgatgtatgagtcactccggcagctcatcctggctagtcagagctccgacgcagacgccgtattcagcgccatggaccttgcgtttgccattgacctctgcaaggaagagggaggcggacaggttgagctgattcctaacggggttaatatccccgttacaccacagaacgtgtacgagtacgtcagaaaatacgctgagcatagaatgctcgtcgtggcggagcagcccctccacgcgatgcgcaagggcctgctggatgtgcttcccaaaaacagcttggaagacctcaccgcggaagatttcagattactcgtgaatgggtgtggagaggtgaacgtgcagatgctgatcagctttacatcgttcaatgatgagtctggggagaacgccgaaaaactgctccagtttaaaagatggttctggtcaatcgtcgagaagatgagtatgacggagcggcaggacctggtatacttctggacgtcatctccttctctgcctgccagcgaggagggtttccagccaatgcctagtattacgattaggccccctgacgatcagcacctgcccacagcgaatacatgtatctctcgtctctatgtgcccctgtactcatctaagcagattctgaaacagaagcttctgcttgcaatcaaaactaaaaatttcggatttgtgta

SEQ ID NO: 102871 - DNA, 9418 bp, Artificial Sequence
  derived and/or modified sequence
tggcggcggcagcttctcgctagtgacgcgcggtgcgggctcatctccttcccctccttcctcacctcccctagtccggaccccgtccgccgccgggaccagaccgtccccgtagcccgcagccagcagccgcccctctcctcccccggccgcccctctcccaacgcccgtctgccgctggccggcggcgcgcccctggtcccggccgcctgcctcgcactccgcgctgtcgccgggggagcgggtggcgtgtggattcgccctcctgcccgcccctccgggccgcggacacacgcccggcagggaggcggcggcggcccctgcgtatttgcttccctccatttggggactgggaggcggcggcggctgtgggttttggggaggggtagagggctggggggcgggcgagagcgggagggggccgccctcgagtggaggacgagaaggaaagcaccatgacgtccatccatttcgtggttcacccgctgccgggcaccgaggaccagctcaatgacaggttacgagaagtttctgagaagctgaacaaatataatttaaacagccacccccctttgaatgtattggaacaggctactattaaacagtgtgtggtgggaccaaatcatgctgcctttcttcttgaggatggtagagtttgcaggattggtttttcagtacagccagacagattggaattgggtaaacctgataataatgatgggtcaaagttgaacagcaactcgggggcagggaggacgtcaaggcctggtaggacaagcgactctccatggtttctctcaggttctgagactctaggcaggctggcaggcaacaccttaggaagccgctggagttctggagtgggtggaagtggtggaggatcctctggtaggtcatcagctggagctcgagattcccgccggcagactcgagttattcggacaggacgggatcgagggtctgggcttttgggcagtcagccccagccagttattccagcatctgtcattccagaggagctgatttcacaggcccaagttgttttacaaggcaaatccagaagtgtcattattcgagaacttcagagaacaaatcttgatgtgaaccttgctgtaaataatttacttagccgggatgatgaagatggagatgatggggatgatacagccagcgaatcttatttgcctggagaggatcttatgtctctccttgatgccgacattcattctgcccacccaagtgtcattattgatgcagatgccatgttttctgaagacattagctattttggttacccttcttttcgtcgttcatcactttccaggctaggctcatctcgagttctccttcttcccttagagagagactctgagctgttgcgtgaacgtgaatccgttttacgtttacgtgaacgaaggtggcttgatggagcctcatttgataatgaaaggggttctaccagcaaggaaggagagccaaacttggataagaagaatacacctgttcaaagtccagtatctctaggagaagatttgcagtggtggcctgataaggatggaacaaaattcatctgtattggggctctgtattctgaacttctggctgtcagcagtaaaggagaactttatcagtggaaatggagtgaatctgagccttacagaaatgcccagaatccttcattacatcatccacgagcaacatttttggggttaaccaatgaaaagatagtcctcctgtctgcaaatagcataagagcaactgtagctacagaaaataacaaggttgctacatgggtggatgaaactttaagttctgtggcttctaaattagagcacactgctcagacttactctgaacttcaaggagagcggatagtttctttacattgctgtgccctttacacctgcgctcagctggaaaacagtttatattggtggggtgtagttccttttagtcaaaggaagaaaatgttagagaaagctagagcaaaaaataaaaagcctaaatccagtgctggtatttcttcaatgccgaacatcactgttggtacccaggtatgcttgagaaataatcctctttatcatgctggagcagttgcattttcaattagtgctgggattcctaaagttggtgtcttaatggagtcagtttggaatatgaatgacagctgtagatttcaacttagatctcctgaaagcttgaaaaacatggaaaaagctagcaaaactactgaagctaagcctgaaagtaagcaggagccagtgaaaacagaaatgggtcctccaccatctccagcatccacgtgtagtgatgcatcctcaattgccagcagtgcatcaatgccatacaaacgacgacggtcaacccctgcaccaaaagaagaggaaaaggtgaatgaagagcagtggtctcttcgggaagtggtttttgtggaagatgtcaagaatgttcctgttggcaaggtgctaaaagtagatggtgcctatgttgctgtaaaatttccaggaacctccagtaatactaactgtcagaacagctctggtccagatgctgacccttcttctctcctgcaggattgtaggttacttagaattgatgaattgcaggttgtcaaaactggtggaacaccgaaggttcccgactgtttccaaaggactcctaaaaagctttgtatacctgaaaaaacagaaatattagcagtgaatgtagattccaaaggtgttcatgctgttctgaagactggaaattgggtacgatactgtatctttgatcttgctacaggaaaagcagaacaggaaaataattttcctacaagcagcattgctttccttggtcagaatgagaggaatgtagccattttcactgctggacaggaatctcccattattcttcgagatggaaatggtaccatctacccaatggccaaagattgcatgggaggaataagggatcccgattggctggatcttccacctattagtagtcttggaatgggtgtgcattctttaataaatcttcctgccaattcaacaatcaaaaagaaagctgctgttatcatcatggctgtagagaaacaaaccttaatgcaacacattctgcgctgtgactatgaggcctgtcgacaatatctaatgaatcttgagcaagcggttgttttagagcagaatctacagatgctgcagacattcatcagccacagatgtgatggaaatcgaaatattttgcatgcttgtgtatcagtttgctttccaaccagcaataaagaaactaaagaagaagaggaagcggagcgttctgaaagaaatacatttgcagaaaggctttctgctgttgaggccattgcaaatgcaatatcagttgtttcaagtaatggcccaggtaatcgggctggatcatcaagtagccgaagtttgagattacgggaaatgatgagacgttcgttgagagcagctggtttgggtagacatgaagctggagcttcatccagtgaccaccaggatccagtttcaccccccatagctccccctagttgggttcctgaccctcctgcgatggatcctgatggtgacattgattttatcctggcccccgctgtgggatctcttaccacagcagcaaccggtactggtcaaggaccaagcacctccactattccaggtccttccacagagccatctgtagtagaatccaaggatcgaaaggcgaatgctcattttatattgaaattgttatgtgacagtgtggttctccagccctatctacgagaacttctttctgccaaggatgcaagagggatgaccccatttatgtcagctgtaagtggccgagcttatcctgctgcaattaccatcttagaaactgctcagaaaattgcaaaagctgaaatatcctcaagtgaaaaagaggaagatgtattcatgggaatggtttgcccatcaggtaccaaccctgatgactctcctttatatgttttatgttgtaatgacacttgcagttttacatggactggagcagagcacattaaccaggatatttttgagtgtcgaacttgtggcttgctggagtcactgtgttgttgtacggaatgtgcaagggtttgtcataaaggtcatgattgcaaactcaaacggacatcaccaacagcctactgtgattgttgggagaaatgtaaatgtaaaactcttattgctggacagaaatctgctcgtcttgatctactttatcgcctgctcactgctactaatctggttactctgccaaacagcaggggagagcacctcttactattcttagtacagacagtcgcaaggcagacggtggagcattgtcaatacaggccacctcgaatcagggaagatcgtaaccgaaaaacagccagtcctgaagattcagatatgccagatcatgatttagagcctccaagatttgcccagcttgcattggagcgtgttctacaggactggaatgccttgaaatctatgattatgtttgggtcgcaggagaataaagaccctcttagtgccagcagtagaataggccatcttttgccagaagagcaagtatacctcaatcagcaaagtggcacaattcggctggactgtttcactcattgccttatagttaagtgtacagcagatattttgcttttagatactctactaggtacactagtgaaagaactccaaaacaaatatacacctggacgtagagaagaagctattgctgtgacaatgaggtttctacgttcagtggcaagagtttttgttattctgagtgtggaaatggcttcatccaaaaagaaaaacaactttattccacagccaattggaaaatgcaagcgtgtattccaagcattgctaccttacgctgtggaagaattgtgcaacgtagcagagtcactgattgttcctgtcagaatggggattgctcgtccaactgcaccatttaccctggctagtactagcatagatgccatgcagggcagtgaagaattattttcagtggaaccactaccaccacgaccatcatctgatcagtctagcagctccagtcagtctcagtcatcctacatcatcaggaatccacagcagaggcgcatcagccagtcacagcccgttcggggcagagatgaagaacaggatgatattgtttcagcagatgtggaagaggttgaggtggtggagggtgtggctggagaagaggatcatcatgatgaacaggaagaacacggggaagaaaatgctgaggcagagggacaacatgatgagcatgatgaagacgggagtgatatggagctggacttgttagcagcagctgaaacagaaagtgatagtgaaagtaaccacagcaaccaagataatgctagtgggcgcagaagcgttgtcactgcagcaactgctggttcagaagcaggagcaagcagtgttcctgccttcttttctgaagatgattctcaatcgaatgactcaagtgattctgatagcagtagtagtcagagtgacgacatagaacaggagacctttatgcttgatgagccattagaaagaaccacaaatagctcccatgccaatggtgctgcccaagctccccgttcaatgcagtgggctgtccgcaacacccagcatcagcgagcagccagtacagccccttccagtacatctacaccagcagcaagttcagcgggtttgatttatattgatccttcaaacttacgccggagtggtaccatcagtacaagtgctgcagctgcagcagctgctttggaagctagcaacgccagcagttacctaacatctgcaagcagtttagccagggcttacagcattgtcattagacaaatctcggacttgatgggccttattcctaagtataatcacctagtatactctcagattccagcagctgtgaaattgacttaccaagatgcagtaaacttacagaactatgtagaagaaaagcttattcccacttggaactggatggtcagtattatggattctactgaagctcaattacgttatggttctgcattagcatctgctggtgatcctggacatccaaatcatcctcttcacgcttctcagaattcagcgagaagagagaggatgactgcgcgagaagaagctagcttacgaacacttgaaggcagacgacgtgccaccttgcttagcgcccgtcaaggaatgatgtctgcacgaggagacttcctaaattatgctctgtctctaatgcggtctcataatgatgagcattctgatgttcttccagttttggatgtttgctcattgaagcatgtggcatatgtttttcaagcacttatatactggattaaggcaatgaatcagcagacaacattggatacacctcaactagaacgcaaaaggacgcgagaactcttggaactgggtattgataatgaagattcagaacatgaaaatgatgatgacaccaatcaaagtgctactttgaatgataaggatgatgactctcttcctgcagaaactggccaaaaccatccatttttccgacgttcagactccatgacattccttgggtgtatacccccaaatccatttgaagtgcctctggctgaagccatccccttggctgatcagccacatctgttgcagccaaatgctagaaaggaggatctttttggccgtccaagtcagggtctttattcttcatctgccagtagtgggaaatgtttaatggaggttacagtggatagaaactgcctagaggttcttccaacaaaaatgtcttatgctgccaatctgaaaaatgtaatgaacatgcaaaaccggcaaaaaaaagaaggggaagaacagcccgtgctgccagaagaaactgagagttcaaaaccagggccatctgctcatgatcttgctgcacaattaaaaagtagcttactagcagaaataggacttactgaaagtgaagggccacctctcacatctttcaggccacagtgtagctttatgggaatggttatttcccatgatatgctgctaggacgttggcgcctttctttagaactgttcggcagggtattcatggaagatgttggagcagaacctggatcaatcctaactgaattgggtggttttgaggtaaaagaatcaaaattccgcagagaaatggaaaaactgagaaaccagcagtcaagagatttgtcactagaggttgatcgggatcgagatcttctcattcagcagactatgaggcagcttaacaatcactttggtcgaagatgtgctactacaccaatggctgtacacagagtaaaagtcacatttaaggatgagccaggagagggcagtggtgtagcacgaagtttttatacagccattgcacaagcatttttatcaaatgaaaaattgccaaatctagagtgtatccaaaatgccaacaaaggcacccacacaagtttaatgcagagattaaggaaccgaggagagagagaccgggaaagggagagagaaagggaaatgaggaggagtagtggtttgcgagcaggttctcggagggaccgggatagagactttagaagacagctttccatcgacactaggccctttagaccagcctctgaagggaatcctagcgatgatcctgagcctttgccagcacatcggcaggcacttggagagaggctttatcctcgtgtacaagcaatgcaaccagcatttgcaagtaaaatcactggcatgttgttggaattatccccagctcagctgcttctccttctagcaagtgaggattctctgagagcaagagtggatgaggccatggaactcattattgcacatggacgggaaaatggagctgatagtatcctggatcttggattagtagactcctcagaaaaggtacaggaaaaccgaaagcgccatggctctagtcgaagtgtagtagatatggatttagatgatacagatgatggtgatgacaatgcccctttgttttaccaacctgggaaaagaggattttatactccaaggcctggcaagaacacagaagcaaggttgaattgtttcagaaacattggcaggattcttggactatgtctgttacagaatgaactatgtcctatcacattgaatagacatgtaattaaagtattgcttggtagaaaagtcaattggcatgattttgctttttttgatcctgtaatgtatgagagtttgcggcaactaatcctcgcgtctcagagttcagatgctgatgctgttttctcagcaatggatttggcatttgcaattgacctgtgtaaagaagaaggtggaggacaggttgaactcattcctaatggtgtaaatataccagtcactccacagaatgtatatgagtatgtgcggaaatacgcagaacacagaatgttggtagttgcagaacagcccttacatgcaatgaggaaaggtctactagatgtgcttccaaaaaattcattagaagatttaacggcagaagattttaggcttttggtaaatggctgcggtgaagtcaatgtgcaaatgctgatcagttttacctctttcaatgatgaatcaggagaaaatgctgagaagcttctgcagttcaagcgttggttctggtcaatagtagagaagatgagcatgacagaacgacaagatcttgtttacttttggacatcaagcccatcactgccagccagtgaagaaggattccagcctatgccctcaatcacaataagaccaccagatgaccaacatcttcctactgcaaatacttgcatttctcgactttacgtcccactctattcctctaaacagattctcaaacagaaattgttactcgccattaagaccaagaattttggttttgtgtagagtataaaaagtgtgtattgctgtgtaatattactagcaaattttgtagatttttttccatttgtctataaaagtttatggaagttaatgctgtcatacccccctggtggtaccttaaagagataaaatgcagacattccttgctgagtttatagcttaaaggcctaaggagcactagcaacatttggctatattggtttgctagtcaccaacttctgggtctaaccccagccaaagatgacagcagaacaacataatttacactgtgatttatctttttgctgagggggaaaaaatgtaaatgttctgaaaattcactgctgcctttgtggaaactgtttcagcaaaggttcttgtatagagggaatagggaatttcaaaataaaaaattaagtatgttctgtgttttcattttaactttttttatggtgtttaatttgtggttggctgcaactgtgtatcatgtatatggaacttgtaaaaaagttctcgacattcagatcttaagagatgaaatcacttttacctataaaaaccacttttattgcggtttgactgcattgagc

SEQ ID NO: 102872 - DNA, 9008 bp, Artificial Sequence
  derived and/or modified sequence
cccgtttgcccctcccccgccgctccggagcggagcctgcgagacggagaaactggggcagaagtgaagatggcggcggcagcttctcgctagtgacgcgcggtgcgggctcatctccttcccctccttcctcacctcccctagtccggaccccgtccgccgccgggaccagaccgtccccgtagcccgcagccagcagccgcccctctcctcccccggccgcccctctcccaacgcccgtctgccgctggccggcggcgcgcccctggtcccggccgcctgcctcgcactccgcgctgtcgccgggggagcgggtggcgtgtggattcgccctcctgcccgcccctccgggccgcggacacacgcccggcagggaggcggcggcggcccctgcgtatttgcttccctccatttggggactgggaggcggcggcggctgtgggttttggggaggggtagagggctggggggcgggcgagagcgggagggggccgccctcgagtggaggacgagaaggaaagcaccatgacgtccatccatttcgtggttcacccgctgccgggcaccgaggaccagctcaatgacaggttacgagaagtttctgagaagctgaacaaatataatttaaacagccacccccctttgaatgtattggaacaggctactattaaacagtgtgtggtgggaccaaatcatgctgcctttcttcttgaggatggtagagtttgcaggattggtttttcagtacagccagacagattggaattgggtaaacctgataataatgatgggtcaaagttgaacagcaactcgggggcagggaggacgtcaaggcctggtaggacaagcgactctccatggtttctctcaggttctgagactctaggcaggctggcaggcaacaccttaggaagccgctggagttctggagtgggtggaagtggtggaggatcctctggtaggtcatcagctggagctcgagattcccgccggcagactcgagttattcggacaggacgggatcgagggtctgggcttttgggcagtcagccccagccagttattccagcatctgtcattccagaggagctgatttcacaggcccaagttgttttacaaggcaaatccagaagtgtcattattcgagaacttcagagaacaaatcttgatgtgaaccttgctgtaaataatttacttagccgggatgatgaagatggagatgatggggatgatacagccagcgaatcttatttgcctggagaggatcttatgtctctccttgatgccgacattcattctgcccacccaagtgtcattattgatgcagatgccatgttttctgaagacattagctattttggttacccttcttttcgtcgttcatcactttccaggctaggctcatctcgagagagagactctgagctgttgcgtgaacgtgaatccgttttacgtttacgtgaacgaaggtggcttgatggagcctcatttgataatgaaaggggttctaccagcaaggaaggagagccaaacttggataagaagaatacacctgttcaaagtccagtatctctaggagaagatttgcagtggtggcctgataaggatggaacaaaattcatctgtattggggctctgtattctgaacttctggctgtcagcagtaaaggagaactttatcagtggaaatggagtgaatctgagccttacagaaatgcccagaatccttcattacatcatccacgagcaacatttttggggttaaccaatgaaaagatagtcctcctgtctgcaaatagcataagagcaactgtagctacagaaaataacaaggttgctacatgggtggatgaaactttaagttctgtggcttctaaattagagcacactgctcagacttactctgaacttcaaggagagcggatagtttctttacattgctgtgccctttacacctgcgctcagctggaaaacagtttatattggtggggtgtagttccttttagtcaaaggaagaaaatgttagagaaagctagagcaaaaaataaaaagcctaaatccagtgctggtatttcttcaatgccgaacatcactgttggtacccaggtatgcttgagaaataatcctctttatcatgctggagcagttgcattttcaattagtgctgggattcctaaagttggtgtcttaatggagtcagtttggaatatgaatgacagctgtagatttcaacttagatctcctgaaagcttgaaaaacatggaaaaagctagcaaaactactgaagctaagcctgaaagtaagcaggagccagtgaaaacagaaatgggtcctccaccatctccagcatccacgtgtagtgatgcatcctcaattgccagcagtgcatcaatgccatacaaacgacgacggtcaacccctgcaccaaaagaagaggaaaaggtgaatgaagagcagtggtctcttcgggaagtggtttttgtggaagatgtcaagaatgttcctgttggcaaggtgctaaaagtagatggtgcctatgttgctgtaaaatttccaggaacctccagtaatactaactgtcagaacagctctggtccagatgctgacccttcttctctcctgcaggattgtaggttacttagaattgatgaattgcaggttgtcaaaactggtggaacaccgaaggttcccgactgtttccaaaggactcctaaaaagctttgtatacctgaaaaaacagaaatattagcagtgaatgtagattccaaaggtgttcatgctgttctgaagactggaaattgggtacgatactgtatctttgatcttgctacaggaaaagcagaacaggaaaataattttcctacaagcagcattgctttccttggtcagaatgagaggaatgtagccattttcactgctggacaggaatctcccattattcttcgagatggaaatggtaccatctacccaatggccaaagattgcatgggaggaataagggatcccgattggctggatcttccacctattagtagtcttggaatgggtgtgcattctttaataaatcttcctgccaattcaacaatcaaaaagaaagctgctgttatcatcatggctgtagagaaacaaaccttaatgcaacacattctgcgctgtgactatgaggcctgtcgacaatatctaatgaatcttgagcaagcggttgttttagagcagaatctacagatgctgcagacattcatcagccacagatgtgatggaaatcgaaatattttgcatgcttgtgtatcagtttgctttccaaccagcaataaagaaactaaagaagaagaggaagcggagcgttctgaaagaaatacatttgcagaaaggctttctgctgttgaggccattgcaaatgcaatatcagttgtttcaagtaatggcccaggtaatcgggctggatcatcaagtagccgaagtttgagattacgggaaatgatgagacgttcgttgagagcagctggtttgggtagacatgaagctggagcttcatccagtgaccaccaggatccagtttcaccccccatagctccccctagttgggttcctgaccctcctgcgatggatcctgatggtgacattgattttatcctggcccccgctgtgggatctcttaccacagcagcaaccggtactggtcaaggaccaagcacctccactattccaggtccttccacagagccatctgtagtagaatccaaggatcgaaaggcgaatgctcattttatattgaaattgttatgtgacagtgtggttctccagccctatctacgagaacttctttctgccaaggatgcaagagggatgaccccatttatgtcagctgtaagtggccgagcttatcctgctgcaattaccatcttagaaactgctcagaaaattgcaaaagctgaaatatcctcaagtgaaaaagaggaagatgtattcatgggaatggtttgcccatcaggtaccaaccctgatgactctcctttatatgttttatgttgtaatgacacttgcagttttacatggactggagcagagcacattaaccaggatatttttgagtgtcgaacttgtggcttgctggagtcactgtgttgttgtacggaatgtgcaagggtttgtcataaaggtcatgattgcaaactcaaacggacatcaccaacagcctactgtgattgttgggagaaatgtaaatgtaaaactcttattgctggacagaaatctgctcgtcttgatctactttatcgcctgctcactgctactaatctggttactctgccaaacagcaggggagagcacctcttactattcttagtacagacagtcgcaaggcagacggtggagcattgtcaatacaggccacctcgaatcagggaagatcgtaaccgaaaaacagccagtcctgaagattcagatatgccagatcatgatttagagcctccaagatttgcccagcttgcattggagcgtgttctacaggactggaatgccttgaaatctatgattatgtttgggtcgcaggagaataaagaccctcttagtgccagcagtagaataggccatcttttgccagaagagcaagtatacctcaatcagcaaagtggcacaattcggctggactgtttcactcattgccttatagttaagtgtacagcagatattttgcttttagatactctactaggtacactagtgaaagaactccaaaacaaatatacacctggacgtagagaagaagctattgctgtgacaatgaggtttctacgttcagtggcaagagtttttgttattctgagtgtggaaatggcttcatccaaaaagaaaaacaactttattccacagccaattggaaaatgcaagcgtgtattccaagcattgctaccttacgctgtggaagaattgtgcaacgtagcagagtcactgattgttcctgtcagaatggggattgctcgtccaactgcaccatttaccctggctagtactagcatagatgccatgcagggcagtgaagaattattttcagtggaaccactaccaccacgaccatcatctgatcagtctagcagctccagtcagtctcagtcatcctacatcatcaggaatccacagcagaggcgcatcagccagtcacagcccgttcggggcagagatgaagaacaggatgatattgtttcagcagatgtggaagaggttgaggtggtggagggtgtggctggagaagaggatcatcatgatgaacaggaagaacacggggaagaaaatgctgaggcagagggacaacatgatgagcatgatgaagacgggagtgatatggagctggacttgttagcagcagctgaaacagaaagtgatagtgaaagtaaccacagcaaccaagataatgctagtgggcgcagaagcgttgtcactgcagcaactgctggttcagaagcaggagcaagcagtgttcctgccttcttttctgaagatgattctcaatcgaatgactcaagtgattctgatagcagtagtagtcagagtgacgacatagaacaggagacctttatgcttgatgagccattagaaagaaccacaaatagctcccatgccaatggtgctgcccaagctccccgttcaatgcagtgggctgtccgcaacacccagcatcagcgagcagccagtacagccccttccagtacatctacaccagcagcaagttcagcgggtttgatttatattgatccttcaaacttacgccggagtggtaccatcagtacaagtgctgcagctgcagcagctgctttggaagctagcaacgccagcagttacctaacatctgcaagcagtttagccagggcttacagcattgtcattagacaaatctcggacttgatgggccttattcctaagtataatcacctagtatactctcagattccagcagctgtgaaattgacttaccaagatgcagtaaacttacagaactatgtagaagaaaagcttattcccacttggaactggatggtcagtattatggattctactgaagctcaattacgttatggttctgcattagcatctgctggtgatcctggacatccaaatcatcctcttcacgcttctcagaattcagcgagaagagagaggatgactgcgcgagaagaagctagcttacgaacacttgaaggcagacgacgtgccaccttgcttagcgcccgtcaaggaatgatgtctgcacgaggagacttcctaaattatgctctgtctctaatgcggtctcataatgatgagcattctgatgttcttccagttttggatgtttgctcattgaagcatgtggcatatgtttttcaagcacttatatactggattaaggcaatgaatcagcagacaacattggatacacctcaactagaacgcaaaaggacgcgagaactcttggaactgggtattgataatgaagattcagaacatgaaaatgatgatgacaccaatcaaagtgctactttgaatgataaggatgatgactctcttcctgcagaaactggccaaaaccatccatttttccgacgttcagactccatgacattccttgggtgtatacccccaaatccatttgaagtgcctctggctgaagccatccccttggctgatcagccacatctgttgcagccaaatgctagaaaggaggatctttttggccgtccaagtcagggtctttattcttcatctgccagtagtgggaaatgtttaatggaggttacagtggatagaaactgcctagaggttcttccaacaaaaatgtcttatgctgccaatctgaaaaatgtaatgaacatgcaaaaccggcaaaaaaaagaaggggaagaacagcccgtgctgccagaagaaactgagagttcaaaaccagggccatctgctcatgatcttgctgcacaattaaaaagtagcttactagcagaaataggacttactgaaagtgaagggccacctctcacatctttcaggccacagtgtagctttatgggaatggttatttcccatgatatgctgctaggacgttggcgcctttctttagaactgttcggcagggtattcatggaagatgttggagcagaacctggatcaatcctaactgaattgggtggttttgaggtaaaagaatcaaaattccgcagagaaatggaaaaactgagaaaccagcagtcaagagatttgtcactagaggttgatcgggatcgagatcttctcattcagcagactatgaggcagcttaacaatcactttggtcgaagatgtgctactacaccaatggctgtacacagagtaaaagtcacatttaaggatgagccaggagagggcagtggtgtagcacgaagtttttatacagccattgcacaagcatttttatcaaatgaaaaattgccaaatctagagtgtatccaaaatgccaacaaaggcacccacacaagtttaatgcagagattaaggaaccgaggagagagagaccgggaaagggagagagaaagggaaatgaggaggagtagtggtttgcgagcaggttctcggagggaccgggatagagactttagaagacagctttccatcgacactaggccctttagaccagcctctgaagggaatcctagcgatgatcctgagcctttgccagcacatcggcaggcacttggagagaggctttatcctcgtgtacaagcaatgcaaccagcatttgcaagtaaaatcactggcatgttgttggaattatccccagctcagctgcttctccttctagcaagtgaggattctctgagagcaagagtggatgaggccatggaactcattattgcacatggacgggaaaatggagctgatagtatcctggatcttggattagtagactcctcagaaaaggtacaggaaaaccgaaagcgccatggctctagtcgaagtgtagtagatatggatttagatgatacagatgatggtgatgacaatgcccctttgttttaccaacctgggaaaagaggattttatactccaaggcctggcaagaacacagaagcaaggttgaattgtttcagaaacattggcaggattcttggactatgtctgttacagaatgaactatgtcctatcacattgaatagacatgtaattaaagtattgcttggtagaaaagtcaattggcatgattttgctttttttgatcctgtaatgtatgagagtttgcggcaactaatcctcgcgtctcagagttcagatgctgatgctgttttctcagcaatggatttggcatttgcaattgacctgtgtaaagaagaaggtggaggacaggttgaactcattcctaatggtgtaaatataccagtcactccacagaatgtatatgagtatgtgcggaaatacgcagaacacagaatgttggtagttgcagaacagcccttacatgcaatgaggaaaggtctactagatgtgcttccaaaaaattcattagaagatttaacggcagaagattttaggcttttggtaaatggctgcggtgaagtcaatgtgcaaatgctgatcagttttacctctttcaatgatgaatcaggagaaaatgctgagaagcttctgcagttcaagcgttggttctggtcaatagtagagaagatgagcatgacagaacgacaagatcttgtttacttttggacatcaagcccatcactgccagccagtgaagaaggattccagcctatgccctcaatcacaataagaccaccagatgaccaacatcttcctactgcaaatacttgcatttctcgactttacgtcccactctattcctctaaacagattctcaaacagaaattgttactcgccattaagaccaagaattttggttttgtgtagagtataaaaagtgtgtattgctgtgtaatattactagcaaattttgtagatttttttccatttgtctataaaagtttatggaagttaatgctgtcatacccccc
